United States Patent Application Publication US 2019/0136325 A1 - sequence listing, part 2

SEQ ID NO: 6122 - DNA, 7861 bp, Artificial Sequence
  Description of Artificial Sequence: Synthetic polynucleotide
tygttttttyggaagtygtgtttttttttttttgttttttttattttygagtttttgtatttttgygttttygattyggttttttatttgttttttttatttyggtatygttttgttttagtttttttygatttttgtttygttttttttgtttttagaagtttgygtttttgttttttttatygttyggttttttggtgttttyggygtttttttygtygttttygtygttttgattagtttgggttgtggygttggtatygttggtttggggatyggggtgtgggygatggaagggggttygagaggygtaggggaggggttttttttttttygtttttgggygtttggggagattygygtgttagttatttgtyggtyggggygtygatttygygtttaygtattttaygtgggygtttyggggygygtttttgtttttttygagttttgaaagttaattatattgggaggggataggggtggggtgggagagggggtygttgtttttatttattgagtygaggtygttatttygtyggtagtttygygtaggtttggtttygagttaygtttgttgaaatygtttttttyggtttygtttttattygttttggtagttagtygygtttttgtaygygtyggygggggygttttggaattttgaatygttttayggggaaygggggtggggggaggggagyggygygggttttaygygaggaaggaattttttgggttattgygaaagattgaggtttagaaagttagagagagaygtgygaggaggaagyggagagggtgtgygaagttggagagggagtyggagygttagygaaagaggggagygttggggaaggaggaagagaaggagagggggagaagagagaygyggatgttgggygygygayggtagygggyggaggaggggagyggtygggaatttgygygtaggggaagttaggayggagygtagtatyggtaggggagggttgtygaggggttgtgtygaggagttygggtgggggyggttggatygygggtygygggatttatagatagtgygaggyggygygggggtttttttttttatgyggggttggggygtaggggttgggyggggygggtgggygtttgagygyggygygggygtatttttygttttttttttttygggtttatttyggtygatygatatttgygygggatttgttttygtygttaatatttttttaatgagttygttaggtttaaagygagygygatttgttttttagggtggattttttttyggtagatgtttygggaggaggaggygygyggagttttygggaggggggataaattttttttttygaggggygagaataggagatttttttttaaagtttaaaagaaagaygggtttttattyggtttttaaaaatgtatttttyggyggataatgggtttttttttgygtttttgagggtyggyggggygggtagggyggggattygtgygttttggtttygtttgatygattygtatttttttttttygtatttaggttygggttttagagygagggygtaggagtygygaagtyggtygttttttygagygtttttttgaagygtattgtygggatttggttttttyggagttaagtttyggygtatyggygagaaygaaagygtygtgyggggttttgggttgttttataygttttygtttttataggtgttttagtygggtygaagggaygygygttggtgttttaaggggaggaygaayggattttygggtttgggtygyggttttttttttttyggygtttygttttgagyggggtaataattagaaattagttaatttygggyggttgtygggttttgagattgttttgttygtttyggtttagttattttttygggtygtttttgttttttttttttattttttttttaatgttttttygtggggtygtyggtttgtygyggyggttttttttttattttygtgggtttaggggaagagggtattygggyggygaggatgattttygaagagtygyggtaaattgattygtttygttyggagtyggggtygygtgaatgggggttygggyggyggyggtagyggagaagaggataaagatgttttttttgaaagggggagggggygyggagygggaagyggggttatttatttttggttyggtttttygggaagtygygtygaagaaagggggtygaggtttatttaagttttaygagtygtttataatggatygatatattgagggtttttttattaaygtttatgaatattaaagagatygttaagtggyggttagygggygaggggggygayggagtttgagagtttyggttyggtygaggggagggggtttttgygygagtatatttygygtttgggtttygyggaaaatgataaaataataygggttattygttgggaaagttyggaatgttttttttygaaattttttttyggggagatgtgagtatagggttttgttttttattttaatgtattttgagattgggygttatttaygggttttttttttttygggygggggtttaggtgggttttgtygttagattagaagtataaaatgtgagygyggtggagatttgggygtattagttgggaggaygttttgygtttygtttttgttyggtttttagtattgtttttygggtttgygggttyggaggagaggaatgggattttttggtygtagttygagttygtggttattgygttagyggaatttaagtttttaattttaagtyggggtttaggatttaaaygttgtattttagtayggaggatgtatagatttgagggtttttygtagtgggaygtggttttggagagggtaaaattttyggggttgtygtggggtaaagtgattttatttaaagagagattaagtaaagaaattttagtttataaagtttaatttaaattattgtatagatagggatatygaggtttagagaggaaaggggtagtttataggatatatagtagtttttatttttttttggtgttttggaggaattgaggtygttttyggggtttgggagttgtygtagygtttggtttttggtagygtttttygaygtygtttttttygtttttagtattttgttttttttatttaggtttttttagaagttaagaagtaggtttyggtgaggtttttttgtaggagttatyggattttataygtttttttagattygagttttggttagggagtygatgygatttataagttgygtygaaaaatgagtggagggttyggygattttaatttatttttttttttagtagygttgttttttgttggygttttgtttaayggttttgttttttgttaggtgtgtttttttttgggttttagtttygggyggattyggaygtagggtttgaaggttagttatygtygtttttttttttttgygttttaayggggaygggggatgtyggagattattggtaggaattggggattaggggtttggagtttggaygttaggtgtgagatttttttagttaaggygygttygggtggtggaggggygtttatgttaataggygtttggatagggtttygtttatgggaggttagttygttgtttttttatttaagtttttygygttgaggagaaggtttagggagtttatatagtttagyggagattaattygtgagtttgatttaygtygagagggtttaggtatttttgttagyggtatttgaaattgtaggttggtgatgggagttagaagtgyggtaggtggggtgagtttttttatttagtatgttagggtttggggttygaggtttgaggttgatattggggagtygygaagtttgtaggaagyggggtttttygttgggtttagtagttatttgtttygggagaggggatygttgggtttygaggtgtttygaaatygtygtaaagtaagtttgtttttgggatgatgggtaggaggaatagaggagaggaagggaaagaagagagaggtagaggagaaagaaagaattaggaggtaagaaggaaggggygtygtaaygttatyggtttttygaggttgtagtttagtaaggagtyggaaagtygggtygtaagtygaattygtattgaggtttttygyggagttgtttgtagtttttgagggatttygtttttaggtaygtttgtttttatttaggaagggtttygggattttttttaatttttttatatttygtaggaaattttttttttagagataggttgttagggygatttttgttygtttatttygattttygatttggtttygtaagggtygggagtttggttttttatgaagttgttttaggtygggattagttttagtttygayggtygttgyggtttygtttyggtagtttygtgagttygyggaggagtttygtattygatygtgtatagygatygagttggygyggttygtatgaagygaagygtyggttttagtagygtagtttgagtaggggattygygtggtaattagggttgygygygagttyggggygattgtggyggttyggggagtgtagggtyggagagggaagaggaygygggttttggtyggggagggagagyggtgtagggttgggtyggttagtyggggtagtaaagtaaaggtgaaygtygggttgggttaggtyggtgaatatagattaggtttgaggggagygyggggttygaagttaggygtttttttttgtttagtttggtttttggagttttagagagtttygtygtatttttttttttttttygtttttttttttttttagagtyggttgagtttttttttttgttttgygttttttayggggagagaaggaaaaataggaggggggaggaaggattaggaaggggagagaggagtggaggggtattgtttggagyggttygygygttttygtttttygygttttygygaygaaggtttttygagtttagtygggtataataagtttgtttttygaygttagggggttattaataattaattaggagggttattgyggtttttataaaggygttgagattttgttaaggggaagayggtttyggtygagtgtgygagaggttagygygygtttgagttttttgttgtygtttttttgtaattattygttttttatttattttgtatttttygtattygttttygtttttattygygtttttttatttttygygtygtttttgttatttttatagattttattatttttttttttttttttttttygttygttttttttttagtygtttttttatttttygtttttttttgygtttttttttttttygttttttttttgttttggttttttttttatygtagygtttttttttygttttttgggtttttttttygttygtttatttttttygtyggttyggtygtttttyggygtyggggagtttygggtygtttatgatgggtttygtgttttyggttgaggttttggtgtttaagatygggttgaaggygtygggattggygttggtygaggttattattttygatattttgtatagttttttgtayggtygttggygtaaygtgttyggggagtagtttttygaggataagagttattaygttagttttaagatagtttttatygtygaggtgttggygtagttttttttyggyggtgagtttagtygtyggagttyggygtaattttttttttyggygatttttattttygttttggygatgygygagaygyggttgggatattyggtttygttgttattygygttaatttgggttttttyggygttyggtgtattttagtttttttatgggttaaattaggaygygagttattaagtagtttygtagtttattyggtttaaggatygatttyggygatttygtygttyggtttygaygttttygtyggttttttttttttttttttgygtttgagttggygggttttyggtatttatagttttattaggygtgtaatagtagttgatttaaaaagaaggggttttaaatttatttagttaatttgggtttgatttaygaaagtttttatttaaattaagaattttaaaaggtagtyggggttggggagggggtggagggagggygggyggggagaaaaagtygyggggagagygagggagagaaagagagagygagaaaagttttttttttttaagatgttttaagtttttattttttatttattaattygtaaataatatttttttttggttttggtatttttgygygtygtttttttttttttttttaygatttttgttttttttttaatttatygtgaagattaattttatttttatttaygttatgttaattatttaattttttttttttgtaaggggaatttttyggttttttttaaataagtttttttygtattgagttataatttattgttatagtatttttttagggttaatgaatttagaattagtaatttttttygaatggagtygaatgaatgygattattttaatagygtgataaattgttygtygygtygtaatggatatygtttaattttttttttttagtyggttygttygtygggtatttttttaggtagtttagaggggaattttgtaagatatggaggtygtttttgtgygtttygtygtttttagttttgtygtagatgttygataggggaattttyggggagttgggggtygtygyggttttttttygtttagagagatgatatyggggtttgtttgagttygggygtygttttttttggtattttagggtttgggagtagagagggattygggygygttyggggttatatagygagygtagagtttggttagttgttgtyggtgtttttttggtatttttaatatttgttagttygaggtttgtttttagygttgattayggttyggtttttttgttagtgtttagagtttggatatatagtgggttttyggaagtygattaggygaaagagttttyggttggtttttatttttttgtaggatttggttttagtttttttgtgtataaaatygttygttgtygttggtttattaatttttaaatttattyggggtagaggatggaagaagttgygaatgttttgagaattygyggagagattaaaaatttatttttaaaaatgatttttaaygtattattygttttttagggtayggagggtttttaggttgtaaatagaggagaggtygttgagttttygtatattygattttttttatattygggtggtttttttggatttggggtygatttgggtttggttggtttgggtaggatygaagtyggggtttyggyggggaaggaagggtygggtttyggttgtttygggttttgatyggtttttttggtttygtygtygtagaagtgtagaagttgtttagtttggtgttgtttgyggaggtgattatygtttagagttttatttttggygagggtttyggtattttttttaagaygtggattaaggygggaatygagatgggtttttttatyggtygygtgatygtttyggagtaygtggatatttgtaagaataataattttatgtgggaggtaygygygggttggggtagaggggygtaagggtyggygaggggygttggtygygggtaggattygggygttyggtygtygtygtttttattygggttgagagyggyggatatttttggtttggaygttttttgagtygggattttaagtygttygagtttggagtttatttygtttttaggttttttttaattygtgtygaaaattyg

SEQ ID NO: 6123 - DNA, 1434 bp, Artificial Sequence
  Description of Artificial Sequence: Synthetic polynucleotide
tygggtgtgygtttttttagggtttttattgygtatygygggttayggtagattattttagttttygttttgttgtgtaggtgttaggagtgtyggttggtttttttttttttaagtaaggttttagggtatygyggttgttttgggatygtaggggygtttttagttttttatygatgtttygaygtttttttggygttggaggttttygygagtttggttgtttttyggagtttgttttgtttgttgggttttaggygayggtttaggttggttgggattttygaattatygyggaaaagggttttagtaggtaggayggygtygtttttttgtyggtaatttttgttttaaagyggattttttgyggggatyggagagggatgtttyggygtgaggatgggagaagtttygggaygggagggtygygggtygtgtttttagttggagttttygygtygtygtygggtattttatgatttgggggtggtggtgtgttygtttttttatgttattttgattttaatttttgggyggattggagtttgtagatttygttgttagtagttagggggyggyggggagtygagygagaggaaaaatttatttattttttgggyggattgygtyggtttygttyggtygagtttygtttttyggtygyggttttygygygtagttygygtagygtttagagtyggayggygtttttyggtggyggyggaggagttyggagggaygtagtygggtaaggtagggygtagggygggyggygygaggygtagggygyggygggtagaggttatttggttattttttttggygttyggggaaggtgyggygatggtyggggygygyggggyggyggyggyggygggygggyggyggygggtygagggggygyggggatatagttaggygtttttgttygtygyggtgttygtygtttgaaggtygtttgggygygggagtyggtgttagttyggagygggygttggaggtagttygaggygygatgtyggtgtygttgtttaagatyggggtygtgttgagtattatggttatgattattaattggatgttttagaygttgttttygttggtgggttttaatattattaagttttyggyggtyggyggygggaygttggatygtagtatyggygtaagtgygttygtyggtygttttggygyggttttttttttttttttttttttttttttttggttyggagtttygggttgggygggygtygygygggattygagtygtttagggaggyggyggggagtagggygggtaagggtaggygtygygggtyggygtagyggtggygattttgtttttygtttttttagtttgggttattttattttygttygygygtttttggggyggygtttttttygtttgggtttttygtygyggggtyg

SEQ ID NO: 6124 - DNA, 5053 bp, Artificial Sequence
  Description of Artificial Sequence: Synthetic polynucleotide
tygygggttttttgggatttttgygatttygtygaygygygttygttttttttygagtttygygattttttygtttatyggggaaggagattttagygtygttgttttgttttttttgaaygttgtttttgttygatttggagtygtygygggagygttttatgttgyggaaatattgtttttagygttgtyggtyggygtttttttttagttttttttttttggttyggyggttttggaattaaatttgggggyggggyggggtgagyggtygttyggttttgygggggtttttaaggtygygggygggagggaagtaggggygagygttgatttgtattaygygtatgtttaggttygtttyggaygagagttgttygygtaygtggygygtyggtttgggygaggtgttgtaagygttttttagygtttttagttgtttggyggtgatggtygtgygyggtygtttggtygtggtttyggtttttgygyggygggygagyggtgaggygyggtagttttttyggtttyggtyggatttttagtttttttatttyggtyggygyggggaygtyggggttttaggtgtttatttttatttygttttataggtttttyggaaggygygggygttgggagygattggtaaaaaygggtagtattygggttggggtggagggggygtyggyggagggygggttttgtygygggggygggggyggygttttttttaaaatygtatttttayggygttttygtttttagttttggtttttttttttaagtattttgattttttygygggtttttttttattttaagggtgtgggtatggtttagttttygyggttaagaatttagggygataatttygattaggggygaaaagtygtatatttyggatygaaygaagyggttygggaygygggtttgttygtgatttygtygttttyggtttyggttttttgttgtttatatygttttagtttaggtttttttagtgagygtttggggagagaattttttyggaygtttttttgggygtggttttagttttattttttttagattaggaaaggtgggagygtygttttttyggttgatttygttgtttggyggtttygtagttygttttgtataygagtyggttgttttttatgaggtagaattygtygttygtggttagttgtygtttgtataygaygtaggtaaagtagtgtaggtggtataygaagttttgggygyggygtattatttgygtgggygggatgtttagttggtaygyggygtatttggtttygaagygtttgygggaygtatagggtygggtttagygyggaagygygaggtttatttygtttygagygggttggagagaggtaagyggttgtttgggaaggyggtttyggaggaaggttttgttyggttttgtagggtggtygttagtttggtygtyggggtagagttgtttatttttattgagaagggaattttaattttagaaagatttyggggagtttagtygttattgtttgtaggatttatgttggatttgggaaggtgaattyggagggagaggatttatttggggttagttttttatattttatagttggagttatgaaggttattgggttagagtygttgggtgttagtattaggaattaaaatattattaatttyggaggaattaagtttagtagaattttataaataggggtgtattttttttaatgattgtttttgtgatttaggtaataaattgtttttttttttaaataatatttgttgatgttttagttaggtttagttatttagggagtatttatggagaggttttatttttaatttggttaggttatagggtgttttgtttgggtgataggagtgggttgggattgygagagaygtaggtttygagggtttggttttggtgattgtgaggggaggagtttttggggtaggygtgtttttygtttttatattgaggtgaggtttyggggtttatttgaaaaagtygtttttgtagtaaaygtttttttttyggttgaagtagygttyggttagtggygtgtggtagtygttgtatttgagatatttgttgtgttagtggyggtttagagttttgaggatgaagyggtttaggatgtgttggttatagttagygtatagygggatttttgtgggtaygaggaagttttgggttatttygtagattaggaggtagtgaagttatttttttattttaaygygagttagtttttttttyggtttataggatttagggttgtygaggggtttttttttttttatatatttttttttttagttagtttaagtggtttygtaagtttygggagtgtgtaggtatygtattttatgttaggagttaaggggaaattgatatyggtttaaaaatgtgtgtgagtaagaaagtagtttaggttattttaygaggttgaatatttaattataaaatgttgttagtgttaagaagggtgtatgtggagtttaaatgaaaattttattttagggggatttgttttttgaagttyggtaggaaatatagggaaaygggtttttattattatttggagttggggtattttatygggttttttttatgttaagygttatggttattttttttagggatttttygtaaatgtggttgttttgtttggtggttttgtttgtaggttttyggggtaaatattaatgttttttttattattgggtagtygtaaaattatttatgagtggattggataagtygatttattgtttttgtgttaggygtgggtgtttttaatatygttagagttatttaaaygtttggtttttygttgtttttgttttttatattttatttyggtattgtaggttttttggaggaattatattggggaggtttaagggtgttttgtgggagtttygagtttgtgagygggttttttaggtgttaagggttgaggattttttttttatttagaaaaagtttttggaagagaggagtgttygttgaagggatygggatttattgatatattgtattygtttttttggttgtggatttygtyggttttagtttattttttagtgggtgagagatattaggaaggggttttttygattttyggyggaaaaaattgggttgygtttttttaygtagtggygggaaatyggygatgaatgygtttygtattyggtaaaatygtagtttygggtgyggagygtygaggattygttgygygttyggggtttttatygtgggtagygatygtaggygaggattyggttyggagyggggyggttygataggtygatatagygyggatttagtatygyggatyggatagygtttyggtygtagttygtygtyggygttygygtygggtaaaagtygttttagtttatttygygtygygttygygattttagttttaygttgtatggygattttagttttggygggggtttttgtgttagggatggyggggtyggyggagtttggaygttagttygttygtttyggttagttttttygagygygggygygtagttttttttttttttttttttttttygttttttagttttygyggttaattttttttaggaatygtygaaaaataaataaataagtagggaatygygagtttttatagtttggatgtaatttttttttygtyggtyggttttttttattttttattggtttyggggtttttttttttattttgyggttttagttggttygggagtygaggagaattgtttaggttttttaagaattaaagtgttgggagttagagtggtgttattaggaagttggggggtttggagaagagaggtttttttttatagaygggttttgagyggggataaatygagygggtgtttgtgggygtagaygttgaaatttgatttyggggagatygayggtyggagtttagttygattttggtttttgtatttgattttgtttygttggaaygtggaaagagttyggttggggyggtttttttggggatttttttgtttygtggttattgtttygttattgttttttgygttttttttagtttagggagttggtttygggttgtagaggttttttaagtttattttggattttygagagttttttggtyggagtagygtagtgttataattttatttattttttgataatttaggttaggggttttgtaataaatataggttgaggygtttaggygyggaygtttyggggttttygygtttattttygtttagattttttagtttttgttagttttygyggttaggttyggaaaggtttgaggattttttggttttttyggtgtagttattyggttygggtatttatttyggygtaggttygtttttygygttagtagtgttagtagtaggtygtttttygtygattttygggtygggtttagtttttygygygtttttatgggtttygtygttyggygtygttattttttagtttygaattttttygggtttagygaygttatttygtaatagtttygaatyggygtttaagygatttygggtgttgttgggygttgygttygygggtygttttggggttyggagtttttggtygagyggagggyggagyggtyggggggyggggtygyggggyggggyggggtygggggtygyggagattagttygggttattgyggattttgagygtttttgygtygggatttgyggtgtttagaggtygtttygygtgttyggttygagggygggtatyggtaagggagggtttaggttagggtttttygttagygttygtttyggtttygtagttttttgygtyggagyggtttagaggtagaggtttgagttggagtataygttaggagggttaaggttttygggagaggggtygagaaggtagtagggttttttygtygttgaggtttggtttygggagtagtagatggtyggygggagtttaattygaaaygtagaaggggtgagtgtggygtygagggttgygtatyggaatygtaaggtgtyggatyg

SEQ ID NO: 6125 - DNA, 6343 bp, Artificial Sequence
  Description of Artificial Sequence: Synthetic polynucleotide
tygttttttattgtgygygatyggaggggtygttttgtagtgggygttgtgaygggggygtagttattgaygttttttggggtaatatttataaataaggtttaaatgyggttygtttttttaattgyggatattagagggygtagttttaggattaygtttttatttttttattttattyggaaaggggtttattygagtygatttygtygttattagtygggggaggggaggttttggagttttaygygggagttttygtygygggaattataattayggttaagtttttttggttygttygttttatygtagggagaggayggggggaygggtaggaygggygtttggatagttgggtttttttygtaggtgtttttgatttyggtatggaggaagygttygygttttyggtttaggttygtagttagggttgtttygttygttgygttttaggtaagtygggttagygtgggggagtagyggggtttgggttgyggagggggtygttttgattygygtttttttttagggtaaaagtttygtaaggtagtgtgagttggagtygttagtttggggattttttttaagatgattygtayggatttttyggatttgttggtgtygatygtgtattaggatattaaggtggygatttygggattygygtttaagtgttygttatgtgagygattygtggttyggtttgttgagttygygttttttaataagygttattgtygtagtttygattttttggaggygttggaygggtyggttatggagattttgtyggagttatygtygtyggagttygttgtgtygygygttyggattygygaagtygagttaygtygtygygttygttttaagagtgygtttygygygttttygggtttgaygttygygttygtttygtygtyggtgttgtttygtygagggygggaggtttagygtgyggygygggtygaggtatygtygygtygggagttygygtattyggygtttygygtttttgttaaygagttgtattttattaagttgtagtygtagyggggyggtttyggtygygtygygtttttgtgygtygtygygggtygttgygtatygttygagttattygygggtttygttttttaygtgygttgtygtttggatattaagttagaygaygtagtgttttagtaygttattyggggttygyggttttgygggtttatygaggtygygtattgggttygtttygtttygtagttttayggttttayggtgttygggtttygttatatggygttgtygygtatttygaygtttagygatttatattgtgyggattttygggygttttattgygaygggtttttgtttgggtttygggattaygtygagygtygtagtttgttttttattatttygtygggttttatttagtttttttatatagaggagttttaaggttttyggggtagttttgtagttagtttyggtttaattttygaygtttattattttaggttttattygttygaggagttttyggggtttagtttaaggygtatgggyggttattaygtaggagaggtgygtatttttttaatttaggaatygttttttygtttttattatggggaggttttaygagtttayggtttgttttaygggtttygttatgttttygaggagtttygggtttattttatygttygttttttttatayggaggatttyggaaggtatygygagygtgaygttttggttyggaygtattygtattygygtagtagttyggtttgggyggattggggttygygatygtatygtattttgtaagtggtgtygttttttgatttygattygttgttygttttttggtayggyggtatyggtattagttygtttyggttggttatygatagtygttattattygygtttttgggataatattttggtttyggggtygygtygagaagattygttgggtygyggtygtagttaygagaatttgttggggygygaggtgygggagtygygaggygtgtttttygaaggtyggygttygttygtygtygtgaatttgtttattttttttagaygttaygtygtattgtttttgttygagaygtygttgayggagaagggtygygygggygagggtttgggtygtaattggtaygtgaygttygagattattattattgataatgatttgygygttatygagygttygagygttagggtttgggagttgttygggggtygtaygyggttatttttttaygyggttttygayggttttatttttggtygttagyggagtttagagtagttggaygagtttattayggatttggttatygattygygatttatygtyggttaggttttagagttygyggtygattgtttgggtttttaattgygtygattgttggattygyggttygygggtttyggggttttygygttggygtygttaygttygtttttygtttyggtyggtagygtygaggagttygyggtttygggagaggyggtygaygygtttttygaatttagygtygaygaggaygatttgatgatttgttttaatgygygttgtyggygtatygagattatgtttaaygtttgtttttattttaagttttgttatagttgttatatttattattgttygygtttgtgtygtygygaggattgggaygtttataaggygygttgygtgtayggtygygtgggtagygtgtgtygttaygtattgtagttttgtygygatagyggttyggtgtatygygttttttygygtatygygygtgtyggttttttgtygygyggtygyggygtgttttttttgggttttttaagtttaggttyggtygataattttttgygttttggtttggaggggttgttgttattttttatttatttatygttgygtgagttggttatataygyggygtttttgggtagttaygygygygagttggyggtygttgggygtttttaygaatyggtagagtgttttttgtttagygtgttygtggtygtgggattyggtatygygttatyggggatatyggttttgttygygttygygttaygtagttaygggttaatagtgygtaagttygttaaggtagygttggyggtyggtagtttygygyggtygttttyggygyggagtygygagttygatatggagaygttgattttgaygttatygtygggtayggygggtttggattaggayggygaggygggtyggygygygygygaggtggtttttatttatatttagygygagttgyggttgygyggygtttttttgygttaygagttttygygygtttaygagtagttttgygagttygtygaggttaataggygttttaygtttattattatttattttayggatyggygtatyggtygtttttttatgtgtatgattatggtygttttygagtygygygygttygattgggtggttagygttaatttgttggaygatattatgtgaggygtygggtttattaggtttagtttaggygttggttygaattttgttttgtttatttaggtttygttyggtttatttagggtygttttygagtttygttagggttttatttygattttttttaggtttygtttttaattttttagttttttaagtttygtttagttyggtttttagtttygtttaggtttttatttttyggtttttygttttygtagtgttttttataggtttttygtttttttatttttagtaatttttttttttttttygggtttttttttttttttagttygttttygaggatttttagaagaagtyggttttygttttyggtgtttttygttgggaggyggggtgggtttgaggatygtygagttttgtttttattyggaggggttattattgtatagattttattygtagagattyggttttygtyggttygyggggttttygttggagttttttygatttyggttttttttygtttagaagttygaygtaattaaagtttagtttgttattttaaataygtttygtttygtttttygyggttgtgttgttttttygttggagaatattttggtygatttttgtgygttygtgtgygygagygygtttygtygaggyggtgggtagggyggayggtgygtagtgygttttygttggtyggagttagtatattaattaygttaygygttttgtygttttttygtttttagtygttgtagtttgggttttgtaggagttgggaaaaatygtagggaggtttttaggtygatatgtaagttttttagtygaaggggtaggggatttgaataggggaagtagagtatttgggtttggttagagttgatatttggttaggagaggaaggattaagggayggggygtttttaggtgggagtttggagggtaaagygtggtgygagtaggtgagggagagagttagttggtaagygtggaagtttattygagggggtttgatttgtttygagaggttttygtatattygttttggtygtaygtygtattgygggygtggaggygtaagttyggyggttyggtttttatttgttttttaagtgtattttggttygygtttagagttttttggagggtggggtatgygggagaggggtggaggttaaaygtaagggtttttttggagtttttagttttatttyggagttaggggagggggtattaagtgagagaaattgggtattttygttttygtttttgttttygtattyggtaygtttatttygttttygygygtttgtatyggttaggygtttygtttgtttattygtygtygygtttygygttttttattttagggtttttgtattyggttttatttttgagggtyggtygggaaygtttttggatyggaataatttttagggggtaagagttttygaattaagtaaaatagaatttgaatgtagyggttgtygttgtttttttgtatyggtagyggggttggggayggaagttttyggtyggtggagaggagaaagggagaggttttygggyggtggayggggaagagagggagtttttygggyggtggagggggtggagagygaggttttygggyggtggagagyggggaggggggaggttttygggyggtgggagggggagagagggaggtttttgggyggtgggggttayggggagggtggttttyggattaygtgygggataggaggttagggttggtaagttttttaggtttttttygttgttttagtttygygggtygtttaattgtttygttttaagggtgttatyggatttygttggagaggaattttttygttggttggattttattattatttattttygattttaygttttttttaagyggggttggyggagtygtaaggyggtaaggaattggattgygattggttagtaygtgtttyggtyggyggtataattggttgaggygttgggttttgggaagtatttttygaygggattggtygtygttttygtagagttygtttttygtagtataagyggttttygggtygggtgggaggaggggatttygggaggaggaatatggyggtggyggatttygtttttatttttgatgtggatatygatttygayggygtttttaagtatgtgttgattygagtttattyggtttttygtttyggggtttyggttgtagagagtaaggagatygtgygyggttataagtgggttgagtattatggtgagggygggatttgygggtatgttaggggtaygtttggygaggygggggyggggttggygggayggagayggggttgaygaggtaggggyggggttggyggggygggggyggggttgygggtygtagyggattgygttttgtttygagttttgtttttgttaggtttgatttaggttgaggttttgggygggaagggygtgatayggtttgatattttttttagtagttttttagttttygygtttttttyggttttattttttttygtttatttatttttgttttagttttaaggggtttygttttttttggggaaggggttgtttagagttgggattttagattttttyggttgggagtttttttygyggtttttaagggyggttagggtaygttttgaggtygtttttttattttagyggatatttaygataaagtgtygggygatatgtagaagtaaggttgygattgtgagtgtttgggyggygggygtattttttattagagttaggataagaagatttaygtgtayggttattttatggtgagtygtagtttygtttygttttgtyg

SEQ ID NO: 6126 - DNA, 1089 bp, Artificial Sequence
  Description of Artificial Sequence: Synthetic polynucleotide
gygggaaaygtygttttttttggygtttgagatttggggttttttttttatttggttttttygttttygttttagtttygtgygttttaggagggtatygtygagygtygggttttygtagggttygggagatttygyggatyggaggagggataggattttygagttttgggggygggaagggagggtggaaggaggaggggagyggggttggggaaagttggagtttyggtatttttttttygggttaggtygttttyggggttttgygttgygtttttaagtgttgggaagatttygyggggaaaggtttgaggaygyggtyggttggtataggtgtggyggttttagagggtyggggagaatttatggtttygaggttgtggattagaaatgtttttgattagaagttgagaatttttggttagggaggtggggyggyggggaggggtygttaagtyggtttagagygygtttatttgygttataagggagaagaggtgtttttygttttttttygtttatygtygttaygatgygtygyggatttyggygatttagttygggtagaagygygygttttttttttttagtttygtgygtyggtttttgtttygttagtttygttatggttttttatttattttygygggagygtttttgtttttttattttgtattttttttagagtygygygttagtttttygtttygtggaagygtttttttttygatttyggttgattttygttygtygtttttttygygggtgygygttyggtttttttttygttyggggygggtttgygtgggyggtgtttygggtyggygggyggagtttyggttttttagttttgygtttyggtggagttygagtyggagtyggtagaggggygygggygyggaygyggygtttggyggggttttgggaggttyggayggggttttggygttgagttyggtyggttyggagygyggatttagtygtaggggyggygatgggtatygagggattttygttttyggtygtttttygyggaygttagggttgtttgttggtatttgygygggtgagtgyggttttttagyg

SEQ ID NO: 6127 - DNA, 1020 bp, Artificial Sequence
  Description of Artificial Sequence: Synthetic polynucleotide
gygggygtgaggtttygttttygtygttttttgttygtttttagattygyggttygtttggtygttttatttggtygatggygttggtggtgagtataggaaggttattatagttttaatttttgaggtaatggttgaagttyggyggggygaagtygttgtaygaggggtyggtattggtggygatayggttggyggygttggttgttagggtagygttggygaygttgaygtygttggtattgggaggttgtttttagttagaggtattaggggggaaggtttygtagtggtaatgtagygggggygttagygtgaagatggggttygaggttatgtttagagttaygaagagtatyggtaggtagtagaggtygagttgtagttgttggtygtygtttagygtttttatttgggygagtagygttttaaagttgagggggtttgggggtayggttagygataggttgttgtttagttygtygtygttygygtttttttttttttttygttygygttttygtttattttgtagttgtttygtgggtatygtattttygagggtttygatttgttgttggggggtagggggtggtaggagaagggtgaagyggaggaaatygtagagtaagggtagggggtaggtgggagggagggttaggaaggtagttaggggygagggatgygtaggaggaaaatgttagaygtttygygggggygggggtgttgggagaggatggygtygttatttggggttygggtatttatttygttggaggtgggggtgatttttatagtgttgtygattttgtygtygttttygttattgggttygggggtttyggtggttattyggggagttagtttgtygatygtaggggttttgtyggttygygtygaaaggatgygttgttttttggtttagttgygygtyggttgttyggatatagatagttygaagagatttygttttgtagttttgtagtygygggygtttttttggtttttgygatttttgyg

SEQ ID NO: 6128 - DNA, 6343 bp, Artificial Sequence; identical to SEQ ID NO: 6125
  Description of Artificial Sequence: Synthetic polynucleotide

SEQ ID NO: 6129 - DNA, 1109 bp, Artificial Sequence
  Description of Artificial Sequence: Synthetic polynucleotide
gygaagttatagtygtatagttaggggttttygtttagaygtagggagygtagygygggtagygyggttagggyggttaygttgaggttgygtaggttgttgtygttgagttttagtatttgtagygattttagggtttygaaggygttttygtgtaygtttattaggttgttgttagttaggttaagttttattagtttttyggtygagyggaaggygtyggygtttagttgggttaagttgttgtagttgaggtygaggaataygagtttggtygagtygttgaaygtgtttttttttagygagygtagygagttgtttttgaagtttaggtagattaggtygtygtagaagatgaagaagttttyggggattygttggatgyggttgtyggttattagtagtttgygtaygtttagggggaaagggtttggtaygttgggtagttygyggtygyggtagtttayggtgtgygggtyggtgtaggygtagttygyggggtaygygtgttygggygygagtagtagtagaaggttgtagagttygagygtygyggyggygtaggttggggttygggggygtatggtyggggggttygygtyggtygyggygagaaggaagyggttttyggagygagttttggygygggayggygyggtgaggtattggttgtygggygyggggagttagagggyggttygggyggggagggygtgygttygggygtgygggggygatggagygyggygyggayggattggggagtygggatagtagggatggagaggggaggggyggggagggaggggygagggatttattaaagggtttattyggataggaaattaattygttagaaaaattttttgggagaggygggagyggtaggggtggtygagtggtygtygttaaaaygyggttttattttggtagttgattttygagatttggtagtaagaygtygygygtatygggygggttgtattygaygtttaagtttagttattaagtttaggagyggtttttttaaggygtgtttygggygtgygttttgttttttygygttygtttggtgttaaagtaygttttttgtaygttattttatgtyg

SEQ ID NO: 6130 - DNA, 1109 bp, Artificial Sequence; identical to SEQ ID NO: 6129
  Description of Artificial Sequence: Synthetic polynucleotide

SEQ ID NO: 6131 - DNA, 1384 bp, Artificial Sequence
  Description of Artificial Sequence: Synthetic polynucleotide
gygggagtattagyggtttaygtygaggaagataggygtttttttttggggtgggtagygtaggtttggtttgygggtggggggtggagagtgagaggtaygyggggtattagtttagtttttttttggggatttygtattygtagtttaaggaatyggtggagtaygaattttatttttgagttggygtaagygttttttttttatggagatttatttyggtttttttttgaggttttttttttaagtattttttttttygagtatttagtatttttttaattttagtayggttyggggtattagttttttagggygggggttgttttatygtttaagggaggggatagagggtyggtttyggtttaggygatttttgtttttygttaggggygttattttggttttttttygattgtygttygtygttttygttttttyggggggtgtgttttygaagtaygggggygygggaggttaagggtgtttttagttttygatygagattttttttygagtyggyggygaatggtaggttttatttaaagagtgtttggtggygygyggtgttttttttggagtagttttyggygttygttygtyggggtttyggygatygttgttttttttttttttttttttttttttttttttttttygtttttttttttygtygtttygttatygtygyggttagggttggaggygtygttgttatttttgtgtyggaggaatyggygttgtyggtgtttgggggtyggggygygggygaagtygggtygyggaggatataataggtagagtygggggtgttyggtygygygtttttygygtattatgtagttttttgttatttttttygtttttaggttaaaattttgagtatgatggaagataataagtagttygygtttygtatygatggggyggtttagtyggttagttaggaggtgattaatttgygagtygaatttayggttattaatyggagattggyggaattgagyggyggyggyggtttyggttygggttygggagtygyggttagygtttyggyggygggggattyggyggygaygaatatggagaatttttagtttggagygtaaggtaggatygtttyggygtttagggyggaggaaggygagtagagtaygttyggtttyggaggtggtyggggattyggggttttttatattyggggygaaatygttttgtattttggtttgtaatttttttygttyggyggtggttatygttgtttttyggttgggagttgtaggttgttgttatttaygaaaattygagygtagtgtgtayggggttatayggttatatyggtttyggttagtttgagygaggygtagtyggygggtttttttyg

SEQ ID NO: 6132 - DNA, 1384 bp, Artificial Sequence; identical to SEQ ID NO: 6131
  Description of Artificial Sequence: Synthetic polynucleotide

SEQ ID NO: 6133 - DNA, 835 bp, Artificial Sequence
  Description of Artificial Sequence: Synthetic polynucleotide
tygtgaggtygtgtgtgagtttttgygtgggtygtgagtgyggtagggagygyggtgttygggggtygtttgtyggtgtgtttgtgygtgtttgtgygttagtttttgtttttgygagtgygtatttttaggatygagtttgtttatatgagtttgtgtttgtgtgtgtgygttttyggttttgygtgtgtttgtgagygtttgtyggggygygtgtgtgttyggaatttygyggtggtgtgygggtgtgttygtgtgtttgtgtaygtgtaggygagygtttttatttgtgtgtgtgtatttgagtttgggttatgtgtgatttagggattagtttatgagtttgtttgtgtttttgagtygatatttgtgtgtgatttagggaygagtttatgagtygatatttgtgtgtgtttgggtgtttgtgtygtggtgtgtttttgtaagygtttgtgtttgtaggtgttggagtgtgtagttgtgggaatgagtgygtgtgagtgtgyggaaggggtatygygygagggagygtyggtgyggaaggttaagygagttygygttttttayggayggtgtygttatttttttttttygtttygygttatgtgtttttgtgtgttygygtygtyggggtygtttttgggtttygggagggggttgagygagyggttttttttttttagggatttygggttygtygttagttttgggtatattygtttttttttttagyggtttygttygttgatttaygggtattygatgggtattygggaggtaatggtyggagaggatgggtagttagygggagggattgagtggygtyggttttayg

SEQ ID NO: 6134 - DNA, 2248 bp, Artificial Sequence
  Description of Artificial Sequence: Synthetic polynucleotide
tyggttttygggyggtygtttaggaggagatttattygttgggtttttgatygttttttaggaaaattttaagtayggaaattaagttygatatyggtttyggtattttttttaygtygttggtagtttaaggttygttttgaagaagagttgtagaggaggaaggtggttttggttyggyggagttyggttygtttggtgttaggygttggtgttggygtygagtgaatttaggyggtttaggtgttyggtttggtggygggygtagggtttgyggtgatggaggtttygttttagttyggttaggtttagttttgtyggtygtyggttygggatatgygyggygtttaggtttgtagggtgttttgggyggttataataaagttaaagatyggagtaagagttttyggygagaagagaygyggagaagtyggagtttyggaaagtygygygtagtttygttagtygtygttagttgyggaggaattygggttaattttaaaaatygttggygtttttgggtygtttgttygggtygtattgggyggtttttatygttttttttttttatttgtattgttttaggygggagagaggttttggtttygagggattagttgtagygggtagyggggttttgtttttttaattttygttttatggtayggggttgaatyggtattatygaggttaagggygattattaggagagaagatyggttgttttygttatgygaatttgtgttttgygatttygttgyggttgttygagttatgttagaggtggggaygaagggttygyggggagtgaggtgggtagaggagagaagttggygttttttttagggtttttattttgyggagaagttygatygtagaattyggtyggttgyggtttatgttggtagttatygygaaatgygttttygattygggatygtattggaaattttygttatattgtgttaggtttgattttttaggagygygttaagggtttttygtttattgyggttyggyggttttttttttaataagtaaggttygtgatttygattttggaattttgtttttatagggaggagtttttggtggttatygatyggtttagtagttyggagagaggttaggaaaattttttyggaaygygttgggaggtttttttattttygttttttttygggygtayggagattttyggttttagggagygtttatygattyggatgaygtggggtatttygygygagttygggatttagaaggygtataygaggagttyggtttagtatttttaaattagatttyggaggygtygttagggagyggttatygttgggygtygtygagygtgttyggggygyggtygtggygggttttttggggyggtagttttaggygygggygygtagtagtttygaaggygtygtttggtttagtygttyggttttygagygtygttgtaagtggggggygtttygyggygtygygtatattttattggggggtygtttygtyggygttygtttygtttggttgtygtttaygggttgttygygagygaggtttttgggtttygttyggatttygttyggattyggtttyggtttygattygygtyggttyggttttygygygggtttttatttgtttyggttgtygggttttggygggygggttgtaygygttttyggtygttttttttttagtygtygtygatgttatygttygggttygtataaagtttyggagtggagttgtaygygygtatatttttttttttagtttttttttttgygttttgtttttygtttttygygtygttygtygttygygtttttttygygtattttttygtgtatatatattttatatttatatttgtygaggygtatattygygygtttatatttgygyggggggyggggaaggggattttggttttattgtagggggaygttyggagaaygaggatttttttygttttttagaygtttttattygtttygtyggttttagttttttttattgygagggtayggagttygggagttaggygtggagygygagagttggtatygygagttgggagayggyggtagtttagyggtyggattagttggaggagaygygttygtygggagtagygagatygggagttygtygtttgyggagtttggtttygyggtttttaygyggygggygttggttggayggyggtggtagygggagattgattygggaatyg

SEQ ID NO: 6135 - DNA, 3541 bp, Artificial Sequence
  Description of Artificial Sequence: Synthetic polynucleotide
tygyggggagtaggggtygygttatgyggyggtyggtttgtagtagggtagaagttttttttygtttgggtgtgtgggagygtagattttttyggygtggtygggaattaagtyggggttyggatgaaaygaaaygaaaaatgaatattygaattttttttgttagttttttttttttttttttgtttttttttggggggagggtagggtagggaaatataaggggaaaaataaattaggttagattaaagttttggttattttttgtttttatatatagaygyggttttygygatttttttttyggggtttygataaatatagtatattgygatttaaattaagggygygggyggagttagaaggattttaggagtygagaggttttaygaataaataaaaatygtaaaaaattaagttyggagaaaggggaaagyggggtggggygtatttttataggagagaagaggygtgtagygaataaagtgatagttttttattttggattygtaggtttaggagtttaygyggggagaggggatggagaatttttttygtttygttttttttttyggggaatttttaatttygtattgygttatttgtygttttggggaggtygttgtygggattyggtttygaatagttygggggggtaggggygggggtygtygaggggatgggggtagagagtaggyggygggtaggatgttyggggtgagttggygagtttyggattttygtttttttttttyggggttygggygaygtagtttatygggttgttttygtygtttatyggagagggtygttygggtgtttggttttgttygaaagtttttgggtttttttttttttttgtaaaatttaaagtaatygaataaaaagagtttaggtygygygggygggttgygygttygygttttgtagygygtyggygggggttyggttygyggggttattgtattgagtygggtagtgtgtggtggtggtggtggtgtagygtygtyggygggggyggtgggggygyggagggtggygatgygtygttttygttaggttttagttttttaggygygtatatatygtttatgggygggtggttygygtyggtygtaggggttatgygtttttttttttgtygtyggttgtagaattagaygygtattatttttttttttagttgtaggttgtttgttaagtyggtgatttygtgygtygagggtttggggtatttgagaaagtggttttygagygygtttttgatttttatttygatggaygtgygttttttgygtttgyggttttgygtygygattttgtttaggttggtggggttgtygttggaygagtyggttttttttagttatttgttgagtagyggtttgagtttgtatatgtttttgaagtttagttgtagggtttygaagyggtagatggtggtttgygagaataygttatygtagagygtgtttagygttagttttaygtyggtttgygtaaagtttagtttgatgygtygttgtttgaattgtttggygaattgttttaggtygttygagttgggygtattttygttygagtgttygtttatygatgagtygtygtygttygygttygggtgtaggtgygtygtygtygygtgtaggtygttygygtgtgtatgttygtgtgygtgttygtgggygtttagatgyggyggyggygayggttttagttgygtttygtggttattttygtgtagygygtggtgtaggttyggtttygygtygttatygttygtygttagtatttyggttaggtygtygtygtygtttttygggtaggtygtttgygygtatagttygagyggttggggttggtggttttygttggtttygggygagggygatatggtygggtttaagtggtgygttgtgttgttttgygtttatgtygygttygygtgggtygttttttggtgtattaggygygygtggaaattttygtygtygtygtygtygtyggttyggtyggtgtygtygtygtttgttttgtygtgttttaggtgygggtygtyggtttaatygtygtygtygttttttttygtgggtagttattgggggtgygttaggtttayggggtggttygygttygygtttagttattygtggtgtattagtttttgtatttygyggtaygyggtttttgtatgtaatygtttygyggtygtygtygtygtygtygtygtygtggygttygggtgtataagyggttyggtgttttyggtttygttatyggggtttygyggtaggtattgygyggtggtggttatgtygtttygygttttgygtygygtygtygtygtygtttygtttygtttgygggtttygtygtttygtttygtyggtttaaagtttygattygttyggygtttyggagttttatttygttygtygtttattggttgttygyggagttgtttttygttttttttgttyggttttygtttygygygttygttygttattttgttyggttgtttagagttttttattgggygtygttttyggggtttygygygtyggtygtgttgattggtygttggggttttatttayggtttttttatygttygygtatatatttaygtttygggggygyggtygttaygtggggagtggygygggggtggttttgggatygtattttttttygttttggttgtgtgggtttygtttttttttagygttggagatttygagttyggtyggttttatattttaygygagttgaattttygttygtatttygttygggtagtagggattgtyggtttygggaggygttygggtttygagaagyggtttagtttygygtttttttttttttagtatygttgtyggyggattaggattttygygggttttggyggttgygagygygaggyggygyggattygyggttyggtttyggygygattgtttatygygttygtttygtttttygyggttgttagygtgtattgggygtttttyggygygtttgttyggttygtttyggtttttttttttttttttttagttttagygttataatttygtygattttttttgttttgagagygygttyggtgygggyggagtyggayggattttggttttaygtttygygygggtatattttttttygggtattgaggtttaggtgagtatygygygggtagttggggttgggayggygggyggtagyggttttatagttttaygygagtttttggtattyggtygygtttyggggttttagaaggagaagatttygaggtggagattgtggtttyggggaaaaygttgttggtaagggygttagttgggggtggaygttgggtttaggggtatttgatttgygtygttgtagttttttygtttttttttttagtttgaayggtttatyggttgtggtygtggtgggattaygtttygggagaggagaaggatgggtttagggaaggggttygggttttttagaaattyggygtgtaggtygggagttgtttagtttyg

SEQ ID NO: 6136 - DNA, 1513 bp, Artificial Sequence
  Description of Artificial Sequence: Synthetic polynucleotide
gyggggygggtyggggygtygttgygggayggtatttaagggygygygttgygtgttgttttygyggtttttygggygttatyggttyggttaggtttygggagttgttygttttaggtygygggggygtttygggttygtaggattygaaaatttttttttygggtyggggygggtgagtaggygggygttgggttgygttygaygtttttttaggtygtttaggagagtttygagggttgggagaagtygtyggggyggttgggttggaygagygagtttaggggttaatygtttttattygtyggtygygttgtagagyggtgtttttagggttggggtttgyggygatttygttgggaggaagggagagygagaattgagaygtttgttttaagttgtttggagttaaaggttttygagagygtggtygtggggttgggtygttggagtggtygtttyggtttagatattygtattttyggyggtgyggyggtttttaygygygtatttatttagygygttygggggtttgaggtygtygttayggygtttygtttygggtagtagtaattagtaygtaggtatttttggaataggygggattgttttttygaygygyggtttgygtttaggyggyggaggggtttagtttttttttagttttyggttttagggygtagggttaygagttttygtttttattttyggtttttggtattyggygtyggtttygtygtttttttttataygtatttttggtagggtttygyggggygttttaaagtttgggggtagtttttaggtgtttttgggaagggaaagaaaggttataaagtaaaagaaggagtaaagagaaggygagggaggagtaggggttygggttttgtggattygtttgggttgggagtggggatattgagagggttgygaaggtttygggggtygygygtggttygtaggtttatttttggttygyggttgttttttttttttttttttgggtttttggttttttttagtgttgttttttttttttttttttaggtttttttttttttygygtagggtttygttttggggattaagagaaaggagggaggggaaaggggaggggaagggaaggggyggaggagaaagagggaygatttttttaaaggygggtgttgagttttagtttaggattttygggtttaattgtttgtggtattttttatattttttattttygtttygttttggttttgttttagttttyggygtttttttttttyggatttygttgtatgtttygtttgyggtggttygatyggtttttttygggagttttttttttttygttaygttttygttttttyggtygttttygygtttttyggttttttttttattagttttatatttgttttttttatgggagggagygygygtttttygtttagyggggtttttagtagagtttttttaattttyggygttttttttatatagggttygttgggtygtttttgyg

SEQ ID NO: 6137 - DNA, 3541 bp, Artificial Sequence; identical to SEQ ID NO: 6135
  Description of Artificial Sequence: Synthetic polynucleotide

SEQ ID NO: 6138 - DNA, 558 bp, Artificial Sequence
  Description of Artificial Sequence: Synthetic polynucleotide
tygagagygtaggattattaagagaggtygggttatttttttygtygttygttgatttttaggggttgggtyggygtatagtaagggggttggaggtggggtygtttttttttaygyggttgggtttttaggyggtgttttgggtygagtygtttggagattttagattagtatgtgggtgggaaagggygtttygttttgggttttttygtttttgygygtagagtagagaygygtagattygtttttatttygtttggtttttttggagtagtttyggyggyggtagygatgggttgggaggggtyggtaygttggtttgygygggtttttagtygtttttygttattyggaattttttttttttaagygttgatygtygatttatagtttttttttaattyggggygagyggggtttttattatatatttttttttttygttyggttttatttttttttygtttttttttaggttttayggtttgtaagtatttttgtaaataatttttagtttatttatatygtttygttygtatttttygagagttaggtayg

SEQ ID NO: 6139 - DNA, 7244 bp, Artificial Sequence
  Description of Artificial Sequence: Synthetic polynucleotide
aygtttagttagggygtagagagagygttgggygaagaggggtygatggttygygggaatagggttggggtttttgtttggggatyggtyggttgttaggtttttygttttattgttttttyggagygtygttgattataggttygtataggtygtygtygtaggtyggttttttgtgtatygtygtagtagyggyggtygagyggttaygtatgagatygttaaaggygtagtttatgggtgggyggaagtygagygtgggtattaagtyggtagtggagtagggygttatgaaggttagatygyggttgtgygtygtygtygyggagtaggttaggygtagggggttgaggtygagyggygygtttagygggtaggygttygygtyggtatygaagtgattggygttgggttgtagyggygagaaggtygagyggttgtttagygagtttagygttttaggygttatggygtyggttagtaagggtttgtggtgyggaggtgyggygggtttygtttgtagyggygtaggtagtttaggtttttyggyggyggyggyggyggyggyggyggygtygaygyggttgggttaygygtygtttgtagttgttgtagtatttayggyggttttatttgggggygtygtagggtttaggtyggtygttaggtttttayggtggtggtttagtatttgttygatggtttgtattaygtygtygtygtagttttgtaatattagttttaggaygtttygtyggtggtttgggaataygygtgttaagatatttagyggygttygttgtygtggattygagttttygtttagttttggygtyggygyggttttatttttttttttgttagtttttgaatyggatttagagtttagagggttagyggagttygggttgtttttttygtygtygtygttagggttagygttgtttgggtagttgttatttgtttttttggaggttygagttaggggygaattagaaaaggattygttatygtygtttttygagtttgagtygggtygtatttttggggaygaygtttygggtttygagtttgygtygtygggtgataagggttttatyggyggyggtagygggttgttygggyggtttgtttgtagtagygttttaggaaataggttaaatttttgtaatttggtttttgggaggggagaaaaygtgtygtgaggagyggttagttagaagatagtagttatagtatttyggttttttggattttagtttttttttttttagttttatagtttttatttattaggttttagtgtttttttttttttttgttttagtatttttttygttttgagtttttatagttttgattttagggttttttttttttttgtattttttagaattttaattatttgtgttttgtaaattygatgtttagtgttgttttttttaygtttgtgttttaatatttttatttttaattgtttttttagttttgttttgtygtggagaagtggttaggtttagggtttaaataagagataatataatttttgtttaattaygttgtatagaagagtttattgtatagaaaatgtttgttttggtagtgtagtttgtaaggaaaggygttttggttatttaggaggttttaagtttttttataggtagaagtatagtttttgtttttaatttattttttttaaaattgagatttgagaagttttttttttttaagtttagagyggatttttttttttttttaayggttttggtttaattttttttttttttataaaaagttaygggggtttagaaaaagagggtggtgttaggtaggtagtaggaagygaagaggaaaagatataggaaagtagatttgagaaattagggagggtgyggaagaaattagaaggagggagggygtagtaagyggttgtttagagggygttaggaaygygagaaggggaaaagaaattagggygttttagaatttagggygttttaaaatttagggtgttagttaaagggggggggattttttaagggagttgggaaggagtagagggaaagggtttgtggagaagygtagagygaaygaagatgygtaggtttttatttggggagaagaygaagtaaagaagtagggatttgtttgygtttgggtagaggygagtaaaaaaattaaagygtgtatatttyggttygatgtaggagaaaggggtaaagtgtaaatgttttagaagygggagaaaggagagtttttgtatttaygttttatattygaggttgggygagyggtgaattttagtagtygyggygattggataygggggttttattttttttgaatygagataagtttttgggtttygtgttttagagttaygattttgttgtttttatttgyggtttggtygygtttttatttgagttttttgygttagttgtttygttttyggttttygygggygttttygttttaggtttttygtygtyggyggygtatattgaatygaagatttygtaggygggtttyggggggatgatgtygttggyggyggttagygttagtttttyggtagtgtygtagagtagttgtagttygygygtttygttttttttttgygtttgttgtttgygtagygttatttgygtygttatgataygttggygtttygygatgagygtgtatttggygtataggtagtttttttagygatagtagygtttgtggtttttgagggtygatattaygttatggttgygatagygygygtatttgggggttygygggtatttttyggttgttygtagtaatagtggyggttttygtagtaagtygtttgttaygtttatyggtagygatgtagyggtygtygyggttgtygttatygaygttatygaygttataggyggtttygtygttgttgtygtygtygtygtygtygtgtygggtaygttgggtagtttygagygtagttttatgataggatttgaygggaaagaaggtgggagaggggagagatttggtgaggagtatatygygygttaggttaaagygtygttttgaggaatttaagttggagagggaaatttgggtygyggaggttgggttagaggggttagaattgttgggaggaggtgtagtyggaatttttttgtgagttttagtatttttattttagtttggttatggttgtttttagatttgatatataygttaggggtaagattttgtttgaattagtgatttygttggaaaaaataaagagatatgtaaagtgtgaaagttattgatttagatggttgtaatgagaatttggaaaagttaagatgatattttaaagtttagtttaattggggtgagaygggtgagagaaatgttygtttgaygggattgggattagagygatagttttggtttagaagttaggttgatgttaagggtaaaataggaaaattyggagtaaaayggttagtttggtggaagggtgaagaggagagagatgtgaaggygtagatgtgaaggtyggttgggtyggagttttgtttttttttgtttgtttatttttaatgtagtttggggtagaagttttggagagaaaaattaataatagaaagaatagttttaggaagtagagtgaggaygaggaaataatttgggtaaagttaggtttagtggttttgggattygtaaaaatgtgagygttaaaagttttayggtgagggtttttagagagtgagagataaaatgtatgtggaatttagtttaggattgggaagtattaaagagaaaaattyggttaaagaaattttttgtataggtaaatttagtttaaagatgagttttatgggtaaggaaaatagtgaaaagtagttgatttgggtgttygggatttaggggtygygtttgggagaggggaatgtgtaagaaaaaattttataggtaaatgttgggggaggggattgggtaaaatttgtggtgtagttttttagtttygtagtttggagtagtagtyggggyggaagaygtattttgygaaaagttaggtatttygggagggggatttttttygaagattattttatattgtttttttttttttttygggtttagggatagagtygttagataygtttttttygttttggggttttaggggatttttttygagygtaggtttttgygttttgattttagagttggggttttaggatayggatggtttagtaggtygtattaagttaggggagtygttttygtaattggttataaayggatattagagttttttttaygtygtagttttataaggtttaagtaggtttagtttttygtttttgtygyggttttttttgtttttygygtttttygtttttgttagagttygygatagagtttttgtgttttygttygagagttttagattttttttttatgagygttgtttttttttttagatttttygggygtttttaaggtttayggggtttaggtttttttaataggggtygtagattaggtttttatttattgttttttttgyggtttttaattatttgttttgggtttygggatttttttttttygttggygttgtaygygtttttyggttttattggygaygttggagtttttggtygtttttttttgttttyggttttttatttgattaygttatttttttttagttattatgttygaattttyggattttttagaaygtagygtagtttaattttttttttagaaattygggtyggaggttygtttgygggtygygtggttggaattygygatttgattttygtygtgtygggttttttygyggtgygygtyggaygttgygygtagtyggggtttagttgttyggygttgttagatttttaatgagtygttygttygttttattgttggtttttagggttttattagatagaattggataataatgtggygtttgttattggttaggggaggtagayggygttttgattggtygggttygygttyggggagtttygtattttgtagtgttygaaagattygaaattttaaaagttttattgygtgtttttgggaggggagggggygygttaggaaaggagtggaaaaaagtgggygaggaggagygttgaaaattttttgataagtagttttygtgygttygagagygtgtgaattgtttttaattatygtgttyggtgygtttttttgygtagatttgtgtaatttttyggtttttggggygtyggttyggttgtatygtttttattggtttggggygtttggtaaagtygagttttttaagtggttttggagttttgaggygggatggggggtaggtgataatttaattattgyggtyggggtaggggygggataagggtgygggggtggggaagggagggtgtttaaggtataaatgttaggaygattttttttgttttttttttgttatgtttyggygygtttttaaattygaygagtttggggtagttgggggttgttttggttttttttttttgtttttttaaagtttagttattttattttaaaagttttgataygatagttattttggagggtaagtgtggtttatgaagattttygtgtttaaagagaagtttagygaagagaaatgagattgtattttttgtyggtgttygttaygtttttygygttttgagtttttttttttttygttttttttttygygttttttagttttttttgagtttttttttttttattttttagtatttygatttttttttygtggtggtgggattttttttgtygttattgtaaatgaataaatagttttttttttttttttttttttttttaaaygaaagtaaaaagtggtttttgtgttttygtagatttttttaaatttaggaygygtatyggtttgttygattttttyggtaagagataaagttattgttgggaggttttttyggatagtttttagttttaattttygttttattttygttttgttttgatgttayggttttgaggaatagttygttttgtagaagaggtaataggttttagattttgttttttttttgaaaggttgttgttttttaaatatttggaattaatgtygyggttttygggygagtygttttyggtttttgtagttttgattttatttttgtgtttttttttttttaatttttaaagttttgtttttttttttaattttgtttttttttttaatttttaatgttttgttattttygtttttgttttttattttttttttttttttttagaataaagaaaattygtttaaataatgaggaaaatgagygtttttgtygttttttttttatttttgatygtgygtttttgygttgttttttygaatttttaggtyggygggaatttgggygygtagattyggttygggtygtygyggttttaggaygtagtttatttygtttggtaygattattgggtygygttttgttagtttattagtttttgagtttaggaatgggggtgggggaaggayggtgygattaaygggtttttattygaagatygtagaatttggygtttyggaagagttttggaagatgtttatygggaggttgaggttggagggaggagtgggtgggggtgattygttggaggatygggyggagagtttttagaaagtttattaggtttyggygygagggygtttygatayggataaggtttatgatagygataaaaagttggttattygtttttagaaaatgttatttgttggagtttgtgaatgggtttaggagagagaagggtgttagttttygygagggtttttygygtgaagtgaggataagggagtgttttagggataatatgttttttaggagygtaggatttagattttattttttaatatttggaggtttygaggttaagtatgtttagtttyggttgtatttgggtaggtgagttatggggtygggggaagagygtygataatygtyggatttygygtaggggtygttaggygtttgtttttagagtttttttggataaagttttygggaaattttattaaatygaaaaygaaataaattatataaatttgtttagtttttgagggggyggtggtttaggtatttttttygtttgaggttaggttatygtgagatttttttatttyggatyggggatttygtagaagttaagggtgtagttaygaggattygggaattygaggyggtttagtagatgyg

SEQ ID NO: 6140 - DNA, 824 bp, Artificial Sequence
  Description of Artificial Sequence: Synthetic polynucleotide
aygyggattgagygaggaaatgtttaagattataggattgaatttttyggaagtttygaygttgtttagttagttagagtttagtygtygaygyggatgaagttgttttttygggataggaagggttaaatggttgygygttaattyggtttygattggggtgttagggagtaagagtygtttgtttygggggatttygtttggggggtttttaggggtygttttggygtttyggttataatttgggyggttttgtgyggyggttttygtttgygtttttgygygttatttaaaattttgygtatattgtagtygtygttttttygtttttygyggtgagaygygygtygttaagtgtygtaggtagttttttatagtygtygyggtagtygttgtttggtttttggttttagattttttttttattgtttttagtttttatttaggaggttttttygyggtygygagagttyggygttygatttatagtaggtagtgygggtatagtgttgtagattattatttygttaggttygggtagygtttattagayggataggygttygyggtygtttttatttyggygygtttatttygagttttttaygtygyggygggygggygtaatatatttttttatttttagtygtygaggattatatttttygtttagttttttygatttatttttyggttgtagtagagggygagygggtttygtttttgttttttggggttggtaggttygtgtggggttagggygygygggagaygtygyggagttgggtatttyggagaggggatgtttatttttagyggtttyg

SEQ ID NO: 6141 - DNA, 824 bp, Artificial Sequence; identical to SEQ ID NO: 6140
  Description of Artificial Sequence: Synthetic polynucleotide

SEQ ID NO: 6142 - DNA, 1415 bp, Artificial Sequence
  Description of Artificial Sequence: Synthetic polynucleotide
tygygttgttagaagtygaygttagygagggaggtgtgaagagttggttagaatgattaattttttttttatatttattttttttattatyggtggttygttgttgttgttttgygaggaagaggagtygtgggygggtyggygtatttyggtgttatttttgtattygggtttggttatygggggtaygttggttaayggtatggttatttatttygtgtygttttttygaaagttgtagattattagtaaygtttttatygtgaayggttgygtygtygattttagygtttgygttttttggatgtygtaggaggyggtgttygggtttttgtttatyggttttgyggagtttttygtagattgggayggygttgggggtagttatygtttgttayggggtgggttgttgggtttyggatttayggtgtttttttttttttattgtttygtggttttgaatygttatttgtttattattygggygttygttatttattaggygttgtattagaggygttatayggygggtatgttggygttgttttgggygttygttttgggtttygtgttgttgttttygttttgggtatygyggttyggygtygygttatygygagtttattattyggygttgttggtygtygyggygttgttggygtagatagttttgttgttgtattgttatttgggtatygtgygtygygtgygtgttagygttaagygggttagygtgtttaatttttatttgttgtattagttgttyggttgygtygtygtygtygtygttttttygggygtttagtaygygtygggtttyggtggygtygygtattyggygtaggtttagtttttgtygttygygttgtattygyggygggtatagyggygttttagyggtttgtyggtgttgttgttttgttgygtttttttgttggttaygtagttattggtgtgggtgagtttggttagyggtttttygttgtyggtgttttggggagtgtaggyggttagttggtttttgtgttgygttttgttygygtttaattygttgttttataygtggaggaaygaggagtttygtygtttygtgygtttagttttgtygggygtyggygaygyggyggtygttgtygttgtygttatagtygtgttygtagtgttttaggygtaattgggtattygygtygygggttagtattggtaatttagtyggggttygagggaagyggagattttyggttttygaygtttttgggtatygtygttttttttttttttagggtattttttgtttgaaygaagattttygtygygaagttygatagatygggggaaaatggggttttygattttagygggttatttgaattaaggygtttttttaagtggggygttygaagttattttggayg

SEQ ID NO: 6143 - DNA, 1415 bp, Artificial Sequence; identical to SEQ ID NO: 6142
  Description of Artificial Sequence: Synthetic polynucleotide

SEQ ID NO: 6144 - DNA, 3039 bp, Artificial Sequence
  Description of Artificial Sequence: Synthetic polynucleotide
tygygggattagttttggtttttatatttygttgtagttttgtttygygtygtattgtttttttyggttattgtggggttattaagygatttgtagaattygttgaggtttaggtttttgtagttttygtygaagatttaaagttagagtggatataaaygtygtgggtaggatttyggtgaggtttyggtgttttttttgggggtttttagygttggtttagaagttttagttygggtttaagaatttgggatttttttygattttggygatyggtygggttattyggtttagggttttagyggtagygggtaaaattttagtaggagttttttgtygagggygtgtttygaygttagagttaaattygggatagattagttaagygyggayggygygagagtggttggtagygttagtaygtagtttgggtttagagtaaggttgggygtttttagtaaagggyggtttggggttgygygggyggyggattgtaggygggagaagagygaggtgygttaggttttggggygygtaattgtttagtttygtgaaagatygygtygtagatggggygtagttgygygtttattygtgtggattggaaaygtttygagtyggttattttaaaaatygggaaataaggygggtttttttttygttygttattttttattaagtaggttgtgyggttttgggggttgattgtttttaagtagttaggttttatygygygtygygttgygtygaggttygttttgtygtagggaygttggtagttygttgaatatyggtaagagygttagaggttagyggtygttaggatttttattaggttttgttygtattygtttgtttttttttygtttggtttgtttttygtttaattgaaatygttaatttttttatttttttgtttttattttgatatattttaygttttaaatatgtttygtttttttttgtttagtttgttttttttttttttgtttttttttttttttttagttattygtttygttygattttgtttttgttttttttattygttygttttttatttatttattttagtttattttagttygtygattgttatttattttttygttttygtygygtttttygttgttttgtttaatttttttttttttttttttggttgtygttygttttttttggttttttttttyggtatttygttgttaaggttatttttgtygtyggatttyggggtgttgggtttttttyggtygttygtttygtattagygttttttgtagttygygyggtatyggtgtggttygggggttygagttgtyggtgtyggatgyggygygtttagtagggaygygggtttgggggggtggtttttgttygaygyggagygttgagttaggtygggtatttgtttttggyggtgtttatygtattgygyggtttttgtygtttggttgggattagaggagttaggttaattgttttttattaagttttaattgtggtttttattaggaaagttttttttaaagggtatagataygaagtttygyggattygtttatttttttygttgatttatatatattttttygtttttttttatatatttttatygtttyggttgggygaaagtyggagatgttyggttatttygtggaggttygygaggygttagtygggyggyggtagggggttgaggyggattttggaggatttagttttgggtttaggttgygggatatggtagygtagataaggtgggtgtagtgyggaagtygagaygttttataggttatagggtgyggyggayggtygtagagttgtygattagtttgttaggtttttgtttttaggygtattttyggatgtyggygyggtttagtyggttttagtatagggtatyggttygtgagttygyggygttagggggttaggttgtttagggttgtttttgattgtttagyggtgatgatttagygyggggaagttaagattgttagaagggyggttattatagtgtataayggtagggaggttagtttagtatgagaaataagaatatagttatttygttttgaggatagttttggtattgtaygattagtygyggttagattgtgttagtttgtygtataggtagtattttttttgtgaaggttaggttyggggaggagagaygggttaagattaggtygtagtttttagtygatttygatttgattattttaggttgaggtttagttttagggtttttaaagggygttagatataaaagtygygttttttygttaggttttagtgtggttttatagttttyggtygggtttgggttttagggtaggtggtagttttagtttaatttyggtagagtatgtttttttttttttaggtttaattgttttygggtttygattggatttygggtygtygttattgtattttttttygatttttygttttttattttygtygtygaggaayggtggtttattttttygttttatattggtttttgtttggttygggttagygttaattyggttttygtggaagtygtggygaaaggygagaggggtaaaaagttgagaaataggygagygggagagataagtaggaaggttygggtgggttygggtaaggaagaagaagagagggtygggttgygygttaygtttygygtygygygttatttttygyggggttttygtagaagtggtygtygttgagggtygggtygggttygaggttttgtaggtatttggygggyggtttggtyggttttgggaggtagggttttaggggttygtaggtyggaaagygggttagtygygggtygyggggyggygyggggtgtaggtgaggygtagyggygggggttttttgygggttyggaggttygtttttygaggttatataggggtygggtgtaggttttaygyggaaaggygygtagtgttyggggtttatgtyggtttagggygtataggttttyggggtttyggggttygygttgttygygtygtttgtgagygttyg

SEQ ID NO: 6145 - DNA, 1277 bp, Artificial Sequence
  Description of Artificial Sequence: Synthetic polynucleotide
tygttttaygtttatttttttygtttaygtyggttattagagtttygttygttgttygagagtttygtattgaygtyggttygygygtgagttaagtttgygttayggygtttygtygttagggtggtttttyggaaagygagggaatagtgygygtagygtttygtttagtttygttttgtttygtagagtyggygttgttagggygtagggagggyggtattyggttttagttttygtaatttygygygtttttttygtygtgggatttgggttttygygtygtttttttgagtttygagygygyggygggygggagttaggttgggattggtggtgaggtagggagtgaggagygagyggagtygygtgygtyggygygtagtttygggtygttttagttttagtygggggtttgtggttygggggaggagttgtgygttygygattygtyggggatygtagttgttyggtyggagtgtaygggtygagtttgygygattatttaygygtgataggtgagtygttggtygygtttygtttggttttatygggtyggttattgtaattttttttgttttggtttygttttagttagggagggttgaggattaaggtgtgaggyggygttgttttygtattygttygattttgygttygtttygggtttttttygtygttttagtygtygttgtttggygayggagtttyggggttygttttttttygygtatyggggtttttagyggygtaygtaygggttggatatygggttttagtttttggtgtttagaagggtttaagaatttyggaggaaattgggtttagttgyggaggtaagygttygyggagaatyggagggggtttgttyggtttattygyggtttgaaattgygygtttagggygtagttttattgggagttttttaygtagttggagattttagttttagtygttyggttttaggtttgtgattttgatagtaatattggtaagygaagtagaattgttaygttygagatgaatatttaatttttagttttggggttggttttygttggattyggagttagtagagagttttttttttttygtgggaagygtatttggggaayggaatggttgagataggggaygtgygtgtggtgtttatttggagggggygtygttttggygggtygagaggtttttgttgtatttatgtttgtgtgygtygtgttttgaagygatgttggatgttygtagtattatgggtgggtygttttttaggggygyg

SEQ ID NO: 6146 - DNA, 2394 bp, Artificial Sequence
  Description of Artificial Sequence: Synthetic polynucleotide
gyggttyggtttgggttgtttyggtgtagygygtttygtatttggtttygtyggtttattttyggagaaattttttttgttttgtygtggtttatagggttgatttttyggtattygaaaygttagtagttttgggagtttagyggagagtyggagttattttggggttagtgaygtttttygttgataagaattttaaagttgttttagttttttttttttttttttttttygygtttaattttgatattattatttttttattttttaggtatttttttaaagtygtgtygggattgtaattygtttttygatttagttggggtygggttttatttagttagttaaggggygagttagygatgygaatatyggtttggggggtaygattttygtttaygtttttygtaggygygtaggggatttaattttatatattttattttygaattaygaggaaaaatattttattttttaaaaaaataatttgttttttatataaatygttatttaaaaatatataaataaggtttaagtataaaatttaattttggggttggyggtggagggaaggtgagggagggggttttggtataygtttttygtgtgtgtttgygygayggttgatgagggygygttagggattttggygtttaaggagatggggttgtagggaggyggayggagagygttttaggygttyggtttyggttttgttttaatygtagagygygttttaaagtygagggtagttttaggtgtygttttgyggttttattagttttaggagattagggygggggatgttaagtgttggtaggyggggaagaggttaagygtygagtygggatygaaggtagggtagttyggtagagggtaggyggyggttggaggggygtygtattttttttgggtygyggyggtttttatttygttatygtygtygtygtygtayggttgttygtygygaataagtatyggtattattaygygaygtagtaggtygggygyggygtgtagttyggyggatgttgttaggttaggygatttygtygtttttggagygygagygygttttagtttgtagygatgattttggaattagattttgatttgygtgggygtgaggygaagtaggttygttagttgttygygttygggygtagataggtatygttgttgtyggaagygtygttttaattttagygtttgygttttggagaatagtattygtygttttttttttttttyggygttygagttyggagaygygggtttagyggayggtygttgygaygagtttggygggttggtttttaggttgttttygttygaggttagggatagtaaaggagataygggtgggtgagaygtyggattttaygagggtttgttgtttttttggygygggygtggaggtattggttagagggtaygtttattagttygagattttygggatgaggttattttttgagtttatatttggatatttattttttygaatgyggtgattttatttatattatagyggttattagygggtttgagatygtgtttygaaaaaatttatttyggggtttttttaatatgttygtatyggtagttgygttggtygattagtttattataagttgggttattagygtyggttttttttaggtygattgtattgtagtgtgtygaggtttgyggagttttgagtgggaayggggtgggggtaaattygttaatattggttattttagayggaggtttggagatygtggtygtgtttttaggtatggagagggggyggggggtggggtgggggyggtaggtggyggygygttttaaattttaattatttygatttttagaaatygttagatatagaaattttaaatttyggagtattagtgttaggtagggatttgtttttaggatgtgtygatygggatgaatgygttaggggttygaggatagggttttygtttttaagattgaggaaatttagattttgggttgggatttyggtttttyggtttttygtgggttgggtttttgattttgttgttttaygttttttattttttatttygtatygtaatttattaygtatttataagggtagtggtygygtttygaatttagttaggyggygtaggggtygggttggggggygygtggttttggttttygtttyggtaggtgttgygygttttgttygggtaaatttagaaggttgygtayggtgaagtttaggygtttagaggtggttatggtygaggaggggaaggaggygggggtagggtaggttgggaayggaggggyggtygggaygtygtttttayggatgggygtgggaggygttygttatgygttggtagtygggatattagygtatttatagyg

SEQ ID NO: 6147 - DNA, 1627 bp, Artificial Sequence
  Description of Artificial Sequence: Synthetic polynucleotide
tygtggggttayggttaygttgttttgygttttgggtattaygttttttagttataaggtgygttggagtaaggtggagtttggggagtttygggaaaygttgatttttattattaayggattgtaygttygggggtatgggtttttgggagggygygttaggatgyggagggggtatygattagaygtttttttggttatygygggygtgygtttggaggaygagggtyggtatygttgygagtttattaayggtatygaggaygagagygtggygttgattttgagtttggagggtgaggttttttygttttygttttatttttgtgtagtagygggttygtttygtttgggttttttagggtttttttttagtatttttttygtatttttggggattttagtttttttttttaggtygygtygtttttttttttttttygtttttattygttggttttttttaggattttygttattttttaggtgtggtgttttygtattaatttagtyggggtyggtattagtttaattattaygaggygaagtaggygtgygaggagtaggayggaygtttggttatttatttttagttttattagggtgagyggtygaatttagtattttttaagtttygyggagttgttttaggggttygagagagggygttaggygagtttagtttggtttttgtttatgaygttttttattttygattttygtygtttttygttagtttggatygagggtttggattggtgtaaygygggttggttgttygagggtttygtgygttattttgtgtttatygtaygygtttygtgyggyggtygaggtyggttygggattygtagttayggatttygygatyggatgygygatygttaygaygttttttgttttattttygygttggygggtgaggygygggaygaaggtagggttttggggaggggtttgaaaaatgtgggggaygaggagtggattttagtttgagattagggtagggttttygggtttttttaaggtatygtttttttattagttygttygttygtttaggttttagtttatttttttaaattttttttgtatttttgtttygattttttaattttttttatttaagttygatttagtatttttgyggtttygtattttaatttygttttttgggtgttagtygttttttttygtttattttgttttyggtyggtgattygttgtggtttttaggttaagtgtttttygtgttygggyggttgaygttgtttgaagtttaygyggygtgtyggygaygyggygtygtggtggttaaggttgggtatttttaygtygtttggaagttttyggggttagattagtgygayggyggttggttggttgayggtagtgtgygttttttaattattaygtygaggtygygttgyggggggttttyggatttyggagtgygtagtttyggtttttttaggttttaataggtagtttatgggatttattgttaygtygagaattaggygtttatygtgttttttttagygygygygaagaagtttgggagtygtggygggggtttttygttattttttttyggagagttttttttttttttagattyggagyg

SEQ ID NO: 6148 - DNA, 271 bp, Artificial Sequence
  Description of Artificial Sequence: Synthetic polynucleotide
tygttyggtggttgtygyggtttttttygygttgttttttaygtttggtttattatgtaygaggtaggtaatttgttttttttttyggggatttatttyggagataagaaggtagtttgttttttgtaatggtttttgttggagtgyggyggggtttaggygygagygggggtaygggyggggagttggtagygaaggatgygttyggygtttttyggyggtygttyggagttygaggtyggygygggaggagygttgatttygygggtyg

SEQ ID NO: 6149 - DNA, 884 bp, Artificial Sequence
  Description of Artificial Sequence: Synthetic polynucleotide
aygtyggttgtgaaatttattgaagtgagyggyggygttaggatttttgggatttygatttttttgtagttygtatagttaagggygagggygtttttyggtagaagtagtaaatygtyggtaagtttagygaggagggttgtyggggtttgggtttgggaattggttggtatttagyggaaagggaygtgagttgagyggygggggagaagagtgygtaggttagagggyggygygtagyggygtttygygaggtttttaygtygggygatatggggtgtttgttgtttttgttgttttgggygtttttttaggtttggggaagygttgaaggtgggtggaaygagggygtttgagtgtattygygggagggyggagagagggagttgggtagggayggggagggtaaygtttgatggggattggtgagattygggaygtattggygygatttaggtagaaaattygttgttttttggtttyggggagaggtagygyggtatagagttygttggtattagtygttttttgaagtttatttttttttgttttttttttttttttttttatgttggttgttttttyggttatttgttataygtttttaatttttatttttttttagtttygtaaaggttttttttttttygttgtttttagatttygtttttygttaatagtagttggaygygtatygayggtttggygtggttgggggagttgtagaygtatagttggagtaaygattyggatatygttygttttttgaagttttggttttagggtaygtttagygattagtagtgggagaygttgtagtatatatttygggtttatygaagtagttttattagggaygtgaaggaattygttaaaatgttayg

SEQ ID NO: 6150 - DNA, 1007 bp, Artificial Sequence
  Description of Artificial Sequence: Synthetic polynucleotide
gygayggtgttygtgygtttttttattagtgtatgtgygaggagggttggaggtatgagygaaagagggaaggtaatttyggtttttaaaaaatttaggggatttttttttttagtataagygtttataygtgygttygygyggatatatatatatatatttatatttatatataaataaatttttagtatttgtttyggaaagttttttttygtaggttggttygaaggygyggtttygttagyggagagtttttggatttatygtggtattatttttaattaattttgyggygyggygyggggagygtagggtgggttttaatttygggttygtttgaygttatttgggaaygygyggyggygyggggyggygyggattygggaygatttygtygygatttggtttygttttygttygygyggggttttgtttygygggaattaaaggaaggagaaatgttagtatatttttaattggaaatygagttttttttttagagyggtttgtttatttaggattgggtattagaatttaggggaggttttaattgaagtgayggttttggagattatggggaatatatggttttatygtygggttttttatttgtatttttttataaaattgtygttygtgtgtgtttttgygtttggttttttgtatttttaaggggtttttgaagatagggtygaatgygygygggggttttaggtattttgygttttayggygggtttygtagttyggttygagtyggttttggaagtttygttttggattagattggtatygaygtygtttttagtttgagygttgagagggaaaaygagagttagaaaggaaagaaatyggattggtgattgtttggtaggggtgtaatttaaattgttgtgagtagayggtaggagggagttgttaaggtaaygggtgatttttattygtygttttttygttaaggttggggagagggaagttttygygtgttgggttagggttaagttygyg

SEQ ID NO: 6151 - DNA, 2191 bp, Artificial Sequence
  Description of Artificial Sequence: Synthetic polynucleotide
tyggaygygatygttygtagtttgyggtttttggyggttgaggagtygyggygatttttggtttttatygtagtagttaagttyggygygtattaatyggygttgttgaaagttggagagtttttagttygtygatagaattyggyggtgggygttaggggaattttttttagtgtygtaattaggaaagttttaaaaagtaaggattttagatagataagagatttatttttttttttagtataagaaatatttygygtygygttagtygaaygttgttygtataaggttattygttttttttggtygggaygtattyggtgttttttagttttttattagaattggtttagggggygyggaaatagagaggtaattgtgttyggtttgtggttttagayggaaaygttttygggttttttggttygggggataagggttygaaattttaatagtygygagggtaaggatagaattattaattttygttyggatgttygggatttgtttttttaagttygtttyggtttttttaaaggaygygyggtatagtttatgygttttyggtattttattttatttttttatggttttttttaaatttttttyggggagttttataaagtatagayggygttttgaaattygttaggtattygttagttatttttattttygtttttygaattttttttgtygygtttttttygtttygtattttttttttygygtttttgggaagttagaagtaaattaygagaaaatgttttygtaaggagtttttttatattygttttgttattgaaataaaagygtagggaggagggaggtgggagaggaggygggaggaaggtttagaaagaygatggggatagtagtaggaaggagttggggaggggggttaaggtggtaagtagagttgggggtttagagttygttttygtgtygygyggygagtygtttatatgtttaggtygttgtaggtgttgaagaattttatttgattgtaygtttgaatttagtttattatttaggtttygtggygggggatggggggtatgattaygygggyggaggttttgaagtagggggttttgtagygtaggaygatgggygaggttttttygatgygygtggggtattggtygatggtggygtatatatygtatattaygatgttttygygtyggattygygttttgtaggtgatgttttggatatagtttattttgtagttyggtgtyggtayggygyggygtggggtagygygggggttygygygggtagtygggggygttygttaygtyggtatggygaygygtygttygttttyggttagatttagttygtatttaggagyggggagtygtygggtatttttggggaagttttttttttttgtagtygygyggggttttygttgtttygaygttygtttaygttygttttttygtttyggtagggygygyggagggtgtatttttaggaggyggygggtgttttygtyggttttagygttygggyggagggtagggaggggagyggygttgygaggaatggtgtttatttygggtyggagtttttygtttttygtyggagaggaggaggyggtagyggyggyggtatggagtygggggagggyggyggtggtagygttyggtttgtttgttttygyggyggtagtagtagtagtygtygtygtygtygtygttgtatgaatttttgtattayggttgtttttygygtgtagygtatttagyggygggygagygggyggtttaagaggtaggyggaggtagtagyggyggyggyggygatyggagttttygtyggtttygtttygtagtyggattatatygatatttttyggttyggttgtttyggttyggggggygttaggaggttgtggttyggggtggagagttttaayggttggagtagtataggaygtgtttygyggaggaaattggttgtaygttatgagttttgtttttattyggttgtygttygggtggggggggggtaatgtgtaagggtgggggtgtttaaagggtygttagygtyggggtggggtttygtaygtggggttgaggyggggyggggttttggtaggtggtgttttggggtgggggtgggggattagggygggtttaagygttatygggtgggtgaggtygagtagggygyggyg

SEQ ID NO: 6152 - DNA, 859 bp, Artificial Sequence
  Description of Artificial Sequence: Synthetic polynucleotide
aygtagaggtygtggtatttggtygtagttgggttgtagtgygtgygygtttggtttggtggttygatgggaagttyggggyggggtagtygyggggygggggyggggygtygyggagataggttaygtttttgttygttygygtaggygygttgygggtygttagttgttagagttaagyggygggttggyggygggtttygaygtttgygttaggatttggttggttgagttyggygtagtagtagtagttagggtagygyggtttttattttttgttaggtygtagaggygagtagggattagttggtygtyggtttttygggtaagatggggaatygggagatggaggagttgatttygttggtgaatygtttgtaggaygygttttyggygttgggatagagttgtttgttggagttgtygtagatygtygtggtgggyggttagagygtyggtaagagttyggtgttygagaatttygtgggtaggtaagygygtagggygyggagtaaggatgyggtagtggggygatttygttgygggtygttggaaygtggaygggtagygggagttagagggtggatggattaggygttgyggtggaatggggggtagagtggaatggggggtagagtggyggtgttygtggggygggyggggttttttagttttgggtatttttygttttttgttatttttygtttggtggtttttttgtttgttttttatygtgygatataaagttattttttttttgttttttagtyggggagtygggggaggggttygtttygggttygatttttattttttyggtgygygttagtttygggtagtttttttgygtagygygtyg

SEQ ID NO: 6153 - DNA, 791 bp, Artificial Sequence
  Description of Artificial Sequence: Synthetic polynucleotide
tyggggtattygtgtgygygygaggattttttttgtagagaatgaaattatygttttttttygttygtggtttatttyggggtttttattttaygtaagtgttgtggaatttyggggtgatgagtttygggggaagttagtattttttgttttttagtgtyggygttyggtagagtttygggatttttagtttttgtygtygttgaggaygyggygygggttgttggtygygtygtygagggagggttyggatagttttgtagygygttttagyggagttttgggggtygygtygtttttttaaatatgatttagaatygttygttagttttggttttagygtttggygygagygaatygggtttggttgtttyggtttygtttgaattttgygggtygygggttagggygygtygggattygttgygttaggattttgtagattyggtygyggtygggtygagtgtttttygtyggggttttaygtttayggtttaygtttgtaatattagggttgtayggygggttygtagttgggtttgygtttgggattyggggttttttgygtttttygtgtygtattttttgttttaattttaagyggaygggttttggggttttatyggttaggtyggagttttagttttataatttttttttttttatygtattgttttttttgygttgtggygggagttggggattggggtyggagaaaggagaygygtyggtttttaagttttttgagttatttyggtttygggygygttttttagggttgtagtygygyg

SEQ ID NO: 6154 - DNA, 586 bp, Artificial Sequence
  Description of Artificial Sequence: Synthetic polynucleotide
gygaagaggagggagtttygaaaggagggaaaygagtyggtaaggggygataggagygagtygggaagggagagtagyggagggttgtagagttgygggygttyggatygtgttatatatttttygyggggtayggagggtattgyggggggagatatataaagatatgygaagaggggttgaaygaggttygygtataaagaygtyggggygtayggtagttggggttgtatttatygttttygygtygygtygtgtyggggtygggttagygagtagttyggggttgagygygtggyggyggyggyggyggyggyggyggygggtaggygygggattygggtygttygygtttttygggtgattygggttyggtagtaggygygygygggggyggyggygtttaagtttaatttggttttygtttygttttttgtttagttygtyggtgttttttttttttygygatttygtttttttttaygttttttttttygttttttttygygtttagtttygttttttttattttgtaaaataaagtyggggaaaatgtttgttygtgtagttyggagygygtagttyg

SEQ ID NO: 6155 - DNA, 1678 bp, Artificial Sequence
  Description of Artificial Sequence: Synthetic polynucleotide
tygataggygaaattgtaagaatygggaggggyggttgyggygtttaggygygaggtatatattatattttttygtagttttttattttttttagaygtaygtgtttaaagagtttttgttttaatyggtttygttttattttygttyggtttttagttttgtttgtattgttggttttaagtttttttygagaggygggygtgtatagttgtagtggyggyggtagyggttattaagygttyggyggygtttygttatttatttttttttagttttyggygttgtagttttygttygtyggggagggygygtttagyggaataggagtygagggtggggygtygagaggagggaatttygggtygtatygttatagttttygtagtggtaaaggyggyggyggyggyggyggtagyggtagtagtaggtggagygagttatagygtttggtttgaaatttattgttgtagttattygggttggagttggttygttgggtggagttagtgttygtttyggttygattttyggttttygggatatttgggttgyggaggtyggttggtyggagttayggttggggaygggygygtttyggagygtayggttgygttggaagtygygtttggggygtaggattaaygggatttattttttttyggttatttaaagattttttttttygggaaagagygttgttyggttttgggatttgggaggagttyggaggtygttygggtatttygttggatattattygtttgygtttyggtggygygggagggttyggagyggagygttygtttttttttagyggtttagtggagaaaagtagagagttttttttggggygaatgggattttttttttyggtttttygtggagtygtygtatygtttgtygtgttggtttygaggggtttatagtttggtattaatttgtaggtgttygttgttgatttggtttttttttygatttgyggayggttttttttagygattttygatataygtttttttgttttygtyggagggtygggtttggggtygtyggagtttgygggaatttagygtttattygttgattttygagtygtttygttagttgtgygtttttttgggtattagtttggagaggagygtgtagaygyggttttttggagggagtgyggttttttagggaggtatygggtttttaggggttttttggygtgtgtggtgggattggggttygtyggttatggtttttattttygttgygttttgttatatgttgtttttggtgttgtgygttgygtttatttttttygttatttggtaygtgagtaataygttttggttttttttttttygttttaatttygttaaattttttygattttattttattttttttattttgygggygtgggygaatyggaaggttggattttttgtygttttattgtttyggggtaggaggtagttygttgtatttygtygggygygttttyggtgttttggttggaggygaggggtygttggtgtttaggtaggatattttttgtagggttygattgggygtttygggtttygggygtyggggagtggyggttataattataattaatttttttttttttygtttygtttttttttgtyggygggaggygaaggagaagygtygtygtyggtttyg

SEQ ID NO: 6156 - DNA, 1600 bp, Artificial Sequence
  Description of Artificial Sequence: Synthetic polynucleotide
tygaygatattgttattggaaaagtgttggttayggttttygttttattttttttatttaygggttyggagtttttaggagtagttagatygattatygtttttgtagttttatttgttttyggagagatatttataagttagtttayggagagtttggattygttygttttagtatttaygtttttttygygttyggttttagygtygttttygatatttattygygggtagttttttatygtyggtattttygaagygygggggygggyggtttygtagygttgygttttagttygygtyggtttygttttttttyggtttttgtgygttyggggygyggggyggtggyggggyggtttttgggggtttygggggttygygttygtygttygaggaggyggtygaggaggagygygaggyggtygaggtgttgtagaaggggttttygtygttgttygggtyggattygtygaataygtygttygagatgtgtaggttttygtagygygygygggtagtttygagtagygtyggygttttttttygygygttttygtygttttyggttatggtttyggtygtygttygygygttygtttttatagtgttttttagtygtataygtygggttttgggttygygtygyggttygtygttttttattagygtagttygtagtatagygttygtygtttygtgttyggtyggttygtygttttggtygtttygggtttagygttyggggaagygttttyggagttygggygtygtaggttgygggtygyggygggaggygagtygygygyggggttggtaggggygatttagagygggygggaygtagaggttgyggtygagattaggygtygtygtygttatygtygttattatygttattatygtygtygttgtgttttttyggygttygtygtttttttgttygttttttttayggttttyggygttyggttgtygattttttygggygygagtygttagaggygggttttgtygttttttatttttygttygtyggttaatggggagttyggttyggatagtygygggggagttgggygggttyggygyggggaaygtttttattttttttygyggggyggggyggggygygyggtyggggttggyggttagggggagggtygtyggyggtagtgtyggtttttttttatagggaygygtagttygggatygttaygygtagygygggagggggagggygggatyggggaataggaggggagggggattygggtgtttttagyggttygggttygyggayggagtgygggtygatttygtttattgttttttttygtagttygygtgtagttttagggagttgttygtttyggtggttttgaattaggygtygtygaaaygttttaggtaggyggygggttygaggttattatattygyggyggyggttgttgtygaggttttttgggggttattgttagttgygtygtatgtttttataaatataggggttgtttagtttttgggaatttygttttaattaggagttygtttygtyggtttattgttggtygttggttagatgttaatttygtttyg

SEQ ID NO: 6157 - DNA, 2394 bp, Artificial Sequence; identical to SEQ ID NO: 6146
  Description of Artificial Sequence: Synthetic polynucleotide

SEQ ID NO: 6158 - DNA, 1160 bp, Artificial Sequence
  Description of Artificial Sequence: Synthetic polynucleotide
gygygttyggtgttttaaggtttttaggyggagygygggygygaggtgygggtttyggggyggagygtaygttygggaggygggaagtgggtagtagygttttygtttggtttttgtgygtttygattygaygttttttygttygattaggtgtttygagagygtatagttgggagggttttttyggtygyggygagatttaygtttgyggtgtgttagggyggyggygayggtgaygggygtggggygyggygttgtttyggttgtygggtygttgyggygagygygygggtyggtttggagttatygggttgaatygtygygtttgtatygtgtygtaygtygyggaggygttygggtatagatygygygggygygtataaagyggttyggggyggtyggygyggygtagattttyggtgggtagygtattttagtttttttaggttagyggttgtagggagtttyggttygyggttttttygttttaagtttgggagttgtyggttttattttgtttttgtttatggggattygagagttttttagyggygtatttaggggtaagagtattgtygtgtgagtagygtttygggygtgggtgagygagtyggygggygggaggtyggagygtyggggtagttttttgtagttgggatattgggtagtttgaggttyggggaagggyggygygygyggtggagttgttygggaagttttagttattttttttttygttattygttttaattygtattgtttygagaygtttaggatagggtattggggatagttgttyggggaagtgggtgagtggyggygggaagggaggagygygggttttgtygyggygttygttttyggagggtttyggtygygtttttgttttygttttgggatttgttttttaygaatttttttttttttgtttatgttttttttgtttatttatttgttygtggygtttgygatygtagtggtatgaggaggttatyggaygttagttttyggagattgttygatattagtttttagtttyggtagtttaagtatttggtggtggaygaggygattaaggaggatttgaaatggtygygtttygtggaggattttattagygggtyggtggggtttaygtttatygaggagyggattttgyg

SEQ ID NO: 6159 - DNA, 588 bp, Artificial Sequence
  Description of Artificial Sequence: Synthetic polynucleotide
gyggggttgggygtttyggggaggagggyggagtaggtgagttgyggggtgggagtagggagtgtatttgtaygtgaygttggagtttgtagtaatttttaagtaggaggttgtgygygygtgtgtgtggagtggttgygyggtyggggaggatgtgygttgtagggyggtygtygtagtgagtaaygyggtaatyggagttyggygggtagtyggggaggtygggattgagaggggygagtygttggtgtttttyggyggtagagggtygygtyggttaygggttygggagagaygygttttagtyggttttaggatgtaggygatyggyggtagygtttttgtaggyggtyggtttattatgaagaagtattyggttygggtggtttygtttagygtttgtaatagttyggttttgatttttattaaagtggaaggtaatgygyggtygtttygtttygggggtttttgtattttagtyggggaatgttgttattttgaggggggttgtttggttgyggggygtyggggttgggggtattgtttttttaggaygyggtttygtagtgtagagygtygtygtttgyg

SEQ ID NO: 6160 - DNA, 878 bp, Artificial Sequence
  Description of Artificial Sequence: Synthetic polynucleotide
gygattygygattgtagtygttttttaaggttagtttttygttygtagtttgtttygggyggtagtygtgttagtttttygttaggattygtttagggggaygtgggtatygggtaggaygygygttttgggygttggggaygttygggatattyggggtttygttttgygttttagtttygggtygyggtatttyggttttygtttygygtttttggagggaggtatygagggaygygtagygaaggggttttgttaattgttaaagtaggaagtgagttygtggaagaagygaaggaggagaagaagaagggaggggaaggyggaggagggtaggggygygtagagttayggtttgttttaggygygtyggaatygtaggattttttattttygtggttttayggttttttygygtttyggaggtttgttagtttygttyggaygttygtttgtttttaattygtygttatggttttatyggaygattttttgygygtaggtaaagggatatagygtygygttygtttttggagygagtatygyggggygggagttygggaggygttygtagtagtygtagggttatygaggtygggtttyggygattttygagggaggttygggaattattttygatttaggygttagattyggagtygtayggggtttttagtttagtttygygagyggttgttgatygtttttttygygttygttagggtttttgtttygygttagttatygygygttttttttttgtttatgtygtagttttygtggtttttgttttggattygggatgttaggttgagataygttttgtaaatttttggtagaaatgggygtaagggggtggatttygttttygtttttyg

SEQ ID NO: 6161 - DNA, 561 bp, Artificial Sequence
  Description of Artificial Sequence: Synthetic polynucleotide
gygygggtttaygttggtygttagyggygttaattttatttattygttaatttgttagtttttggattgagtaaaatagtttttaaagaygygggtaaaygtygttttaaagtttattattatgtaaygttaggttgttyggagttaygttggtggtatttttttttygtgtttattttgtataggtatttttagaatttygtgtaaatgaattttatygggagaygtaggtgggtaggtygggtyggtagggattaagagtttgaaagggaatttgttttttttttttygtagttyggttattaaggtaagaaattgtaggtagagaagttttygaattygatttaggaygtyggygtttgttaggattttttygtttgtttttygygtttygygygygtttatgttattattayggggagggtgtatgyggtaggtgtttggtygaggttttygggagygagtygtttttaygtgttttagtttgtttttttttygaagttagaygttggygttgtagttttgttgtttgaygttgttgtagaagttygygtttattyg

SEQ ID NO: 6162 - DNA, 1235 bp, Artificial Sequence
  Description of Artificial Sequence: Synthetic polynucleotide
gygatygtagggtttygtttattttttttttygggatagtttggatgggagtagttggygygagggttygttttttygtttttgggtaatttttttggtattgggagaygagatggttttyggagggtggaaggtagtgttagttyggtyggttattggggattgyggggttyggagaygygyggggttttyggggagtttttygtygttttygttttatttygttygggttttttaaatatgtygtagygtggttgtttattgttttttttgggtaagaggaggttttagatatttttaygggatttgaattttygagygttttgtayggagtagttatttygttagtattttaaagtgaagttgtttataayggataagttyggagattttatgagaggtyggggtggagaagtygggggtgaaggggggtaggggtyggygygttaygyggtttttattttttygtttggattttygtttttttttttttttggatttgtatttgagttgattgtttagttttttagattttttgtygttttttaggatygaggttatggtygagatttaggygyggagtttagagtygttttttttttgtatttgtatttgtttttttttyggtagtygtygtygtygttgttgygaagtttgaggttgtaaattygggagyggtttattttttaggattgagtaggaaagygygtttygtttttttgtttttygaattgttttttatgatttgtttttattgggttgggggtttyggttgggygtttggagygagttgttttttggttagggagggyggggaagggygygyggygttttgagtgtttygagtttttygygggttttgttttttgttttgggtttttagygtagggaggttatttttgygtttttgttagttgtttggtattagttattttgaagttaattaygtagggagtttgtttatttgttgtagtagygtttaattagatttaattataattgttttttggttttgatattagtagtagtattagtygtatygtygtttggtygtttgtaaatttagttttygtttggayggtgaagtttttaggatyggyggttggagggaggttgttttyggggaataaggaygyggygygggtgygtttgggagagatygggggagtttttaggagggattttgttygggaggaygaggttttttgtygtagtttygyggatagtttagttyg

SEQ ID NO: 6163 - DNA, 5964 bp, Artificial Sequence
  Description of Artificial Sequence: Synthetic polynucleotide
gyggtaatygagttagatttaagaggggtyggtttygtttaaattggttttttattaatggtttyggattagtygyggttgtgttgygggagtttttaggaygyggttggggttggtgygyggggtttyggaattttaaattyggttyggttyggtaaggtttagggagataaggtagagaaggttggggtgagygagaagtygggyggtygatygttagggttaygagtttygttttgtttttttggaattttatttaattttaaaggtttaaagattttgaaaatttygaaagygaaattgygagttggtttttagaagtttgagaayggttttttaggttttttagygtygtttygggattttyggatattataaaygttattaattaygagtatyggtgttygtggttattgtttygaatggtttttattygygttttygggaattttttyggtttttygygtatttaggtttttagttttagttattggtgygtttygagtttttaggtgttagagyggtggtyggtygggtttttgtttagtttyggttttttttttttttttattagaaggaaaaatttgggtttttygagaattttgtggaatgttttttgtaattaattgtatattygtttttayggtayggtttygtgtaaaatygygggtttyggggttttggagtaaattgygtttgttagyggygaygttaggaggataaggggaggggttygyggttgaaattgtagtttygtagtatagagttattttaggttgttttttatttygyggggtttatgggaaagtyggtttygggagggygygtttaaaygtaggttggaggagttayggaygygttttggtyggygtgtygttatygtttagtttygttgtttaggtgggaggggttatttgtygyggggtttttaagttagtgtygtttgttttyggtttttatttattgatagtayggygttygagtgattttgtttagtttygttttgygtttttgtaaattaygttgttgygttaattataaatttggttaatatgtttttgtaattttattatttaaaaaygtttttaggtatttggtygttgttagattaggttygygggttyggaggaggtttttttatttgttttygttagtttyggggatygtgygyggttttygtgtggttttygtttaygaggtttttygggtaggaatygtygygygatttttgtttagyggtygygttttggttaygggygatttttgtygggaattttgttttyggttaagttgygttttygtatttyggtggtttttattygagttygygtttgttggttttttttttggtttttttgtttgatttygattttgttttygaattttatttttagatttttttygttttggaaygtygatttttttttygtatttygtygtttatttatatttttyggygattgttyggtttttatgttygttaagataagaagatgttttttttygatgygtygagagggtttttaagtygagtaagggataattttttttttaaaygttgtttttattttttattttttttagagygygaaatttaaaagtaaggaaggtaatttttygtttygattttaygtgtttgttttttagagtygygygttttygtttttttgttttattttattattattattattattttggttttttttaagtttyggtttyggttttttattttttattttagagyggygtggaggaaagtaggagtttattattaagtgtagygygttttttgtatataygaaattyggttggygtttgtagttygattgtatttaatattygggatagttagtttttttaataagtattttttygttttatttattyggggatttattygygtaggatttagtatatataaggygagagttagttygttttttagaaagataaaataaattattttttttgtttttatgtattttatattaygtgttygtagtttgttaygttaaattatggtagggtttggttttaagaygtatatatatattyggggtggttttttttgatatatatatttaaaaaaattgygtataygtaggtttgtatattaatttataggtatataygatagttgygtttyggtgttttggttygggttaggggtatttttttattttttttttttttagtaatggatttgatatatagattttaattayggaaaaaaaaaatyggatagtttattttttttttttttttttatttaattygttaaagygttttttggggtagttaaagagagtygaaattaaggggtggaaattttagttgggtttttttttattttaaaatttttatttttagtttttaaaagttattttagttygttatattgaaattggtayggtttttaaagatttttttttygtagttgtggygtttttaagaaaataygagtayggattaggttttggatgagtgttyggttatygagaattagttattttttattttttaggattttttagttttttttagtttttttttatygtttttggttaaaattaataaatatatttygtagtttttatagttgtattttggyggatttttgtaaaatatatatatatatatatatatttaygtaygtatattaaaaaataaattttagaattagtttaagttagtaattttgaaagggggtygaataagaggagataatyggaaagtttttaagtgataggatattattttaaagagaaaataatgaataaaaagattattttygttggagtaygttttaaaattattattgttaattttattttagttgtttaggtaaatgtttttaagggagygatttygaatgtttgtaygatttttatttttatgtyggttttygatttttygtttttattattttttttttttatttaaattaaaagaaaggggagattttagygyggaggagaygygggagygyggggtaggtagtagyggyggttgygtygttaaaatgagtgtagaaaygaggaaggtgggyggygggaggggataggttgygttyggggaaggaggatattttgtaatttyggayggattttygtayggttyggttttttygagttyggagaygtaggygaaggggattygggaagtaaaaatgataatttggagygtatagaggagtttgaagtttygtttaagtgtagtygttttttttttttgtttttttttttygtttttttgtattttttttagtttttttttattygttatttttaattttagtttttttaggtttttttttttttttttttttttttttttttttttaggttggaaaaagtttttgattagygtatttaatttgygggtygaagggttgtttttyggttagtttgggygtyggggatagtagtyggygyggygttttatttggtgaagttygttttgttttyggygtggatttaggtttyggtygtygttygggagggtatyggtttygttygtttgttygttygttygtttttgttygttygtttttygttygtygtttttttygygygttygtttyggtttttyggtttttattatagtttattttaatatggtattttttttgtgygtatgttyggygtttttttttttttttttttttttttttttttaagattttgtgtgtgtgtgtatgtgtgtgygtgygygtgtagygaatttttttaaygattttttttagygtttgtaaaattttttaagttaattagtttgygggaygtgatyggttttttttttagttagtttygygttattttttgygtttaagtaggygggtatttttaggattttgggattttttaygtttaygyggttttttttttatygygttttttttttttttttttgtgagttttttttatatatgatttgtagaaagtttttatygygggygttttygtatattttttygtaaggataattgggtaaattttygtttttttggttgyggttygtgagttgggtttttaatggtttagtygatygtgtgtataaatttgygttttattygtyggggatygttgggagyggagataaatttaatttttagggtaattttggtttygttygttttattttattttgtgtttaaatagagttttttttgaagttgygaatatttttaggttttttgggtagggttggaggggtygaggagagttattygagggaaaggtgtttygaggggtaggaaattaagttggggttgttygggygagttgttaggtagtygtgttygttayggygttttatggggtatttagttagtggygggttttatagggygggaaaagaatygtygtttatattttagtaaaaygtggttttygayggttygttggagagtttyggyggtygtgagtttygggtagggttggaygtttgyggagttttygggtattttgtttygggygtttggggaggaaygyggagtttttagggttttaggtgtaayggttgygtagagtttaaaygaaatgtttttagtgyggaaaagtyggtgaygttttggtagtaagattaagagttttygaagaaygttgygtttttaattagggggtttygtagagatgtttgtgtgggtttgtattgtatatttttgygaaatagygaatggataygtttgtttagggtttttatggttgttaaagggggtaaaattatttagttttttaaatttgtgttttatgaattttttttatagtatttttttttagggggttaagaggttttttaggttttygtgggttygtagttttattygttttttttygttttgtatttttaaggagaggtgttygttttgaagggttaggggttagttatggagtgaggggatyggggttgattaygygyggtatagatagaggtttttaggygggtttttttttggayggtggggtyggagttgatttagaagaaatayggagggaygtgtygagaagtygttttttttygtygygattttggagagygtttttttatttaaaggatttgtygagttgagagatttagggygggygttygtagtygtgaggttttttgygtygttagtatgggaagattttgtttttttatattttggagaaygttgggygaygattaaagygtttttygtyggtttgttattttatgtgatataggagttaygtgagatttagaagagtttagygattygtygygyggygtattttaaattttagtttgagtttgygatttttttagttttttagtttttagttgttggggatattaagtyggagttttgggttttttgttttgtgggtygttgaaagtagagattttttaaattaatygaatygggygtattaattttttygtttgtatttygttgtttttyggttgagtttygaggyggttttaggtagaatttgttggattgattgyggygtttagaaatttggagtgtgggttttagatattttttayggtttggtttygggttttaatatttaagtygttttttttggtttttttattatatagyggggtttgtggaaagggaggggtygagagattygtyggygtattattgttttygaggggtttttattttgtgtattgttgaagygtagggygygtygyggtaggaatggtttygagtgyggattttttgttttgagttttttatttttggttygygttgygtttatttagtggttttggtttygtagggygatagyggttgtttttttttatttgygttttagatygygyggtttygtttagttttygggagtygataggygtttgttttggtgttagygtagggtttttygggggtttggggtaggggtaggggtgygggggggaaggggagaaygtaatttttttttgtaggagtygtggagaygtgagttgtaattagttatygyg

SEQ ID NO: 6164 - DNA, 5964 bp, Artificial Sequence; identical to SEQ ID NO: 6163
  Description of Artificial Sequence: Synthetic polynucleotide

SEQ ID NO: 6165 - DNA, 5964 bp, Artificial Sequence; identical to SEQ ID NO: 6163
  Description of Artificial Sequence: Synthetic polynucleotide

SEQ ID NO: 6166 - DNA, 703 bp, Artificial Sequence
  Description of Artificial Sequence: Synthetic polynucleotide
aygygaaataaaygattttaggtttttagtaaagaagtagyggygygtttttttttttyggtttagygtgaaaatayggaaggygaagggttgtygttagtygtttttttgttatygygatygggaaataaagatatattattttttattttttgygtttttaagggattygaggaatttttggttgtaagyggttggtatttyggaaygggygttttattygttygggygaaggtttttggtttattaggyggttttggygttygtagttggygagttttygtttygttttygtygtygttttygtygtgggttttyggygttagtttatagttygttygygtttttygygtygagtttggttyggygttagtgagtttygtygtyggttygtttttygttygygttyggttygtygtatggtgygtttagygygtttygagttagttttyggygygttgttaggtygggtgttaggyggttatygygygttatygtygtygttatygttygtygttygattttggataataatgygygttttygtttttttagaaagttagggaygtttttagtygtygttagagttggttyggttttttagttttttttygtggtattygtaggygagataaagttygttttyggtgaggttgygygygtttaaagygtgygggatgtttagtayggaggtttttaagyg

SEQ ID NO: 6167 - DNA, 1315 bp, Artificial Sequence
  Description of Artificial Sequence: Synthetic polynucleotide
tygygttttttttaaatataygtatatttttatatttattygygtygttttagtttgtttatttttaaygagtttaagtyggtgtagtygygttttatgttyggttygtagttttygagttttagttygttygygttgggygtygttgtatttgttagtggygygyggtatygyggtygtygggtttyggagygtttttagygttgygggggtgtygtgggtggtttttttgtttttttttattagaattttgtatagtyggggagaaaatttaagttgttatatttygtygggagttgttggttgaaaggttgggagtygygttttttgtttggtagggagatttygtatttttyggtttttaggttaggtttttagttttagagttggaagagttttagggygggaaggaagagatagtaaggattagaatggggagtatgagattttgatgyggaattygayggtaggtttygttttatagttgtttygtttatagygatgygygttagagttttygtagttttgatyggtttttttgttttttagtygtygtttatyggtyggagggtygtttttttgygatttttttttttattttatttttaggtygtygtygttygtgggttgtttttygtygyggttaaaagttttygygttygaggggaagygatgggyggtttgggggttygggggygttaggyggggygygyggygyggggygyggtyggygggtgggtgggttatttggygyggtygggygygtttgtygggtattagagtaggtgtagtagtagtagtagtagtaggttggygagtagggygagtagtgygtttttyggtygtattttgagttataggygtygtygttatygttgttgtyggggygaagtatagttygggyggtttygattygyggttttygtygtygtygttatygtygtygtggtygtagtttygygtatttatagygtttataggyggtagygaggggygttygtagtttattyggtagagttttygyggygggyggagaagaagtygygttygggttygtttygggttttyggtttyggttygyggagygtygygatyggttggtagatgaygattygtygagttygtygtttgttttttyggaggygttyggagttgttgygggtttyggtygtygttgttattgttgttgtygtygtygtygtgyggggttatttgaaggttggggygyggaagtttaatttygtgttgattgggttttaagttttttgygttttygtttygtttygagtgttygygaatttttyggaygtttayg

SEQ ID NO: 6168 - DNA, 1316 bp, Artificial Sequence
  Description of Artificial Sequence: Synthetic polynucleotide
gyggtygtyggtttttagttttgggattattttggtttygatayggagtgataggggatttttaygygttttygtatttagggygtttttttagttgyggyggaggtatagagaggttttggyggygttgtggtttyggtyggtatygggtttygygtagtygggttttttattttgagtggagttgttttttaagtatttagtttttgttaattattgtgtttaatattaagttttyggggygttttgttttgygttatygygygttygttygttygttygtttaatttatttgttgaagattaggtagtttaggtggttgattttgtggtyggagyggtggyggttgtagtttttttataggtttttgaaggtygtgatggttaggatgaagagtatyggygttagtgttaggtygggttggaaggygtttatygtyggtaygaagttgagtagygygatgaagataaagtataygttggtygggyggtggaattgttygaataggtttttgggtaggaaggatagtagygtgtatttggtagttttgagtyggttgtyggttaggtgttgggtatattygygtygtygtygtygttygtttttggtygygttagtygtagggttttyggygttygggggyggtagtaggttggagygtatygtgygygttttgttttttyggygttttygtygtttyggaggttygggtttttyggttttygtyggttttygttttatggtygygtgtygtygygttyggttttttygtygtttaygttygttygygtyggttttttaggttattattattygyggttygggygyggyggtgygagtttttygtttgygggaygtayggagatygyggttagygygtygtttggtyggtttagygygtttagttygygtttagtttygtttattttygtttagtttygtygttyggtygtagtttttagggygtaagttgggygggtgtygtatagagtttttttgttttygtygttygttttyggttygggtygttttygtygyggtggttayggtttygttttygtttygygttyggattgggttaygtyggatagygggaaataaaaaaagttygagttggaaattttagagaggtttagtttygttttttagaagtattagttyggttttaaaaygttgtaaaygygygttgtttgtagtaggagagaggaaatygygaagygygagaaaaggygttttygtttttaagtagttygygygtttttttaggggttagatttgttttattttggayggygaaaygatttygggagatttyg

SEQ ID NO: 6169 - DNA, 1110 bp, Artificial Sequence
  Description of Artificial Sequence: Synthetic polynucleotide
gygtygggtttggtttttgtggtttygtaaattttttagtttgtgtgttayggygaygygtagyggttgagtyggagtttaygyggygygygtttttygygaggaatttttyggtttgtaggttgtttgttattttygtttttygaygygtttttttttggttygygttttyggagttttttttttttttggygaggatttttttyggygttygyggtttygattttygtygygttgygttygttttttyggtttyggttgtttygttgagggttttttttttttaggtatygtagtygygttttygygtttygtttttygagyggttygtttygttygatgtttyggtttygtttygygtattgagygtttggtagtagggygtygagtttyggggygttgyggggygttgygtygagaayggtygggtttgagttttgggyggtttttagagtygattagagygyggggaggygggggygaggaggaggggattygtygtygggggttggttgtttygtttygagtygatttttygttaatggtttaaagggatatgtttaagtygttttttatagyggyggyggyggtggygtaggagatttagatggaattgttagagaaygtggttttygygggggygttyggagtygtygtataggtagygagagygyggygtttttttttttttttgtgagtygtygggtagggtatygatttygggttttttyggygtttttattgtagggatttttagtttygtatttttttttttygtygtttgtttattttttgttttttttttggygtyggggattttgtttttttgygtttttttttggttttgtttyggtttttatttttttttgttttygaaaagttagtggggaagggygggggagatttgttagtttttttagatttttttygggttgttttagttggtttttttygttttttttygggagaggtatatggagagatatgaattaggggagtggattggatttgttgaagatygtgagttygggtgggygggagggggttygtttttygtagygttttttaygatgtygatttttttggttaygtttygagtyggggtgggyg

SEQ ID NO: 6170 - DNA, 1655 bp, Artificial Sequence
  Description of Artificial Sequence: Synthetic polynucleotide
tygttttygttttygttgatattttgtaaagtygyggyggtagyggyggggattaygttgyggtgtattatttttygttattttttygygttgggttggggtygagggggtttygtagagtyggtaatygaatyggttttggtttgttttttttattttttagttattattagaattagttttygygaaggggygagttgtggttaattttttygtgtttagggagatttygttagggtyggggyggggygygatygtttttygtagtygggygygaaggyggttygggagttaggtgggtgtggggygtagttggyggagttgtttagggygtgygagtaggttgygaggatggygtttyggyggygyggaggtatygtttygygttttttygatagtttttyggtttgtttttttttttygygttttggggtagtyggttgtttggggygtayggggttggagtggttttttttttttttttygttaggttttttyggtttaatttgttggtygygattttttagttagtttygaggaaagtgtagttattggataggtttgtgygggttgtyggttttagggaggaaggtgggagaagtttggaggagygaaggggagggyggagggaggagggaggagggtgyggyggtagatttggtaaattgygagttgttttttttttttaaagtgtggagaaggagygygggggagygtggygayggtagygtttttttygttattaaatttttggggtttygygggggtttggggttatttttttttgagttyggaggaattttttttygataggttttagygtgatttttttttattttattttttttttttttttttttttttttttttttttttttttaaatatattttttttttggtttyggattttagattgttgtagttttaatttttttagggtttagttttttggagttgtttattttttyggttgygagaaaggaygygygttttgygtygggygaagaaaagaagtaaaatttgtygggagggtttygttattaatttttttttygtaaatttaaattttttgtyggggttatttttagatagaggaaagtttttgtagagtygattagttttagtggatttggggtaggtagyggygttggttgtggaattagatttgttttgaatttagtggagygtatygttggggttyggaagttatygttygygggtatygggttggygttgttygagtggaatygatagtttgygagtttyggttgtaagtggtttttttttttygyggttgttgtttagtgtygggtgagggttgygagtgtggtaagttgtaaagagagttttagaggttygaagagygttgygtttttattygygttygttttttttttttttyggttttttattgtgaaatygtagygatatttataaaggttttygggttttatygagatygattygtagygtttggttyggtygtgtttattgtatygggagttttygagtatyggygaaggattggygggtggggtagggaggtggyggyggyggtatggygaggttttygaaggtygatttggtygttgtaggagttatgttattttgttatttttttayggattagttttagttygtygatgggaaattyg

SEQ ID NO: 6171 - DNA, 1655 bp, Artificial Sequence; identical to SEQ ID NO: 6170
  Description of Artificial Sequence: Synthetic polynucleotide

SEQ ID NO: 6172 - DNA, 304 bp, Artificial Sequence
  Description of Artificial Sequence: Synthetic polynucleotide
gygggygttggaaggggggyggggtaaatgyggtyggygtagaggtggggagtaggtgggaaaggtggaggygggttygtttttggagatttatttttgtttttattgtttttygtttgttagttttatagataggtttgaaygygtagagagttttttggagtgttttgattttgttttygagagggtttttaattttygtatttttttagtggttgttttggtaggtgygygttttgyggggagttgygtttygggggttatygtygagygggagttgttttttggaattttgtttatygyg

SEQ ID NO: 6173 - DNA, 1666 bp, Artificial Sequence
  Description of Artificial Sequence: Synthetic polynucleotide
gygtattttttttygatygttagtagtataagtggygatatttttatggagyggtygygtygtagtttgtygtatttagygyggayggtttggtygygygttttttygttyggaygatygggygygtttgatattaatagttygyggtttaggtaygagygggygtygtatttgatttaatttaatttataatyggtygygtttgtaggtgtygttttttgaaatygttatttaggyggtygttgtttatttttygttgygtygygggttttgtagaagygtaagaatggggttgattatttyggtgtttatatgtygtttttataygtttttattttygttyggygtaagattttttttggttaaaagaggygtttaattagttttggggtygyggagagttagygtggtygataaagttyggttttttaggtaattygggttttttgyggattygggagggggygygyggggtyggagtatyggttttgggttgygygtttttttyggygatattgtygtttttttggttttyggttyggtttttygtaggttaaaggtttatttgtygggtttgggtggttygggttagygtygtttgyggttttygagtgyggttggttttaaggtyggygtttttttttyggtttttagtgtttagagttaggttagygggaaagaaggtagtatggttygtaaaagataggtggtagtggtagttttgtatgatatttgttttttttttttgttttttattttggggaaatattggaaatatttttttttttatgygtattygygttttagtatygagtgttttaagttttgygygtagygtygggtttggaaggyggygaatggttgtttagtygtygtttttattagtgatattyggtygttagttttygtttaggatgtgtatatttgttggtagtattggttygggtggtagttatygggttatttattttataggtataatygtatttaatttaatttggaattyggagggttgtgygygtygagttgggatygygttttagygagtygggtttttggttgygttagggtttaggtygagttatttygtygttygygtygtygygaggygggatatygtgtgatatttttgtygtgggttgggygtyggtygyggggyggagagygggtgttttatttygttttattatttgattttygttagygtttgaggayggygtatttaattygttttattygttgygttttgtgaattagyggygggtagggygggggaggtygggttgggggagggtagggtggttttaatttttygttttygtttygtyggtttygyggagtataagtgttgggatttttaygggtaggygtgttttgyggttggaggttygagygtttagggtttaggagaygtggyggatatagaggggtttgtaggtayggtgattttygtgtttttgttttgaaagggtttgaaaggagyggtttatggtgtattattagttaagggtttaggtattagygttttgtgtygggaattygggyggtygttygtgttgtaggtgtttgttatataaaygtttygggagggggagggtaggtygtyggattgggggtyggggaggggttttyggtttggtttgtttttgttattygygyggtttyg

SEQ ID NO: 6174 - DNA, 5030 bp, Artificial Sequence
  Description of Artificial Sequence: Synthetic polynucleotide
gygttaygtggagagttataygaattttaagygttttygttttttagtttttygygggaaaayggattagggtgttaatgggttttgattatttgtattagygttatttgygagtygagggttaagagtattttttyggttttggtggggtaygggttgttayggtgtttgtaaagttattgtttgaggggtygygttatgttttgtagggtttgtygtttgtgttttattttttygttattttgtygggygttgggatatggggagaggaggyggttttggtgagygaygygtttgttygttyggaygttttaygtttyggttaagttygggtttygtatttaaattgygtatttttgttttgygtttttgttttgygygygtttagagtgtttgggagaggtaggaagtgggagttatatagtttttggatggggagattatttygataggtttattttgaatagggggatattttgaatttaatattttaaggttagaggtttagaagaygaaggttaagtgatttgaagaatattgttattttagtygygtatttgggtagyggggttaattgttattttttttttattygttggygtygtattttygagtggttttggtttggtaggtttggtagggtatgyggttggttttygaaatttttttyggggattttttgtttgtttttagaggtttttygtygtttgtggttaggggaaaggtygtygattggatatagggaataaagtaaaggagtattgtygtttyggttttttttaagttattttttttgattttttaggaaaagggggaaattttttaaaggagttggtggtttgtggaggaaagttgtagaatttaaaaatatygtygggtygtttttygattaagggagggttaaaagtayggtaagttttgttttattatgtaaggtaaaaagattttaggaaaagtatatttaaagggggaggaggtagaggtagttaggagtttggagygtggtttggggygttgygtttttttaygggttygggaggtgtygygygyggtygttagygagtttagtygtttttygaggtttgygygtttgygtyggagttttttgggtttttgtttttttaaatattttgaaatgtaattttattygaaaygattggtagtaatattttgaygaaatygaatttttgttttattaagtagygaygtygtagaataagtagttgatgtaatygtttaggtggaggyggttaggayggtygttttttttyggyggggygttyggggagtygtyggatygggttaggtagagtttgttttttatttatyggtagtttgagtagttggtttattygtaagttatygttttttttagtatattttttatttygttaaatttaaattyggtttygtaggttyggggttttttttttygggttygtygygggtttagtygagtygygtttaygttygggattttttggygggaggygattttttygattttttgggttaggygagtygyggggttttggygaggggttygagtgatygaagagaagttygyggagtttgagtttggatttttygattgttyggtttygtttgtttttttgtatygagtttagtttttttttttygtttttagtygygtatyggtatttatagttyggagaggggtaaataatttttaatttygaggtttaggtagyggagggtygaggggtagtttttggygtttttagtttttattaagttttttggagttgtttygaygaattgattttttatgttttaagataggagttttttaatatgagaatgygygagttttggaggggtagatttgtatttttagggaatttygggttttttttygtttattygttygygttgttaygggatttygttatagtttattatttttattttttygggtygtaggygggtagggtttttaggggagtgygtatattyggtttttyggtgttttaggtygaggttgtttttgaggggygggtygtygggaatgtttatttyggggygggygtgaggattgtttaggatatygttgtagggtyggttatttygttttygtttygaggygttttygtttttaaatagtatygtatygttgagtttgttgaagaygatggtgtttatggtgtyggttggtagggaygygyggygyggtygtagagtttyggggttgggtygtygggagtttygtagyggggttyggtttttaggagaggaaggtgtatttygttatttattggttgagagtgtttagatttttgtaggtttagggttttgaatttggtygggtygtygggttgyggagtygaggggaggagyggygtygtygtaattggtagggattttgyggttttttttagttggttataygttttygtttttgtaggtttttyggataggtatttgtttttttttttgtttgggygatygatttttttaatttttttattttttagaattataatygggaattatttattygtagaggtaaaggaaaygaatttttaaaygagtttttgggttttagtttgaatttgggagaggtatatttyggattgyggagygygatyggygtgaggtygygygtggttttttaattatagtagaagattaaagtttttaggaattttaattyggggygttaggaggggttggatggaagggaagatttggggtaatgtgttaatygtatttataagattttttagtttatgagttttaggttatatygggatttgggggattttygtgttttttagatygtggatggtttggttgaaattttygtattttttgttygttaaggtttttyggggtgaggttgggtttaaggataggaaaaagttaagtggygttaggaygaaagtattatttttttttttttttttttagaatttttttattattttttaaygygtttygggaagtgtatggttttaaggtttaaggygttaggatttaggtttttagagtttttaattagtgttattttttttygtagygygggtgttagtygygagttygtagtttttygatattygtttttttttggggttttyggggatttttttagaggttgtaaaggtgttagaagtttaaggtaggaggtagtttggtyggygtatttttygggttattgttgttattgtyggggagagttagtagtttatttttggggtygyggaggttttgagtttttgtttgtygygtatyggygttaggagtaagttygygyggtygyggagtygtagagttatagttttaaggygygyggyggatttygttygttttattttttygtttygygtttygggatagttttygtttttttygagyggttttagtttygttgttagygttttttttgttygtttagtygyggtatgggttgttattttattaatataygygygygygtatatatatatatatatatatatatatatatatatattttttgtttygttaagygtttatattygttaaygttttygtttygtttttyggttatygtagtagaggttaygygtgatatttaggattaygygtgattatygygattaaaygayggttayggtttgtgttygtagggaagtgaagttagatttttgttggatgtygtgtgttttttaggattgygttttttygygtagataggtaygtgtttggggtgtgtatatagtttyggtgataagtgttaaagagaattttygtgtttgtagtttttgttttatagttaagattygygttggtgtttttttttaaaattatgtttttagggatgtgtgtttatgttgttttatttgtataagatattttttttyggttyggtttttttygagttattttagygygtttttttagatgygaygaygtgttttttttagygaagttattaygaggttagttatttyggatattttttyggtagttttaagtttaygtagagatygtagatatagatattyggygygttgtaggtttgtaggtagtaggtttagaggtaagygatggtaaaggttygagygttgttttgtygtaaggggttygggggygtgtgaattatatttgttgatttttttaggattttygygygyggttattygygtttttttttaaattatttatttygatttattttagattgtggtyggggaggttattttttgtagaagtgttttttttttttaaygtyggygaataattttaaagtaaaggaggygyggttaggtgggtttttaagtttygygtagatttttgggttagttttggtygttattygagygtttttttattagattttggagggaagttgggggaagggygggagagtatyggygtttagggygtaggggttagagygagtttggygtttygtygtagtyggttgagattyggygaygygggggttgtatttgtggttgyggggtygayggtyggttgtagggyggttggttttttygtttygagattaggygtatttttattttygtygtatgttttttaygygggttttagygygtttattatygttatygtygtygtttyggttttatttatttagttyggygygygtygttygggaataggaatagygaggtttttttatgttttttgattgtyggttttagtyggygaatattttgygggygyggtatttaygttttygggygggtggagaggaagygttygygttygttyggtygygggggttgttgttaatttttagtagaggagtygttgtyggggagtttygggttygtygagtttttyggagtygggygyggtttttagattygtyggttttgtagtygtggagtagayggggttttttttttygtattttaggagagaaattggagaagttgtygggagygttyggtttyggttttagaagttgagaggttgyggtgtaaatttygtgttttagttggttygattgtyggaaattttattgygygtggttaggygggagaggttattgtgaygyg

SEQ ID NO: 6175 - DNA, 2868 bp, Artificial Sequence
  Description of Artificial Sequence: Synthetic polynucleotide
ayggttttaygygaggaagagggyggggagygyggatygggtgtgggaggtygaggtgatagtaggtgagggtygggtgyggatggggaagtgagataagtatygtgtgggtattatttatttygttttattaaggaggttgttggtaagyggaatttttagttttttttttaatttagttgaagtttaattttattgaagttattttttatttyggttygtttggggggaaattaggygtttttggaagggaagggaagggagttygggttgygygggttaggtagttttttttyggtygtygygtgttttygtygtttttaaatttgtttttttttttattaagggaatttttyggggagtttagatygygatttttttttttggtttyggggtgyggggggyggataygygaggygtgggattgatggtagttttgtttttaggaagtaggtaggyggggatttttgggygttyggaggggtagtttygagggtatagggtatagggagaattagttagatttttttttgtttygggtagtygyggygggtgtggttagygyggaggtaggaygtygtygagtttttaattttatttttttaatttygatagttygtygtttttttgatygygtttttayggtttttyggtattygtttttttttttttattatatttgaggaaaatttttttttygttttttaatttaaatttagtagtgtttayggttgtygtaaatygttyggtttttagtaataaggtttyggtygtagagygagagtttttaggtgtaaggaaggtgatgtygtaaagtygggagtgtygtaaattaggtgyggtggggaggggggaggggtggaggyggaggggtgggggggaagggggagggagggggaggaggtgattygagtatttagatataagygagaggattatggyggatggttttaggtgtaagygtagaaagtaggygaattygyggygtaataayggtgagtggyggaggggatyggggagyggyggagttagggggagttgggtagtyggggygttttygggggtgaggggggygagtygggttgggggtagtyggggtagggayggtaaagtggagtgggaaagtagaaagtagtgttttttgttttttttygttgtygtygttgtyggagtygygtygyggtygttygttttttttgaatygttatgttttttatttggttttttttygtttagyggttttygtygtttttgtygtttttttggatygttagtyggygtygaygtygtygtattttyggygtagggygggyggtygggaygtattggttatttttttggtttygggtggagyggttgttgttttttttygtatttttttttatttttgtgtttttyggygtttttttttttttttttttttggtttttttagygygatttttttttagygtttaggttttygggagtygyggaataaatttgtgttyggygttgatygtgtaaagtggttttygygygtygyggtttyggtyggygtygtygttgtygttygggtttygygattygggtygggttgtgggygygyggtaggygggttgyggyggyggygggayggggyggtygygggttgygtggggtttgtgygygygtgtgygygggygtyggttgtgygygtygygggyggatagggttyggtyggyggyggtaaagttgggattygygggtygggygygttygygtaayggggattagaggygygggggygygggtttttaagygttttttttttttggygtttttygttgttyggtttagagtttyggtttggggatttygyggygagtttygygagtggggtttaygtttggyggggygyggyggggyggygyggggaataaggtaggaaaggtatttatttaaygtygtygggagtygygyggatgggggygagttgggyggygggtgtgtttgyggagttgttatttgggtttagagatygggaagtattatagatagatttttttttyggggtagaygaggtttttgygtygggatgggtyggtgtgygtgygtttygygtttttttttttyggtttttggggaagttgttatttgggtyggaygtayggagygttgaagtyggataatggggtttggatggygttttgggtttygggtggaaggagggtgggggagggggyggayggatygayggaygygyggggttgttatttgtatygtagttgtagtgtttattgatttgtgttgttgtgttaagggaaatatatatttttttgtttggygtgagagttaaaaaaaaagagagatagttygagggatygagatttgaatatgtggtggtggttgtatagtygttttttttagtttggagagaygttgtaagttgattgtatttttggttatttyggggygatgttatgttttttttttttttygtgtagtagygaaatgtttgttgattgttattgtttggatagtttttgtggygagaggggygagatttgttygttygggggyggygggagygtagggagagtagttttygtttgygtygtttyggtatttgtttgtataataatgggyggtaayggttttgtygtyggtygtagtttaggttatataaggaattataygtatatttyggatygaggggttygttttggtttttgygttatttttaaaaygatttttaagagaggggtaataaatgygtttataatgggatygttgtagygtygagaaaaygaggaaataygtgtttaggagaaaattttttygtgtttttttagttttatttttygygtttgggtttttttttttttttttttttgggatgygaaaygyg

SEQ ID NO: 6176 - DNA, 2678 bp, Artificial Sequence
  Description of Artificial Sequence: Synthetic polynucleotide
gyggttggaygygygtttaggttygygtygttgyggatygyggagttgtgtagaagygyggtttggygggtggtataagttygatagttgygtygygtagttygttygygtttggttaagagtttygygagggtgtggggagaggatyggtttygtagggagyggaggttgygyggttgtatyggattttatagttttaagtygyggtatgaggygaattttgtaaagygygttttygttatgtatygttygatttttagtattgtgygtagtaggatttyggagtttattygtttgtggaaatygagttygtagygggaaggtagtgggtggagggtgggtaggtaggggtttggggttygyggttttttattttygygttttttygygttagtttygaaygtttttttggggygtttttgtttagttgtttyggttgatttygttttgtagttagtttgaggttaggyggtygttttttgtaggttataaattttyggygtaaaagtagggttttgaaygygatatygtattagagygtttagttaagygagttgtttttatttttattgtgtygggyggygtaaattgygggygtaggtagaggagtygyggttttgygtygggygggagtygaagtttagagtttygttagggttttttygtygagygtatttatygtygttgaggtagagygyggttagtaygaggattagtaygattaygattttggygtttatggtgygggygggygggygggygggyggaygagygygggtygggggtyggaygtygagygggtaatgyggttgayggagagtgaaagtgyggyggtgggaggygygygtygggygttttagaggggagagttaggyggggyggggyggggygygyggtgaggggygggttyggagtygagtgttggtygtggtyggggtttttgaygygygattttttyggyggtattttttatttatttttttygtttttttttygttttttttgtgttttygaggygtagtgygtttyggtttttgatttttttaggtttygttgggtttygtatygttggttyggtttgtagtgaggttygtagtttgagygaygtyggttggagggtygtttattgtttttgtgatagggttttattggagagattgaggattttaggygtaaagtggggygygygtggaaagttgygggayggggtttttygatggygggaattgaatgagaattaatgaaaagtaaataagttagtttygggyggagggtttgttggyggtggyggtttaaggtagtygagggggttttgttttttgtgygtgggggtttaagttygttatttgttyggtttgyggygtagtygtyggtagagttygatttgygggaatgagattygtttttgtagttagygtggttyggattttaagtttayggygttattagtygagttttagttttttygtttgtataaataaagtagaaggygtyggyggtttttagtaaaagygaatgtagtttttgtattttygattttttaatggtgaaatgagttaattataggtttatttygyggagtgggaygggagatttaatgagattygttttaygtygygaaattttttgtatygtgtttgataagtagatagtatttaataaatggtagttgtaagtaagttttttaaatttaagtatttattgttttatttaagaaaagtttygtgygatttaaagagttgagaatttttttatttygattttygatttttaggatagtattattggygtttgttttttgggtttagaaaattttttttayggagtygtttttyggyggtgtttagtttttyggatattttygagatattttagatggttttagttyggtggygaagggagggtgtaggtyggtatttaggagaygtgggggtgaggagagygtttttttgggtttygttttgtgatygtaggttgttttagttatttttttgtgttttttttagtatagygtttagygaagtggggttagtygtygygtttatttaggggtttgttttggggataygtttttgtttttggggagttttggtygtyggggagtgggyggttagyggttgtattaggygggagyggttaataggaggttgygagggtttyggaatttygttggtgggagtaggtgttttttgtgtattttttttttaaaattattttggtygttagatggttgtgggtyggtattttatttatttatttatttatttatttatttatttatttatttatttatttattttgggtattgggtttggagtygggaattttattgatttggttttgtttttaaagaattgaaggtagtgaggtttagtgaagaaggtagtygtygggygtttttaggtttttgttgggttgggtyggggagtttggtygtttatyggtygtagygttggggtttyggygttttttggtggyggygttttttttttygtttttagagttttggttagttttatttttgygtagttgatgaaattygggagggygaaggggttygygggaaatttatattygggtggaggggygttttggagttyggagattygattttgygggagtygygygtagtttygtttgtttttaaatttggttaaagtaaaygttatygtttttyg

SEQ ID NO: 6177 - DNA, 2756 bp, Artificial Sequence
  Description of Artificial Sequence: Synthetic polynucleotide
gygggagggyggtagyggttaggttaatattygygatttygattggggygyggtaatttttgtttttagtttttataagttttyggtygygattygyggtygagaaattttgyggaggggtyggtgggttagagttaggttaggtagttgttgagtttttttttttttttttggygggagtgtgtgtgtaaggggttagggggyggagtyggagaaagggttgggggtgttygtgtttagygttttttyggaygyggttttataatttagttgygagaatagatggaygtagyggyggtttatttygggggttttttgttygttgtgygtygaggtttaggttgaagyggagatygtaagtttttggttttygttttttttaaggggtttygaggaatyggttgtygygtttttttttttaagaggagaagagygggygttgatttygygagttttagaatygygggyggggggtaggtagggggyggggggtagagggttagttatyggygyggaaygtttattttaggggttggtttaagatttttatatygagagttttttttgggtttttagttttggagtatttggagagyggatttttgttyggttaygtttygttttyggttttygtttygtygaygtygtattagtatgagygaygtaagtggttygggtattattygggggttgggattygtygygttatagtttygagtggaagggaaaaaaaaagaggaggyggyggaggaggtaagagtygaygygaggggaggggagygtagyggyggggttaaygggygggtaagygggygggyggtaatagtatgtttttyggttagygygggyggttttttagygyggygggggttgttttgggygygtttygggygaagtgygtttagttttyggtttyggtttttyggygygttygatttttyggtygtttttgagtttagtagtygygggtttygggatyggttaagagtagttgtaaygtttygtyggayggagtttttttttttttygggaygttgggttatgagtttygyggttatttgaggtataggggagtttgttyggttaggatagttttttygaagtttygtgttttygtttttgtattgygggaygttagygttyggttttggyggaggygttttyggaagagtatyggggtgggggtatggaattygyggaatttgygggttaggttygggyggyggttattaagttgtyggaggttgtgggygyggygttgtaggagtttyggyggtagaggygtttggtgtttgttatygtgtgygtggygttgttattggataatatgttgtatatggttatygtgtttatagtgttygattatatygtttatatgygygggggyggygagggttttattyggattttygaggtgtgggagtttattttgtygttgtttatttyggttaatgttagygtttatayggttaatatttyggygttttygatagttgygtggttagygggtttagtttttyggtttygttattttayggagagygaagaygtgaagatyggggtgttgtttgtttttaaggttattttgtagttgttagtgaattttttgagygggttttttatygatygtatgagttaygaygtgtygttgttgatyggtttgggygttatgttygtttttatagttttgttygttttygtygaggattaygttaygttgttygyggygygtagtttgtagggtttgggtttagttttygtygataygtttggtatagttatgatygtygataagtattyggaggagtyggagygtagtygtgtattgggygtggygttggtttttattagtttyggaagtttagtggtttygtttttygggggtattttttatgagttygtyggtaagygygtgttttttttggtgttagttgtygtgtygttttttgaygygttgttgttgttggtagtggttaaatttttttyggyggttgtaygggttygggttaatttgttagtgggtatttttatttatygttttatgttagatttttatattgtygtggtggtyggygygtttattatttgtaatatttttttygtttttttygaatttattattgttaygtggatgaagtataygatggyggttttygagtgggagatgggtatggtttggttgtyggttttygtgttttatgtgttgggygtttattttatygtgygtttggyggygygttatttatatttgtagtggttgtayggygygtttgggttggttgtgatyggygttagttygtgtatygtgttygtttgtygttttttygygtygttagtggttttattatgyggtttttgttttggtatagttttagtygatatagtattgttgtttaygttygtttttttggtggaygtgygttatgttttagtttatggtagygtttaygttatygtygatattttttattyggtggtttaygygttygggtttatagtggtaggttatattgtgtattygttgggttttgagtagtttagttttggtatgggattggttaatttgttttatgttttygttttgttgttgtttygtaaygtgggttttttgaygygttttygtttygagygygatgtgttgtttgatgagttatygtaaggtttgtaygatgyggtgygtttgygtgagygttttgtgtttggttaggayggygagtttygtagttygtttggtttttttgatgygtgygaggayg

SEQ ID NO: 6178 - DNA, 990 bp, Artificial Sequence; identical to SEQ ID NO: 5948
  Description of Artificial Sequence: Synthetic polynucleotide

SEQ ID NO: 6179 - DNA, 829 bp, Artificial Sequence
  Description of Artificial Sequence: Synthetic polynucleotide
gyggtgygaygaggttaggttygygttygttaagttttagggtygttgtygtygayggttatggaggaygagtagttygatagtttggagggttgggygtygtttygggagggttttttygtygatttttagaggtatyggttgygttttttggtggtttggaayggygyggagggtaagtttgttgtgatttgttaygatygtatygygtagtagtygtagyggygygagggggttyggttggggttggagtataagttygaggtygtygtgttttygtttagttgggtyggtyggttttyggtygyggggtttygyggygygygtyggtagttagyggygttgtggtygtttttggaatattgttttttayggttgtygtyggagttggaygtgggyggyggyggggtttgaggtttggggttygggyggtgggygttgttttggtyggygygygtgggtttyggygaggyggygttgtaggagttttgygggtagttggagygttatttgggygyggyggtttayggttgtggyggygttatygtgygygaygtttttttygyggttaagggtygygyggtygattgygagagttygygygagtttygggagygggttttgygygtttgatgggtygaggyggaygygyggttgygttaggtaagygaggtygggtygtyggygtttgatygygtttgggtggtttgggattttgtgggaggttttttyggygtygagagttttggttgayggttgatggggaggagtyggygggyggagaaggttaygggttttttagtatttttatttgygygggatygttgyg

SEQ ID NO: 6180 - DNA, 4119 bp, Artificial Sequence
  Description of Artificial Sequence: Synthetic polynucleotide
tygtgatggtgttaaatygagaggagagttygagaagggggtgggtgatttttyggttgttttttattttyggygttttgtgtttttttttttttttttttttygttgygttttagtygagggttgttggagygaatgggggatgtagaggaaggagttygtaggttttygtgtttttttaatttttttygtttttttygatagtygygygttttygttttagtttaaggttagtggttyggtttygaggaaggygygggggtygygagagaygattttttatagtatygttaaggaaatyggygtygtyggtgttttygygggtttttttyggtagttygggggttgtttttygtygttgygygtttttttttattatttattygttgttttygtyggtyggagttttygttttattaatttttttaatttygygggyggygggtaggtgggggygygtttttaggtygtaagaagggagygtttygagattttttyggggtyggttttgtttaggagggagttatygaygtttttttttggygttttttygtygttyggttttttaggygygtagtttttttygagagtttygaattttatygttattttgtttttgtttygggagaggggaggtygaagtgttgtyggttagagggtttaygtaagtttygaaattyggggggaygttttttttatttttatttttgygttygttyggggttgggygygtyggggygtaygtaygtyggtttgttggygatttggygtatttgttygygygttttggttttagttgtygtaggttttttttgtatttatttttagtttttaaagttagtgtagttagtatygtttatttggagttttaatttttttttgygattttygtatatttattgtattttatttattattttygggtygygtaggttygggtttgygaagataygyggtttattttyggttatttygtttatttggttaaaggggttttttagttyggtattgggaaagatggttatygaygtggyggygaggttttttatygggtagatgttgttagatagttggtgtataaaattattgagagttattgggattttgtttayggttttggyggttattatttgtttttygtataatttggagatttaattttttygttatttggagtgttagaaaagtygttttggagaggggttggattgagtttgggatggtatttttttttgttttttatatttaaaaataattattatatatattaagaaaaaaaaattaatagaaataaaagtagtaaataagttgttgttttttaagaaataagaaaaatgtttatttgttattgatttttttttgtttgtgtttyggttgttgggaagttaggagttgttggtgtagtgttattataatagttagtgagttttttygtygagttattaattaattgtttttygtttagttagayggaaagtgttgttttaagtatttatgggtaggtttttaatattygtgaygtygttgtttatatatggattgaggaatagggttgggttaggyggtttttgtygttatatggttgatttgtatataygggttyggtygygyggatttygtygggttygygatttttagttygtaggyggyggggatygttggggtttygggygygyggttttagttgtagtttgggttyggggygtagggatygygggggagagggygygttatggatttagttatagttatagtaggagagygagttgttttaggttgyggtttagtttttyggggyggggaggaatttyggttttttgggattttttaaaaaaggygaagattyggtgtyggyggtttygtttttttagtttttgtttgggagttatttyggaaaattaaatttyggaaagaaatygagyggagtygagatattatagttaaatttttatttatttttttggtagtttaaaatygtaagtaaaaggaggtagygaagaaaaaaaaagttatatgtatttayggaagttgattgtttttttttgaattatttggtggaaagaagtggttggtgataagagtgaatgygtattgtttttttggaaagtttgttttatttatataggagygaaaayggaataggtttgggttgtttgtttgtttaagtattttgggtattttgggattgggagggtaaattttaggaggagtagaattattgtggggagtttygagagaaatttttagtyggagatatttttttttttttgttygygygtttttygtttttttttagttgttgygyggagygggygtttttttyggygygtttgggyggtyggttgygtgggggygtttagatggaagtttggatatttattttgtttttttagatatatatatatatatatttatattygttttattttygttatatattttygttttygttgttttttttatatattygtttatatattttatattatatatttttttgttgattgygttygygygtygtygttgttagtagtgtttyggyggtagagygggtttygggttygttggataggaggttttatgaagatattggtttaatttttattatyggtttttgtagttatagaatttttttgatttttatagtttaggatttaggatygygttttgttygtattygagttagaatataygtattagaataaatattttttttttttttttaaaaaatatttyggtgagtttagygyggtttttagtgayggtygaaagtatttttaattatttttaagaygttatttttattttttaatttattygttttattttgygagatttyggtagaaatttttttgtttygtttttaaagtaatttttaaaaatttttttaaagtttaaatagtagtaggttttggtttgttgggygtaaagtttttattttttagtgygttttagttygtaatggatagtygggtttgttyggggttttataggaggttggtttygggtgtttaagtttagygtatygtygtttgtatgatttatttatggtygtttgtgtaggttgygaattgttttagagttttttttygttttaaagtygyggaggttagggataaygygtagggttagtttygtaggtttgttttgttttttttttatttygggttyggagyggttttagtttagtgtgggtyggggygggygggagttayggygttaygtygtggaggaagygyggygttgtaggygggtttttagtygtttatttgtttygatygttgtagtygtgygttagttttygtygggtttagygtatygyggttagggttttgaggttgtygggagyggtttttttttttgtttttttattgaagygttgtttttttttttttttttaaaatagtyggtatttagyggtyggttatttttttgatttaagttatttagagtatatttgggaaagtttttygttygygttgtgygtttttttttaattggggatgaaaaggatatggaaagaaatygtagtaaggttagtattttagtagatattttattttagtaaaaatgtgtaaagttttattttttaagaaagaaagaaagaaaagaaaagtaagaaaagatagttgygtttttattaygtgygttagtttatttygtttgygttttggygggtttygyggttttygygttgattatgggtaagaygaygtttyggaagggagttygattygtatttygggttttgagttygaaagaaygggggaaagtygaattatgtaaatgyggatttttgygatggggttygggttayggttttygtyggttttttaggtgaggtatttatyggtagtaagygygggygaggygattgttygygtttygtttttttttgygtaygtgggyggatyggtaggygggygagttgttygggtygtttygygattggygttgttgttaaattygtyggyggtygtygygygttatttygagggggagtttttggaygttygagtgttyggttagtagggygyggagggtaggatyggggttgggggyggggyggggtgtttgagygagggaaaatygygaggttttyggttgttatttttttyg

SEQ ID NO: 6181 - DNA, 1575 bp, Artificial Sequence
  Description of Artificial Sequence: Synthetic polynucleotide
aygygtttatggaaggtggtgttygttttatygttttygtggaaggttaaaygagttttyggtgtgaattyggagaaagagagggaagtgtagygttagttttattttatattttttttttgtttataaataattttaagtgttattttaaagaggayggggagygyggtagaggggttttygggtyggygggttggggtygtyggatttgtttattaygttttttattttgggygagtttgtataaataaataaatttaagtygtyggtttygygggaggtggaggaggagtgaygaggaggaggaggaggagggaggggggagggagagattagtttgggaagtagtayggattgtttattygattygtgtygtygtagggagtgtgttaagttatagaggygtyggaatyggtttttgygtttttygttagtygttaygatttatttttgtttatggggtttttygtgtgygttttttygttyggggattgaaattgattggttygggagataygaggygtttagaaggattgatagygyggtattaattgttttgtagatatttgaagggaaagattgggyggagagaaggagagtyggttagatttttttaatttttttggatttggaaygtttttygaaataattttttttttatttaggtgtattttaattatygttggttgtgttttttyggtatttttttttttattgttaattttttygttttttttgtygggagtagyggaaagggaygttttttagygatataagttttttttttttgtttygtagtttggatagagttttttggtagyggttgtygtttttatttattttatttatttatttattggtttttaagaygygagaggatggtagyggagygtatttataaagyggtagttatyggtgttygyggttttggggagttgggygygttygggayggtggttttggtggyggygygggyggagygyggygtayggttgtygagtttagggtygtgygggttgttgaygttggttttttgttygttggtatttagtttgttygtttattttyggayggtygagttgtaggttygggtgttgygtttggaagyggagygyggggagtagtaaatggagayggttattttgggaygagttaattaattgttggaygaggtttgtgttttttgttgttggtttttattttttttygyggygttttttygygtagtttttagattgtttagtyggtgttygygggygttygttttttgygagttttaggttygygygagttgtttgygggaggggtyggggatayggatagaygttgttttattagggattyggaggatttggtgggtaagagtatgatttagygattttygtttygggtaagygttttyggtttttagygttgggagygttttgggtaygtygggtaggtggaggaaggttgggygygyggaggttygyggaggygggtaagttttatttttttttttygggattyggttagggtggtgtgatagtygtttygygttygygtagyggtaagygygtttagaggtttaggtyg

SEQ ID NO: 6182 - DNA, 2401 bp, Artificial Sequence; identical to SEQ ID NO: 5958
  Description of Artificial Sequence: Synthetic polynucleotide

SEQ ID NO: 6183 - DNA, 1579 bp, Artificial Sequence
  Description of Artificial Sequence: Synthetic polynucleotide
tygaagtyggggagygggagygtaygtgygygtgtttattttgttttgggtttttygttyggggaatttygggggtgttagggtatttagggttagggaagtaagatgtygggtygtttattttttttatttygtagttygtttygaaaattttttaaatygagatttaatttggatgtttagtttygtttttttttttttttttttttttttttttyggtygaggttttttttagtttagtttttttttttatttttttttygtygtggatttttattagtatgtttatttgggaggattygttggggggygggagatattygaagttatttatygttagygttttttyggyggttttttygggygatagygtttygggagttttattygtataagtgttgtttttaattaattgtttgggygggggaaggaaaggggtttygtygtygttttygttyggaggttggagtgttgttygtygggtygtgygttygttyggtagyggygtgtattagtattatttttgygtgtaagtttgaaatgtgagttgttttygatttatattygttygygttttttygtagygaagtggttgggttgayggtttgygygygygagtgagtgygggyggygggttggggggyggggtgyggayggygaggttygyggggyggggagggygygygygagtyggggttttttggagaygttaaggtaggtttgttygttttttatttttttttygygtttttttttttttttttttttttttttttgtygyggttggtttggtttttttyggagtttttagttttaygygggtataygtagggtgggtggttaygttygtagggttygygagygyggygtagagygygggtygtgggaagttttttyggygygtttygtgygttttygtttttygygygttttyggtttattttygtttttggagagttgtygtttgygttygggygygyggttggttgttttttyggyggyggyggyggyggttttattagyggagttttygtttatgattggtttygttygggaagttggagaygggygatgaataattgatgtgtgyggtgyggtagtyggayggyggyggyggtggygggtagtagygagygggagygygggagtyggagygttttyggagygggtagygyggagygagygggygtyggattygttygggttttygygtygtygtygtygtyggggygyggagyggggatgtaggyggygttygttgtttgygygtagtttttgttyggygttggttgaattttattyggagtygttygtygyggtygtygtyggtygggttttaagttttygagggygttagggygggatygygatyggtgtaatttttaggtaagtgyggggtyggaggggtyggygtttgggygtttaygggtygggttttgggtttttttygggygygggggtgagtgtgygtgtttgtgtgtgatagaggagggtyggtgtattgtgggtagygtygtgtgttgtatggtgttagttttaggtttggtygygagagtggtatyggygtgtatygggtyg

SEQ ID NO: 6184 - DNA, 919 bp, Artificial Sequence
  Description of Artificial Sequence: Synthetic polynucleotide
tyggggygtttagtgtggtttttttattygggagtttggaagggtttttygtagttygtaggagaygtagygtttttygtttagggggagtaggaggatagttggtygttttygggagttttaggygygaagyggttttttttygttttaggtgagttttgttygaygtttaaggtttaayggttagaatygtttttgttygtyggatttagygaagttaggggaataaattttaaaaatagttygggttttttyggtgygtttatttttatataygygtttgttygttatttaggagyggygtttygttgttaggtaaygagagttygygttttaggagttagtgtaggygtygtaaagyggaaggggygygyggataggtgagtagagggtaygyggtgggtagygaagggggaaygygtagtagagaggagagggygtgtaggagtaggagtaggyggtagagtagagggggygyggtagagtagagggggygyggtagagtggagggggygtgtaggagtaggagttygtygtagagtagagggggygyggtagagaggagggggygtgtaggygyggggygttyggtagagagaaggggtygtgyggaagggggygygygttaggggagggggttagagaggagggggygtttaggagtygggtttgyggtagagatgaggyggtgtgtaggagggagagygygtaygagggggtaaygggtagagaggagagggaatgaaagaaggggagygtggtagagagaagygggygygttttagggggyggggtttagggaggagggggagygtaggatyggggygggaggtagagaggagygggtaygygggaygggygtgtgttygtgaggggtygaggaaaggygtatgtggaggygygyggggtgggtgagtyg

SEQ ID NO: 6185 - DNA, 944 bp, Artificial Sequence
  Description of Artificial Sequence: Synthetic polynucleotide
tygtyggagygygyggggayggyggyggyggygttatttggaggygyggtggygggtaggtgttygaattgtayggygatgtagaggtygttgtttagggggaatttgtggtagtgtagtattttaggttaggggaagtygtaggtttttatgagyggygygtagtyggygygtayggtttygtatagygagyggtaygggtagatgggtyggtygagatagaygggygtaaagagygagtataggaagatttgygtattygagtggtagygtttggttagtagyggtagttagttgttygtttgttgttttatttyggttaggttttygtgttttagtaggttgggtagtygtatgygtttgtagtttatygtgtggtagagyggtaggtyggtagggatgttaaggtattgyggyggtttggagtaggagyggtygtgtagyggttyggtttgttagttatagtagtygtatttttygtagygygtyggygtttagtgtagygtttttagtagtagygttagygyggtygttygtaygttttttttygtygtygtygttygtatggttgygttttttttaggtgygygtygygtagtttttygaygttyggtgttyggyggtttaggtgtttyggygtgygttttyggttttgattttatttagtygtygtygtygtygtygtggaggtygtttaggtgggtggtagtttgygttgygggygtttygattgattttggygttttttatttyggggttttagttygggtttygtygtgygttttagttaattttyggtygtttggttttagttttaaggyggggaggtagtgggggyggtttttagtttttttygtattttgttygagygtttygtttagygttaggttttgygtttttttttyggttyggtttttttgtygtagttttggtttygtttagyg

SEQ ID NO: 6186 - DNA, 1096 bp, Artificial Sequence
  Description of Artificial Sequence: Synthetic polynucleotide
tyggttaygygttgggttyggggaagaggygyggtygyggtygaggyggggatagggaggyggtagttttttttgygtagygayggygygggygggyggaggtyggggygttttagtttttygttttygtttttttyggtygtgaygttagagtyggayggggtaaattgagyggyggyggyggggygttggggyggagattgygattyggagtygttyggattgayggagtttattgyggtgygggygttggygygggtayggaggattygggtaggtatygtaagygatttygaggtaatayggtttyggttttttgttygtagggygyggtgtyggaggggagygggttygggggaggtagggaggtagggaggtttttagagttaygygggyggggttgyggggatttyggggtagtyggggygtagggygtagggygtaaggtgtayggggtygagygtgtagtttgggaggtggtatagttgggggyggyggggattagggtagygttttgggggttttaggttgggtttttagattgggttttygayggygttygygggygttttttttagggagygygggttttygtggggaygygttygaggtaggtgagtygaggttggggygttygggggtgttttyggatgtyggtgygygyggttttttgattygttttttygyggtttgggggaygggagaatggggggtttayggtygttttgggtttttatygygtatygygttygtagyggagtttyggagttatggttttgagygagttggygttggttygttggttgtaggagagtygtygttygyggaagtttattttgtttatygtgtttttggygttgttgttggataatatgttgtttattgtygtgggtaygtgyggatagggtatttttgtttyggtattttagttttagygtttttttttyggtattttatttatttttgygyggtttyggagtttygttaaggttygggaaagttggagaattygttttgtaaaaaagatattttttttaggttgtygygtyggggttaggaggagtygygttgtgtggtttygtttttttgatgttyg

SEQ ID NO: 6187 - DNA, 4048 bp, Artificial Sequence
  Description of Artificial Sequence: Synthetic polynucleotide
aygttagagatygtggggygagagagggagagagttggaagtttattgtttyggyggggtyggtagttttyggttttaattygtaaaygaaygagtygggttaagaatygygaaygtatygattttgggatttygaggttaagygtggttgatggggtgggaggatttygtattttttattttaggattttttttggtttaggaaatygttgggagttttgttaagtgtggggattggtataatygaayggygtttttagttygggaattagtttttgttygtttattttygyggtgtttttggggygattttagttttttygaygyggggtygygtaaggtagtagyggyggagygttaggttagaggaatttgtttgtttttttgttttattagtttgggygaggtaggttygggatttagggggtygtagyggaggyggygtyggttagggattttgtagggatyggggtgtttyggagggagtggtgttggtggaggaggaggyggtggttgagggggagtaggtggggaaagaggaggaggaagaagaggaggaggaggaagaagaggaggaggaggagaagaagaaattggaggaagaggaggaggygaaggaggaggagaagtygtagygggygtygtaggagygagtgagttgggagygaggggygaaggygyggagaagttyggtygttyggtgggyggtagaaggtttagtygaggyggyggygtygatttygttttattttyggttyggatttaggttttygggtttttaggygtttatttttttttgaygtattttaaagagtttttttttttttattttagggygagtaatagygattaattattaagttatttattaggtttyggaggaagttgtttatgtgattttygtattaattaggtttatgaattaataaatygtttgtataatttgtgaagaagygaatatttttatggattgtttttggatttagggygttttgttygttttttgtagaggagaaaaaatttttttttttttttgtttttttygagaatttttttttttttttttttttgtttttaatttygatttttttaygttatttygttaaaaaaaaaaaaaaaaaaaaaaaagaaaaaaaaagaaaaaaaaagaaaaaaaattattttaatttaygtttgtaaatttttttggaaggatttttttttttttttttaggttgggygygtttggtgtaagattttygggattttyggttttgtttttttttttttttttttttttttttttttttttttttttttttttttttttttttttttttttttttttatttttatttttattttaaataaaygagtttttaattttygttygttttygtygygggtagygggyggyggaggtagygtgyggyggtygttaggagttgggagtttagggygttygtttttyggygtagtatgttttagtyggygtttaagygttgttttattatygagtygttggtggttaaggatagttttttgttygtttygygtttygaggattttattygtttygyggtatttagttaygttaattttagttttataaattygttttttaayggtttttattyggtygtygtygtygtygtyggtaggggygtttattttaattyggatttggtgttygtygaggyggtttygtattygtttaatttygtygtgttagtgtattyggtgtygtygtygtaygttttggtygtttattttttatttttttygtattygttatattttttattygtttygtagtagygggattygtttattttttatttttggtttatttatygttatygatatttgggttatygtttttaaggtaygtgttaygtygyggaattgtagygygtygttttygtygtattttttattgttttyggtttgtttygggtgggygtttggtaaggtttgggyggaggttttttyggttygygggttagygygttttgttgggaaattaggyggygyggggtygggygtggtgtygatttttagttttygaagttaygattggtttggagtgatggtttgygggtygtttgattttttgggaaggggtgygaayggagaagttgttttttagtgygttygaattagagtaggttgggttgtgygtgttyggygtygyggagtttagagttygygggatttttaggtttttggtattttyggtaatgtttttaatygttttggtttygaggggygyggataggattyggtygttaggtttgttttygattgygttygattttgtttattatttattttgygtttttttagtttagattygyggttttttagttttttatttttttttggaggygagaggattttygygtttygggagaaaagtatgggatttgtttttttttttttgtttttyggaggtttggggaggggygggaattygtgygggaggaaagttttagggtttggygttttygtygygatttgtttaattggggygtygagtagttatagygggaaggtaggttyggtttggtttttgtttttttttttttttttaaaaaaaaaaaaaaagaatttggttaggaaattgttttagagggaaatatttgttygtgtgtttttattttttgygatattttttatttgtttgtttttttttgggtayggggtgggaggaggagagttaaaattttagaaaaaggagtaattagtttayggattggagttagtaaaagatttattttyggyggtagtygattaatatttygyggtttgtttatttattaatttattgygtttttgtyggagtttagaatygggtagatgttatttttttttttatattttaaaaaattaaattaaaggaaaaaaaatttaaaaagttttttatttttaatttygaattggatttgtttgtattttgtttggattgtyggtttgtttttttttgtttgggttttyggtgaatygattttttatgttaatgagtgaatttaaaattttgaggttttgtttgaaaagtttagggttgtttttttttattygttattagttatgtttatggtttttttattagattyggagtygttgggatttttttgygttatagattgttttggyggtgtttgtaagtyggtaatttttygggtttygattttttygttygygttttttttttagttttygggagtygggagtttyggagtttagttygygagaggtagtagyggttgtagttaagtatattygtyggttagatttttgtttygatygggttttaaygattygtttygtttttatattttttyggaggggtaataaaataaataatttaaaaataaatttttatgaaaattttggagagtagttygtygtttttttatygtgggttaaagtttttygagaggttagaaagaagagaaagtagttttttygggttgtgggygttaattttttggttaggttttgyggtttttttttttgtttttagygttyggygaggaggtggygaggttygyggygttagggyggttgyggagtyggtygaggttaggagtttggggattggtttttttgygatagyggttggttgggtgtygtatyggtggagattyggygtttygggtygggtagttgagtaggygtttttttygtgagtttttgggaggattatyggttttygtaggtygagyggygyggttatgygaaggttttgagtayggtgtygggttagttyggttygggagaagtgygyggtttyggttagagtagttttttttaatgggatttttgttgtgtttttygtagggaaygatattagtttygagagtttttttttgtataaygygttggttygaaagtttaagyggattygaatygtttttttttygttttagtttttaaggttggaataygtttttgagaagaattattaygtggtgggygtygaaaggaagtagttggtatatagttttagttttayggaaatttaggtgattgyggttygggygygaggaatttatttaggygtgyg

SEQ ID NO: 6188 - DNA, 3292 bp, Artificial Sequence
  Description of Artificial Sequence: Synthetic polynucleotide
tygttgtygtygagaygygtagyggatgtygttgtttgtygyggyggaggaagttaygtygttgygttttyggtttattttgtttttattaaagygttagttagatagttttaaaygttagttggtyggagagattttttgggagaaagtgttgtygtyggggttatagattyggagttgattygygagttttgggtatyggyggttagagtagaggggtgttttttygagagtagtygtyggtgtygagaagttgttgttttagtagttttatygagtgaygygygggttttggtygggttagygygtataygtatataggtatatttatttttggtttygggggaaggtttatttttyggttttttagggttaaaggttaaggttaygyggatttttgagttygaagaygtagtgygaggatttatatttggatttttttattatyggttggatggtgggtggggaatttaaatttttttttttttggtttygttttttttagtaggttttaggaaaaatatygaggtygtyggattttaaagggtaggaaaatgatgagtttttygagggtygaggttaygttttgttttttgggtyggygttgygtggttttttagttgygtgggggyggygggtttttgtttagttttagggggygggggagyggtagttgygagygtagataatttygaggtgattygggagggtttggttygttttttttttttttygtaggtttggyggygggaagygggtttttgygtygtaggggggagaggtaggygyggttttygggttygyggtygttagtgygtttyggttaagggygtygtttgtttygygtttttygttygttttttgygttygtaggagygtttygagtgtttttttagygggagttaatatttttttgtgttaataggtttgtttttatttgttgtttaattggattatataaagttaataaygggygggtttttatagttygaagttaaagygttaaaattygagggaaggygaggagggggyggtggyggaggyggttgyggggtyggggttyggttgagttttygtttgtttaattttatttgttattgtaygygtttaatygtygtatatttttygtatttaatttggatgatattttgattttattattagtattyggygtyggattgaygtagtttygagtyggggattgtttttgttgtttttttygygggagtygtagtygtagtygagtygtttygatttttyggtgtygyggtagggtygtttttygttttttygtattttttttttatgygagttygttygtttgggtttttatttygttttttygtygttggatttgygttyggggyggttttygattttgygtttygtagttgagtttygtttatggtttgattttyggtttttygtttgttygtttygtygttygtttgtttygttttttttttttyggggattyggaggagaggggattatgtyggaattygggtyggaygttgtyggtatygttagygtatagttttaatygtygtygttttttttattygtttttaaggagttttygttttttattaagaatttgtttaayggagattattatyggtygttttttaagttttagtygtttttayggaygtttttygygttagtttyggttgtygtygtygtygtygttgtygttgtygtggyggttaagggggttttggagggygtygygggtttygygttttygtaggtgggygatttggttttttttygttttgagatttyggygtagaggtttgttttgttygygtattatttggagygttttttagtttggtggtatttttatattttgattttygtyggyggttatttttygygatttgaaggtatygatttttttttgaattttygttgtttttttgygygttygtttygttttygtttygygttgttttttttygtagttttgggattttagtattygtaaattttttgttyggttagtttttttyggtttttagtttgttttygygttgggttgygttgttygttaatttaattttatttggtgagaaaagaagtggaattggagtttygggtayggtgtttttygggaaaagtggtttygggygtgaatagggaggtttyggayggtyggggtttgggatayggtttggaaggagggggtgattttaatgygtttaagtygaaagggaatygttttgtyggtttttggygaggaagttgagggaatggaaggaggtggtygygttattattatttgtttgtttgttttygggaggagggggattttaggattyggygttttttttttggtttagtygagaaggaggtagttygygggaatggtgaggttttatggtttgggatttggaggtyggygygggttgagtttgtygtttttaggygtygggtttygtttaaggttgtgtyggtgtgtatgtgtgtgygttygtttgtttgtttttttagtttyggagaaggttttgttgagagatttttttttygttttyggtatagatygygatttttyggagttattgtttaaggtygatttygattataaggagttggattttaagagttyggaygagattattttggaggagagygatttygaggaaagtaaaaaggaaggygaagyggygttaggygyggtyggggygagygtaggggyggyggyggttatttygggygtagaagattggaagaagggygttgaaagtttagagaagaagtyggygtgtygtaagaagaagaygygtatagttttttygygtagttaggttttttagttygagtttattttygatatgaagygttatttgagtagttyggagygagtyggtttggtygygtttttgtattttatygagaygtaggttaagatttggttttagaatygtygtaataagtggaagyggtagttggyggyggagttggaggyggttaatttgagttatgtygyggygtagygtatygtgygggtgtttattttttattaygagaattyggyggtygagggygyggyggttgtagtygygggggtttyggtgttagttagttagtygttgtttattttttygtatttygtttattattygtattyggtggtttttttygtgtygttgttayggtyggtttgaggttttagaggggtgggggagggagygttyggtttttttgttyggatttyggaggagattgggtygggtygagggygtygagaagtttagyggtttttaggaattggggtttgggygyg

SEQ ID NO: 6189 - DNA, 3753 bp, Artificial Sequence
  Description of Artificial Sequence: Synthetic polynucleotide
gygyggagattygtygtttgyggaggygtygagttattttagtttygagtttygtatygtttttgtttttggagagaagggtttaaggggtttaaggagtyggagttgtygtagtygttaggaattygggttagaatttgtagttgtttttagttttggttgtttttggttagaygtygttgatgttygttaggttttyggygygttttgggggygtatyggtgttgtgtgtttggtyggagygttttgaaatttttyggggtygttyggyggygttgygattggtygygttygggtaatttttatgtaaatgaggtygygtygttttygygtygtyggagattyggygagttggygggygaggaaggggtatttgtatyggggttgggygggygtatttagagttaggygggtaggaatttttgygtagttattyggtgtttgtatgtttttggygyggaagggaygttttattagtttyggygttttttttttttagatttttttttygtttttttttattgtttgtttgttgtattattttttatttagattatttagatygtttttaaagggagtttttggtttttttygattttttatgaatttaggatgggtagtaaagaagatgygggtaaggggtgttyggyggtyggtggygtttttagttttattatttagtttattttgggygggggtttttyggaggtatygygggagttygtyggttggttagttaggaagygtagtttgttygtgttttyggaggaggaggagtyggaygayggttggaaggygttygtttgtttttgtttagattagtayggttttaaggagtagggttttaagtattatttttttattttttttttttgtttgggtaaggatygtaygtygttagtgtggtagygagygagygygaggggagggaggttgagygtttygttaagattttygygtygggttttttttggttagagttgyggtagtygggggttygggatygyggggagaggggygygtattgtggtgtttttttygttyggtgggtttttgggagtaggygaatatagattygtgtyggtttgggttttttggggaaggttgagttgttgagagagtggattatagygagagggataygyggtyggttttatattyggttgtttttaattattgtatatttggtatttttttttyggataygaggtggagatttgtaagtygggtttgggtagtttgtttttatygtaatttttttttgagtttttttttttattygtttygtatttttgttttttttttttttttttttttggaatgattagtattttaagatgattgataatggtgtattttagagayggtttttttttataatatttgaygaaggggagttttgygttagtttttagygtgatttttaaataaayggtttgtgaaatgatgttattttataaagttygaggaatttttttagtttaattattattaagtaaattygttttttaaaattatgttaatgtttttttttttagattttttttttttgttgtttttggtttatttataaaggtgggagtatagagattttatattttaagtagttgggttttttttttgtygtttttaaaggayggggtgttgggtttggggggttagtgagagggataagaggaggggattggtaaggtgggattaaggttgtaggygtttgttaatygtttggttttagggagagttggyggttttygaggttttttaattaattttatggtttttttgtttgttttygttttttaggtatttttaagggtagyggaggttygggttygggyggtttggagygtaygttttttttttttttttygtattyggattttaaagaagagaaagagaggtttttgttygygggttygttttygtyggggttygagyggtygygggayggyggygttgagyggtaggtyggygyggttaagaagaagaygygtatygttttttygygtagttaggtgtattagttygagtttattttygatatgaagygttatttgagtagttyggagygygtttgtttygtttttagtttgtagtttayggagatttaggtaaagatttggttttagaatygtygtaataagtggaagyggtagttttyggttgagttggaggyggttaatatggygtaygygtyggygtagattttggtgagtatgtygttggtgtttygggatagttygttgttgygygtgtyggtgtygygttygttygtttttttygygtygttttattattygggaagtaatttttyggttttatttttttataatttatataataagttygattattgatyggttygtygtttygygtygtttttagttgttygtagagtygggygygtattgtattgtaagtagggtttyggagtaaggyggygtgtttttagaaatatgaagaaatatattatgtgtatttattagtttttatttatggtttttgttttattttttgttttgattgtttygggtatttattggtattttttaagttagagagtttgttttttatttagatygaattagtaygttttgaaaattattyggagtgagatgttttygggtggtggtgggaaagggagttttggttagataggttgtggttggtagggaaaaaaattaggaaaatatttataaaattaggtatattttttttttatatatatatttgtatatatgtatatgtatataygttyggttaagttaggtttttagaggttttggataattattaaattgttttttttygttttttttatttygaggatggtagggaygaaaaggggagagtttagatttgtaaatatttttaaaaagaaaaaaaaataaaatattttaaatatttttgttaattttggtgggtttggttattyggtatgataaygtayggaaggtttttaggtttttyggtggaaagatttgtatgygtttgtttgtggaagtttggttygttttaygtggagggtgggatyggggttaggggttaaaggtygggattttggygtygtttagattgtaygtggttggagttgttygtttatttttttttttaaygtttagaatygtygygygggttggggygtatttyggttggaatttagtttaagagttygygyggagaaagataaagattgggaggtaggtttygttatttaagygattgttttttgggaataagygagttgggtgtttagyggtatattttyggtattgggttygttttgagtttggttatagtagttttygttatgatatgttttgtgtygygtattttttttttaggggtataaagtaggygatggygttgtttgtatttagtaaagtttttattttgttygtygygagtttggygygattagtttgtygttgygtttagttattyggtyggtggtagagttatgtgtttygygyggagagggaattgggygyggtgaggtagttttgyggtttaggagagattygaggttygggattaggtaaagaaggtgagggaggtaaaggygtttttttatatttttttgttgttaatagtttgtattggtttagygtgtggttggattatyggttagtaygyggtygtttgttttgaatggaattttgaygygyggygggggygtttayggattttttygttttgatatttgyggtygygtaggggttgggagggygttgtatygagagaatagtygyg

SEQ ID NO: 6190 - DNA, 829 bp, Artificial Sequence; identical to SEQ ID NO: 6179
  Description of Artificial Sequence: Synthetic polynucleotide

SEQ ID NO: 6191 - DNA, 1328 bp, Artificial Sequence
  Description of Artificial Sequence: Synthetic polynucleotide
gyggggtygttgygygtttttttaagtgtgttagygggggaggyggggttggaaaggaaatttggtgaagggttggttyggagtttggggtggggatatttattgygggatagggttagtaagaggattygataygtatygtttygagtgataygtgtaaatgttaagatatagagatatttgtaaatgttatttaagagggtgaggaygggggagyggtttygaggttgtgtttttyggggtaggtattggtttttgtggggttgygggttaagtgtygtttttttttaaggaattggtatttggggggggggggtyggtttygtygygttggaagygtaagtttyggggtttyggagatgygtyggggygygtygtttttyggggtagttttggatttyggygygtttaggygtagygtgyggtgttttyggyggggygggtagygagtygttttagttyggygatttatttygggtttygtagggygygagtagagtatyggttagggygagtaggagggygygggygggggataygggtagygggygygttgttatygtygtyggtttttagtgtagtagttttygggttyggyggygagygttgtattattttaygygggygtygagtyggggtygggygtygygatyggagggattttttgtttyggygagttagtttyggagttttygygtagygttygygtygtygttgagtttttttagttttttatttttaaaaaagttttttttygtgtgtgtgygtgygtgygygygygygygtygttttggtataagttagttttgatygttgtaataaatgagtaaattgttygagttggttyggggattaggaagagygttagtgagagaaggtaggtttgtgaaatggatttayggttagtagttatygtttttattatygyggaataaattattgtttttttygtattttygttagttggyggygtttygygggttttagagatygttygggttttttygttagggtttygtttygagtygyggttygtttattttygagggtgggyggtttagaygtggtttagtggygttygggygttyggagygtataygttttygttttaggatgatgtggtygtagggttyggggygttyggttgttaagygtatatgyggyggtayggtttagttttttaggttgaagttggaaaygatgattttgttattygtttttyggttttttgggaattttyggagtgygggttaggtttttatygyggtttatagttyggygygygatttygttyggttttaagygtttaaaggggtatttttygttyg

SEQ ID NO: 6192 - DNA, 2957 bp, Artificial Sequence
  Description of Artificial Sequence: Synthetic polynucleotide
tygtttttttygtataggtgttygattyggagttygggaggygggttttttttttaggtatttagtttagygttagtttgggtttatttttygttattttatagygyggggagtaggggaggtygaaagtygggtagtttggggggtygggataattygggttgtagtaatttygggyggtagtaggattggagagttggtgtyggaygtattgtagagaygtttttgttttyggygygtttttygatatttagtagagagtttggygtttttygttttgygygttygaggttatagygyggagaaatttggyggggtttyggatttttyggtttgggaaaagygatgattgttttgaattgttggggygttygaaatttttagggtttygatttttygtggggtaygygygatttyggygtagatgttagttygttgtttttygggttgagggagygaggattttagaygattttagggtygttgtttaggtttagtttygygttttttatttygttatttygttttgyggttttagtttggagatttayggattttattgygattttttgygtagtgtagtygttttttatttttagtttygagtttygggtaatttaggggtttyggygaggygagtttttttggggygagatgtttygagtygagtaaaggggtygygtattggayggggtttttaagttatagttttgggggttttgaggagtygtggtayggtttagggtagtyggggttgyggggttygtgaagttagaygaggttayggatttagggtttttgtaattaagatygygagygattgtggattygggayggatygtataaaggaggaagggggaattagaggggygttyggtttaggaygtgttaggtttgggyggggyggaaaattgatattagggygaggataaggatttygtttttttagggttgttaggggaggggttygttatygttattttttatgggttttggtttygayggtgtttaaagggyggagggttgggtygggttggtygtattygggygttgttggyggttaagttggatgggtygttagtgagtttyggtgyggtatygttggtttaggttygggygyggttggatatggttatttattgygaygatttgggttttttttyggtttygttyggttaggtttaggttatygygtatttttygggttatgagttaggggatttgggygyggtgggygggggtttttttttgtgggtgaaygygttagygtttagttttaagttttaygtttygggtttygggtttgygtygttttaygyggtttygagttayggggttttyggttygtttttyggygtttygggyggtttggygggygtygatttygtttggttgagttttttyggttagtaggagttgttgaggttggtgyggtygttttatttttattyggygtttatygttatggttatttagagygygtygttgyggaagttgaygtttagttagatttattagtaygtggttggtaatttttttttttataagygtagtaaggygggttggtagaattttattygttataatttgtygtttaaygattgttttaagaaggtgtttygygaygaggaygatttaggtaatagyggygygtyggttygtttygtttaggattttttattttttygtygggtygygggtatttygggggtgggagtattttagataatttaatttttttttgygyggttggggatattyggggaggagggagaaggggaagaagtgtttgggtatggataggtttttagatagyggttgagtttattataggttygygtttatagtgyggyggtttyggggtttttaatttttgtgygttttttyggaggaagaagygggagagttagtaagttgggtgattttgggagtgatttaatttttttgggttttagtgttttatttggtaaaatggggaagatagygtttattttaaggatgggtaaaataaataggatgttygtttggaaagttttggagtttatttgggggtttggygtggtttgygttgtttttggtagagyggttggyggagttttattattagtatttygtaggtttttttttattttaayggggttyggttttttttagggttttttttttttttttttttggattgttattttttttttagttttgttgtggaggtttatygggtatagagtgttygttaagggtggaatgggggygaggatttagattttttgtaagggttagtaggggatttttttgaagttgattttttygttggtttatattayggttygttaaagttygaattttttgaattgggttgtttttttttttgtaggtaaaggtaattattggattttggattttaattgygagaagatgtttgataaygggaattttygaaggaagaggaagaggagagttgaagttagygyggtygtgygttygggagttaggagygtgggaggggtygaggygttagygttggagttttygagygyggtttgtttggatttgtaggtttygttttttttattygtattygaggtygttatttgttttttyggtttygtttttgttatgagygttttggttggyggttttggtatttttttygggggtttggygggygatttttttttygggaggyggttatygatagtygttatttaygttttttagatttttaattttttttttggtttygtttttggttattagatygyggtygtyggttttygttttagttattttttttatagtygggaagggatygaagtttgaagggaggttggaggttagtygggtgygggtttagaggtgttgagtttaggttttyggttttttttggtgatagttttaygtgttggygttgaaggttttggtgttttgggaggaagygtagagtygggggyggttyg

SEQ ID NO: 6193 - DNA, 1860 bp, Artificial Sequence; identical to SEQ ID NO: 5965
  Description of Artificial Sequence: Synthetic polynucleotide

SEQ ID NO: 6194 - DNA, 1422 bp, Artificial Sequence
  Description of Artificial Sequence: Synthetic polynucleotide
tygtgtagttygttyggyggygttttygggygagggtttggtgttggggagygagygyggagygaggtgtttttttaaataygttttgtagtgtgayggyggtygttyggttggaagagttatttttattttgyggtaggagttygttygtygttatygttygtttyggtttttatggttaygygtttgttttyggtttygggttttygttgtygtygygggaggtgygygtagaggyggyggygttgttggtygggttgggtygttygtgygyggggttgtgatttatyggtyggygtygtagtttygtaatttgttgataattyggttttagttyggtygttgttttygygaatggagagygggttttyggyggggggagygtagygygtttgttttygggagygyggttyggtygtttyggtagtygtttyggttatagtaggtgggaaggaygygygggtttgggyggygggagggaygygyggggtygyggttyggtagaaaagttygygtttygaggtgatattggtygygaggaaagtagtttygagtaattttyggtttygttggggygggaggygttayggataatttagggttttygtttygygygttyggttyggagttygagttatatttaggtagagtaggygtygyggtygggttggggygggygggttattyggtgtyggttttyggtgtaaatttttyggygygtttttggttttgtgtagttygagatggttgagtttggtttyggagtygggagtggggygtagattgatttttaaatatggagaaggagaygtatttgtygttggygygttyggttygagttttttatyggtttttatyggtatygttttygttagttttaggygtagtttttaggtygttygyggaggggagggagygataggggtygyggttgttttttggyggggtyggggttgygagttgtttttygyggggatttttygttygtttygttgatygtygttgtttttatagatgggagtagttttyggattgygttygtttygtygyggttattttgaggttaggggttygggagygygattttttggtygtygtttgggattttgattttttagaggttatggaggttggyggggagtagggygttatttgatygtttttttttggaygttttttttagyggygtttaygttttygtaattttgtagygtttatggtgagtaygggggtttygggggttttgtagttgggggttaggtygttgygggggggyggttattygtatggggatttttaggttggaaaagttgtggaatggygagttggtgatygggttttygggtttagtgtyggggtgggaggttttgtggagtgggggtyggggataggtygygtgtttgggtatttttgtttttygyg

SEQ ID NO: 6195 - DNA, 1479 bp, Artificial Sequence
  Description of Artificial Sequence: Synthetic polynucleotide
gyggttttttttaagttygaagtagggattyggttttgygtatttggygggtgtgtttagattgtaattttygtattaggtatttaagaaygtgttttggatatattyggyggtgggagygggtgtttggtttgtattagggatgaggggtggagtagygaaagygttyggagygygtatttatttatattttttaagttagggygyggtygttttgggygygaggttttaagttaagtttygygttyggttaggagtyggggagtattttaggttttyggtttggggtygtygttattttattttgyggygygtatttttgatttggtttygtttttyggyggtygygagtagygggyggagygtaagtagagaggygttttgggttgtgyggtatygttttttttyggtgtttggggagggayggagggatygggygggagagagagaaagtttgatygatyggttggygaagagttgtatgtaatyggtgggaggtygggtyggttgggtttggggttygggtttaggttygtatygtttttyggtaggtttttggyggtgagygyggayggttyggaggyggyggttttgagttggtaggyggagggttgttttttgygttygtttgttyggygyggttygaggatgygggggggygatgttyggggttagggaygygttttgttattaggygttgtagttgttggtygagttttgtgttygtggggttttggagtaygatagttgttaggattttatttattatttgygggatygtgttagatttyggtttygygatttaggtgagtgtygttatygtygtttggagggatttaagggttttgggttgggatttggggtygtatyggggtttgaggtagaatagygaygyggattgggagagggyggggggyggttatygagttaggagagtgattaagaattagygtattgtggtttgatgttgtaattaggyggggattygggyggtggttattgtayggaggtygatttygggtyggttagggtagggttggagggattaygttygttatttgygtttttatygttaaggtttttgggggyggttttttagtttygagttaygttttttatttttygggttatttgtatttagagygaggggaggtygyggyggtttyggagtygtgggaagggggaygaggtygaaggaaattttgggaagttgggagttggggayggtttygggttggggtygaattttatygggtgttgtttatttttttttttaagygtttagtttttttttttggtatggggtgagaagggygggaygygattyggygttgggtyggggatagggtgtttttggttttgggtagaygggtttgaattygttttyggygggtygtayggtatggaggtggtttgggtttgggygttaggttygattagygattatygtyggttaygatggggttygtagattygtyg

SEQ ID NO: 6196 - DNA, 446 bp, Artificial Sequence
  Description of Artificial Sequence: Synthetic polynucleotide
tygttattygttgataataayggaatygtgggtattggttttttaaygtygtttygttygttttttttagttagtttggtggatatttyggtgaaggttgtagatttttagagttattttttttttaagtagygtttttygtatttttyggygtygggaagtttagagggagttggtttgtttttatttttaggtgtyggyggyggtttttgtygtttttygygggataggaaggttttgggtagtagtagygatagagttaggataagtttagaagttagagygattttttgtattgtggagtaygttatgattgtttayggtggtygtaggtgtagaygttagtyggaatyggaatyggaatyggagtaygggttgtygttttygatygaatygygggyggygyggayggygtygygygagggataaggtgygygaggygtayg

SEQ ID NO: 6197 - DNA, 2991 bp, Artificial Sequence
  Description of Artificial Sequence: Synthetic polynucleotide
gygygygtagttagygtttttygyggatatagtagtygggtgttggagaggtttggaaagggygtgtyggagagttaagtgtagtygtttagggttgtyggtygttttttttttttttgttyggtaggggatttagygygtaygttagtgtggaggggygggttggttggttagtttgygggtttttgyggttatttyggggatttttttaagtttygtttygtagtgtttttattggtttyggatttttttttttttagttgttygtttgggtttyggggygtttaggttattayggataaatagtttagggygtttggygagaagttaggggtgaggaagttttggggygttgtygtygttttttttaattataaattaggtyggataggagagggaggggtgggggatagtgggtgggtatttagattgttagtattttgttatttatagtyggggttttygagyggtagaaagtttyggttattttttgtygtttgggttgggygaagttaggatygtgtygygttatygttaggatatggagttattgtygttatygtttygygaygtagatttgayggttttygayggttttttttgtttttttgttataayggaygatttttatgaygattygtgtttygatttttyggatttgygttttttygaagatttggattygygtttgatgtaygtgggygygtttttgaaattygaagagtattygtattttttygyggyggtgtattyggtttygggygtaygtgaggaygagtatgtgygygygtttagygggtattattaggygggtygttgtttattgtgggtttgtaaggygtgtaagygtaagattattaaygtygatygtygtaaggtygttattatgygygagyggygtygtttgagtaaagtaaatgaggtttttgagatatttaagygttgtaygtygagtaatttaaattagyggttgtttaaggtggagattttgygtaaygttattygttatatygagggtttgtaggttttgttgygygattaggaygtygygttttttggygtygtagtygttttttatgygtygggttygttgttttygggtygyggyggygagtattatagyggygatttygaygygtttagttygygttttaattgtttygayggtatggtaaggtygggattttaggaagtgaggaagttagggyggygttygggatattagggaygygttttygagggyggggagttggttttgygggaggtttgggttaggatttttttygagagagaggatttttttgttttgggtagttgttattggggtagtttgttttggaagtgtgygggtaagygttygagttgttttattgggggygttattagaatattgtagygygaaygtgaagatttttttttttatttatttttatttttaaaatgtaaatttgygttttttggtgattgttygtttttggtttggttttgtatgttgtagattttattttttatttattygtaattatttttttaattaggataggtttgggttyggaattagagttttaggttagagttagggagggggyggttataggaattggtgttygggtttygagtygtttygygggtttgatttagtygtttttgttgtttgtagatggattatagyggtttttygagyggygttyggyggyggaattgttaygaaggygtttattataaygaggygtttagyggtgggtatttygggtttttttttgttygtttttttttttttatggagttgttttggtttttatttaggaygtttttatttttatttatataygtttatgttttgggaagtggtgtaggagatgaaatattaagtaagtagttttttgttttttggattgtttyggattttaattaaagtttttagtttttaatttgttttaaagtattgggttygggggtgggaggtttgtygyggttttatttttgtttattaatygagtttttttygygtagaatttaggttygggaagagtgyggyggtgtygagtttagattgtttgtttagtatygtggagygtatttttatygagagttttgyggygttygtttttttgttggyggaygtgttttttgagtygttttygygtaggtaagaggttgtygtttttagygagggagagagtagyggygattttatttagttatyggaygtygtttygtagtgttttgygggtgygaattttaattygatatattaggtgttttgaggggatggtggtygtttattygttygagggatggtgtttttagggtttttygygtttaaaagattgaatttaaatgttttttttttaatagygttttaaaagygattttttttgaggtaggagaggygggagaattgaagttttygttttygttttatagggtaaggatatagygyggttttttttaygtagtatttttttyggagatttattgygatggtygtttygtgtttttyggtgggttagagttgaattttgaggggttaggtttagttttttygygtttttttttatgggggtgagattttygtagatttaagttttgtttygggatgtatyggttatttgggggggygtgagatttagtgtatttyggttttaaatgtagtaggtgtaatygtaatttatttttaattygtttttyggtttaggattattttttgtaatatttttgtaatttatttttgtaaataagagttgttttgttagagtaggagtttttggggttgtatttatttttgaggtatggtgtgtggtgttatagggaatttgtaygtttatatygtaggygggygagtygygggygttygtttaggtgattaaaataaaggygttaatttatatygtygtggtttyggttttttttggatatgggtgtgggattyggaggaaaattygtaaattgggttagttgttttttagygaygtttgtaggyggtaggyg

SEQ ID NO: 6198 - DNA, 928 bp, Artificial Sequence
  Description of Artificial Sequence: Synthetic polynucleotide
gygggggygagggggygagggttggtygttygtgaaaggaaaaataaattttaaggaagtaagaaatyggaygaaaggattttattttaagtgatttttttgaaygygtttttttaaatttygygatagtttaaggagttgygyggygyggyggttgyggttaagatttgtgattaatgttatttgatttgagtttatggggttttgtgygttttgttatttattgttatgtygttatttttaagtttatttyggagaaattattygygttttttgttttaaggttgagttttttgtttattttttttttaagagaaaagaagaygggaggggaaaagagagaatyggagtttttggtttggggtttaaggtttttgtttaygttgygggggaggtygtagtagattyggttggggtttttygggtttaggtggttaaagttgtygaaatttgttttggatagtagaaagagygtgtyggaaygtattttgggggtttygtttttttygygtaggggagagygagtatgtttttgtttygggygtygtgyggtygtagtagtagygyggttttttttagtgygagtygtgtttggaatgtttygggtaagygaagggttagtaagygaggygaaayggatattataaagtagagagtggtgtgagttttttygttttttgaaaagatggtaagttttygtttygggaaggttgtaaygttaaggttattttttgtaggtttyggatttttagttttttatgttttttgtyggagtagttaatagagtgagagygtattttggaaagattggtyggatgtygggyggygatagggaaaagygttygaygtttggttttggggtggggggtgtggggagggggggtagggagttaaygggygaggygaaggaggagggttgygaggttyg

SEQ ID NO: 6199 - DNA, 1267 bp, Artificial Sequence
  Description of Artificial Sequence: Synthetic polynucleotide
gygaatttygagtaattgtttttygagggggttygtgygygttyggtggygtygtttyggtttgggttttttygaggaaaaatatttattygygagggttyggyggtttttygattyggyggggatgaattgtggtaatttyggtagtttttatygyggtgyggaagtaaagagggtaatattggygattgyggttyggaggggttggagygygtgaagtygtgggggygtygtgygtttttygttttttygtttyggtygtaggttttgggatttygatttyggtgtttygggtgatagyggttgyggygtttgtagtttagattttygtagttttgygggygaaggaggygaayggaatyggtttttagtggggagygtaataagttatagtagttaaatttygygtttttgttygggtttttagaygaaygtagtygtagyggggggtygggtttygagttttaygtygtygtygtygygttagyggtggggggygggttgggggyggggyggtyggggttgttttttygggygtatatgygagygtagtattyggygttgtygagttatttttttygtygttygttagtaagtttggyggttttaagttaggygygttttaggatttaggtttatttgtttttatttagtttyggtgttttttgttaggyggggattttygagagygatgtygatggatttgattttagttgtgtggttttgtgtgtgtattgttaggataggtaagtatgattgtggyggttagagggattygggaaatgggggtgtttatagattayggyggygtggggagatttggagtygagttttgygttggtttggggaayggyggtagygtggatyggtttttgggatttttttgttttgttyggagtgatagggtgaaaatagggatttaygggtttgaagatgttttygttgagtgtttttttttaggggattyggttttaggggygtaggagtgaggggygyggtygagtaggygtatttttttgttgttagtaatyggtttttygttttagggagtygaaattygtagtagggygggttygygtgtttygagttttygaatttgtaaggtgttgtggaaattattttygtygattttygttaggttgggaaggggtagttgygggagtygtattygtagagggagygttttyggttggygggygyggtyggggttygggagggygyggtgyggygagggtagagagttgygggagaattttgggatttygyg

SEQ ID NO: 6200 - DNA, 1225 bp, Artificial Sequence
  Description of Artificial Sequence: Synthetic polynucleotide
gyggaagtygtttyggattatgtatggaaggttaattgaaaagattagtyggggygtttgtggtagttttgttattttgtgatagtgtttygtttygggaaattgtatygttaygataaaygggatygtgataaaaygatttttttygtttttatttgtagattatttagaygagattgaattgtatttgtttttttttygaggggagtygygtttttagggtagtygaaggtttggggttgagggggggtttttattaaggygygggtgggggtyggagttttaattygatgagaagtgataggygtttgggggatttgggtttyggtygggattagygtaagtagggattttgyggggatatygtttttttaatagagtaaggtttggtttaygttttyggttttttttaatttttttttattgtttttttttgtttygtaagttttatttatttttttagttatagagttttatttttaggtataggaagtttttyggaaaaagaaaggttgttttagaaagagatygagagagattttttaaatttygggtatagttayggtaatttttagtttgttaatgttaaggygggygygtaaggtygtttaaatttagatttttttttttatttattttaaaaaataataaygtgttagttattttygtagatatygtyggttggtgtttgtttaggagaygttagggttagagygttatttttagtatygaaatggtagagagaaagygtagttttaaatttttttttagaggttaagttttaattattgtgttttttttttagggattgttggygttttygtttattggygatgattatgygtttagaattygatygygaagtaattaataggaaaatatatggtgttaatttggatgtttygygtttygygtatattygggaaygagyggtataaagttttgtyggtyggttygygatttygygtttttyggggtttgttagtygggtygtagygataaaygtttagggttgygygttttggttggggttygttygagagatagtttgyggttggggagtttgagttttaaggggagagtttagtygtygaaggygagtttatyggttaagttttggggttyggtaggttttgtataattattttygtaaagttygttatttttgtgttttttttttagttaygygtttattagtttyggaagtattagggggygatyggyg

SEQ ID NO: 6201 - DNA, 1627 bp, Artificial Sequence
  Description of Artificial Sequence: Synthetic polynucleotide
gygtagtagagygtyggagaggagggaygyggaggttatygaggggttagtagggtygyggygttagggtgggggtttttaggyggygttggttayggtttattygygagggygagygygttyggtyggtygygttttttgtygttygtgttygggggtgggattygygtygggagttgtygagtgygtggagggagttaggtttyggttygtttgatggattgatttggagatggatygaattatattatttgtygtgtatyggtttgttttgtttttgttttgttttgttgttgttgttgttgttgtaaggggtggtggygagttttaggattttattaaggaagttaagatttaaggagatagagggatatttatttttataatatttttttttatttttttttttttttgygygtggtaagtttttttttttttttttttttttttttattagtttttttttaatgaggtaagatygtttttaataatttgttaatgtttttgtggygttyggtgggggtyggaatttgagatttygaatygttgtgtgtgtgtgtgtgtgtgtgtgtgtgygygyggtgggggtyggaatttgagatttygaatygttgtgtgtgtgtgtgtgtgtgtgtgtgtgtgtgtgtgtgtgtgtgtgttgttattggatagttgatttattttttaagttgttttttttgtttgtygtgtaagggaygygtaaagggttagagaggtttggyggaygygttaaaattggtaaagttggyggtttagggggaggggtaagtggatttggaggtttttttttattgtgtatttttttggaaaaaaagyggagggggtattaagtaaaagttttttgttaggtagagttagttyggygtttttygtatatagttggggttagtaggggttgtttttttgtygggtatagygtttttaggagttagtyggggagagttgagttaaggtygaaggagtygtttgygggtttagtygttttttttygttygttggttttagagyggaygttgggaygttyggggtttggtagttttgygttyggttaggagygggygggygagtattagtttgygttttggagaaggggygtagygtygtagttgaggtyggagtagtttttygygggygtaggatatttgttagtgagygttyggattgtayggttttygggtagtgtttgtyggygaggggygggagttygggtgatttggttatttttattttyggtttaggttyggagggyggtygttttttatygtttttttttttttattggtagagygygttgygggyggattttygggttyggagtagtttatyggttattttatygtttattyggttttyggtgttttttttyggtygttttatttagtaatttttygtgttttgtttttygattggaaatgttttayggaagygttttggatagggttttygttaggygataagagttyggtgttgagatgtgttaygtttttatttttttattaattatggatggaaataaataaggaagagttaattttgttgagtttttttttyggtaaygagaggygttttgtagtygggagggagtygtygttygygtyggtagtyg

SEQ ID NO: 6202 - DNA, 1857 bp, Artificial Sequence
  Description of Artificial Sequence: Synthetic polynucleotide
tygygttgtttaggtaaagggattyggygattaagatattttygygagggtttagggygygtttttttygttaggttttagatttyggttttgygttatttttttttaygtttyggygygggygtagttagttyggttttttttaggtttttaagtttyggatygagtgtggggtygtttttttttttyggaaggagttatygtygttttaagtggaagaggagaggaagggggygggggagyggggggyggggagyggaggyggaggagggggagggggatttttttggtttttaygtggttygggygtttgtgaatygygtttatyggagggttttatagygaaatataaaagtagttgggaagyggyggggattygagtttttagygtygggyggagygtyggatagagtttygtagygtttygyggtygygatggggtygaagygttygaagtttyggagtttataaattgtygggttygtttygtygtygggattygggtgtttgggttyggtttgaagyggyggyggygtatyggtatagtygygggagtatgggtaggaggatgyggggygtygtygttatygyggggttttggttgttggygttgggttygttgttggygttgtggggagggtttttgtygtygyggatygagttgttygtttttyggtygttygaagatygatttttayggygttyggttyggagyggyggtttygygttygygtttygtttttttttgttttygtttttggygtgggaygttygyggyggttttttgaaaatttttygggygttgtttattttggyggtyggygyggayggttygtttyggtagtttyggagygagtttaggtggtaygtgttagttaggtagtttyggtyggaggagagygtygyggtgtaygggggygttttttggagtygyggtttggaggagtaggtgttttygggtttttyggaggtttaggyggyggygtggttggaggyggttygyggygttyggatggtggttttggagygygggggttgygggygtagttttaatygattggttygttttgtygayggtattygygtttgygtgygttayggtattaattyggagtagatttagggygaggttttgttttattatttggygygtttgttgggtttttagygttaygtgtygtygttggtattggttygggtggaggttyggggygygtagtgggygtaggtgtaggaggagttgygygttgygtattggatygagggtagygtggtgagtttgataygttggttgtttaattttayggaygtggtggtgttygygttttggygttyggaggayggtygtttgygtttttttygggatgtygggggtgagttggttaattttagttaggyggagttggtggatttagtataatggatygatttaatttttttygattatttgayggttaatttygatyggttygtaagtaatttttttagtttgtagtgggattygygygttatgtagygtgttattagtaatttgtatygyggttygggyggggygttggtttttttggataatgaggygggtttggtgtayggttatygggtagtaggtatgtgggataagtataaygagtygttgttgtagttagtgtgygtgtttygygagyggatygygyggygygttttggagttgtatygyggataggaygtygyggttyggttgttgygtttttatyggygttaygagtttygttttttygagttggtygtttttgtagatttttaygtttagttgttatagygtygtttygattttttygttaagtatattttgtattgtaaggttaagtayggtygtyg

SEQ ID NO: 6203 - DNA, 2423 bp, Artificial Sequence
  Description of Artificial Sequence: Synthetic polynucleotide
gygygygygygtttgyggaggggggtggtaaggatttagaaggggagtttattttttttttygagtttagttttggggagtygggygtttaggttygttaggttgtaaagagagttgagagttgtttygygtttygygtagaatyggyggtggaataattagygttttaagtgtgtgtatttgggattagggggygggggagggggatttgyggtttygyggttaattyggttggtgtagatttggggattttagaagggatagtgttygtttagtygyggygattgagggtttttgttygggygtagttygggttagtygygtgtttyggggtygyggtttttttyggaattttygygggyggggtttgtttttyggagtyggttggyggggggygggyggygtyggggaaggggtygttatttttttagagyggyggggygaygttaggyggaagggygyggggygygtaygttttaaatggtattygttgttattygagtttagagtygtgtgggtagtygygggttatataagtygygagtttggtygtygyggggtagayggygatagtagyggyggygagygtttyggagygyggyggaatagygtttttygagtttygtgtttttygaygggttygttygttygttygttttttygaggagygtyggttygggttygygagggtygtygttatttygtagtagatttggatttttygttyggygagttttyggttgttgtttttyggggggtttyggygtagyggtygttttyggagagtttyggygtttygtygttyggtttygtagaygtyggaggygttatggtygttaagttyggygagttgatgggtatttgttttagttattaggyggtgatgtygtatttygtgtgtttggtygaygagttttygtagttygtgyggttygttaagttgtttaagggtyggggtyggttgyggyggtygygttagtttygttttaagaygtagtyggtgattttygaygagatttaggaggtggaggaggagggggtgttttttatggaggaggagaaggttaagaagtygtttttgtagagtttggagtgtttgygtygtagtaygtagagtttgtygttgtagygggagtagtttagtagttgtaaattgaggaatagtttggattttagygatttygattyggttttgtaaggggygtygttygygggggggaygygygygttygyggttygygyggggatyggygtgtgaatttygagagtgttygygttttgttttygggggattygtaaggattygggatygtygtttttygygygttyggattttygtttygttgygaatyggtyggtgygtttttygtygygttygttttggttygggagygtygggagyggggtygtttttttygtttttgtaaatgtttattttttaattttttttagtgygaattttgttgtgagtgtgtgyggggaggygygttygygttgagtyggyggygggtagttattttatgtttttgttygatggtttgtaatttygattttgtatatygttttatygtgttttttagygtatatttatttatatttaygttaatattttygttgaatatttttataattgttaggygtggtygttgggattttgggygtagygyggttgttattgygtttggaggattgatatttatttttgtattgygatggttgaaggtatttatttaaygatttttttatttggatatgtttgtgaggtttttgaaaggagataaataaagttaatatatttgtatagtgtagttttttaggtttttgattttttgtattttyggggtttaggtttttaagattyggggaggtgggggaggaggtggtagggggatgtyggattagggagtygggagtggagttatttttataagtttyggttatyggaaygaggttgygttatyggtgygygggtyggttgtttgtttttttaagtggatttattttyggtttagtgtgtttttgygtttttggtttattttttatygtyggtattygggttgaagtgaagtygtaggaggggyggaggtagagttgaygatggagagttttttttttygtatagtttattttttagagttggggttagggttttygtttygtattygttatagaagaygtatttttttttgygttgatttttggyggygggtggggagatgtyggagttagtaatgygagatgtttgggygttgggattygagagtgggttggaggttagtttgggttggtygagagtgtgggtgygygttygttgtygygggtaggtgattttttgatygtagttgatttagygtagtgtttggygtttttgygttgyggggaaaatygyggtygttatgtttttagtygttttttgygtttyg

SEQ ID NO: 6204 - DNA, 1146 bp, Artificial Sequence
  Description of Artificial Sequence: Synthetic polynucleotide
tygtygtaggatttaygttgattaygtttaagtyggtttygtttattygtttygtttatygttaattttaygygttttygttyggataygygttttygtagttttggagygttygtatttatttataagttttygtgtttagttttygtgttttaggagtttatatatatttygatttttaygaagygttttaggtttttattttygygtttaggtatygggyggtygtttttyggggtttattttygttgtagaatttgtygtygaagttygtgtggttgtagtygtagtttatttygtygggggttagtayggtgtagaggtygtygttggygtaggggttgygygygggygygtatagygggtyggyggtggygtygygtaggttttggttgtttagtagygyggggggtygttygtttagttttaggttggttaagaggtygyggaagggyggttygtatttgayggtgtttagygtaagygtygagaggygtaygtygggygggatgtygtttaygaataggtygttggttatttgtatttygygtygtttggagygtatttyggyggygygggtttygtygtttatygttagygtygtgyggygygygtygygggttagtagtattatgtgttagyggtygtyggttatyggygtgtttagttgtagygtggtyggttyggygtaygaaagygtgaagygtagtygtaggyggtygtttattagtagtagttttaggaagtygtagtygtygtygtygtttaggtagagtagtagygygygygtggygttggtgygtaggttgaagttgagttygtygttgttygtygygttygtttagygygygtagygagtttattgttyggggtygtygtygaattttaggtygttygygygygtygttagygttagtagtagtagtaatagtagyggyggtggtgtyggtygttatyggttttyggaygttatgtttayggyggtttyggtttygttyggttttyggttttygtttaggttttagagtygygggygtatggggygggagggggtygggygtttttygygttgagyggggtttttttgtaggtttatagtgttatgggttyggtygyggggygaggygygtagaggtttagatgtyg

SEQ ID NO: 6205 - DNA, 577 bp, Artificial Sequence
  Description of Artificial Sequence: Synthetic polynucleotide
gygggtatagtyggtttttgayggygtttaaggtttygttygtgyggygttgtttattttttattattagagatyggttygtttagygggtaggttttattttaatgttaggttaaagtttttattttttggattygggtttggygttttygttttyggygygtttttattyggyggaygyggtygygtataaggtttagtayggttygygttttygtagttyggtygyggttgaatatttttagygygaagygggtgggygttagtagtttyggggayggyggtttttaggtttgaaagttggyggttyggggttgggygggggyggttattgygttygggagtagttttagtagygataggagttgtagttagggygttatggygagggygaagtyggyggttyggatttaatagaygttttatygatttatygggtatygagttygyggttagyggggtttgagttttttttttagyggggygayggtaygtygattaatgggygttggtttgyggygtttgygygtttttttgtttataggaggtaygtggggygygtagggtagggagagyg

SEQ ID NO: 6206 - DNA, 1721 bp, Artificial Sequence
  Description of Artificial Sequence: Synthetic polynucleotide
aygaagaatyggttggttaygtygaagatgtttattaygtttygttttaygggygagagttttagtaggtttgggggyggggygtaggttattgyggggtaggtgatttttggtttatttygtttttyggtttgttygttttyggggattttatttttggggtggggttggggataaagggttagggttttyggygtagtygtttttaagggtttttagagtttaagttgttttttagggttttyggagtttaagtttgygttagtttagattagtttgtttgtgtaggggattttyggyggtygtatttagtttyggatttttagaygygagttygattttagyggttttttagtttgggttaggtyggggygygtgtttygggttttttgtggttgtatygygygttttgtgtttaygggygaaggygttggaattyggygttyggagttygagtttttgaaggygggaggyggygttygattttaggggttgygttgggttgtyggagttaagagtgtttgygtttttagtttygygttagaagggatyggagttygagttygtttyggttttyggggttttygagtaggtgttygtygagggttttagagtgtgattgagygggttggttyggyggtygttgtttttygttttygttttttygygtttggtygygttatttattgtygygggtgttygygtgygygtygtygatgyggtygtyggggagygtttggaggtggaagtygatgtttaygttgtagtagagtygtygtagtygtttgatgtttagtaggtagtygtyggygtygttttggayggtygtttttttgggttgygttgttatyggtaggygygttaaygagagygttattaggtttttttagyggygttttagttyggtttttagygtgtygttgggtgtagtgggtgyggyggygttttttyggttygtttagggygttagtaaggttagtaggatygtygggagtagygttatygyggtygtttygggtttygatatttyggttygagggtygtgygtyggttaggyggttagtgygttygggaagttggggggtagagttgygtttgtggygtttygygggagygtayggtygatttygggtaggagtgygtaatygaggaggtgygggaggtaagygayggggttttygggygtygggttttatttyggttgtatggagyggygagtygggyggaaagygygyggttggagttgggattttgaggagtagtgygygtttttttgagygttaggttygttygaggtygagtygttatatatatagttyggygtttttttttattygttygttttygyggggggtygttygygtttttttgggygttyggggygttgtggygttygyggttggtygtaggtygtttgttaattagggtygggggaagggaggaggttggggattagygtygygagtgttatttggagggatttyggtttttatttttggtttygttyggtttayggatttgttygtttygttttttggyggtttttatatttttgttttttagttagttttgttttttgtattttgtttttgtttgttttygttttygtttttttttttgtttyggtygttttggygtagttttaattygggtattygaagtttttagtgggygtagaagttagyggttgttgtttgtttttygtttttyggaggtttayg

SEQ ID NO: 6207 - DNA, 1721 bp, Artificial Sequence; identical to SEQ ID NO: 6206
  Description of Artificial Sequence: Synthetic polynucleotide

SEQ ID NO: 6208 - DNA, 615 bp, Artificial Sequence
  Description of Artificial Sequence: Synthetic polynucleotide
tyggygtttgtygagygygtagygtygggygaggygygygggattagygggtgttgygggygygygggttagaggyggtyggygttttttgttyggtgggttyggggtygggtygygggggtttggggttyggyggggyggyggttttagtagyggyggyggygyggyggtygyggagggaggttgagygygggtyggttgtgttygttaagggttttaggygtygygttygggygtatttgtattttgtygygggaagtaggtagttyggtttggygttggtttagygttggygttttttttggggtatygygggttyggtggattggttattygagaaataggtttatttttttttttttttttttgtgygggttttygggayggaygttttaggygyggygtygagtggaggygagggggttgyggagggggaaggggttaygygggttayggggtttaatttttgatttttygygaygttaagaatgtaggagggtagagttgagggagattttaggtggaatttttaggtggggaaggttgagttgtyggggttgygggtatygggaaggtttagggtaaggygttyggyggtgygtgttyggaatttyg

SEQ ID NO: 6209 - DNA, 1542 bp, Artificial Sequence
  Description of Artificial Sequence: Synthetic polynucleotide
ayggaggygyggygttttttatagtygtttttaatgaagggaagygtgtttygaagttagtttyggtgygtttttttttttttyggygtttttttttaaatttygtyggatttttaaaggttggaataggyggtgyggttgtagttygygttgtaatygtaggatatttgatggggyggyggyggygggggtagggygtagtttggaaagaagggggygaaagaggttaaatggtttygttygtttttttygtygggagaattygtagyggyggggtatagggggtttaagggttygtttaaggttaagtygtygyggggggtagttagggggttttttttggtyggggagtagttygggaygttttagggttyggggtatagtaggttttttattattgtyggyggyggtttaaagaggtygggttttagtttygggggttttygtagtayggaggtttyggyggggaataygtygagaggttyggyggtaagtaagattgtygttttygtgtyggygtygtagtygggttttagtagtttaaagaattttayggttttygygtttttttttaggtygtttaagtttaygttyggtttygaygggttatattygtygtygtttgttygggayggtttygtgaagaaggayggaggtagattgygtgttygtagygggatttttttggtttttgggatygtygtggttttygyggggtttgttaygttttttttygygtttttagtgttygtattttttagttyggtygtyggygtagttattttatttttygtyggttyggtattttyggggaygtggygtagygagtygaagagygyggttagatttyggttttgtaagttggyggtygyggyggtttgygaygtttttygtyggggggtagttttgtygtgggtyggggtygygattgtyggggygttaggggyggttagyggtygtttggttggygtgtyggyggygttyggggagggygggtyggggggygyggygtttatgaggtygttgtagygtttgatttgtttttgtaggtatttgyggtggtttatttttygtttygatttgttyggtttgtttagygttagtttgatgttgttggaygtygagttaatgaagttgagtagatygygggtggtttygygtaygttttttttttyggttttygatagtagygtattygtyggagtttyggttttatygttttygaaatagtagtttttgtttagggtttygaaggygttttttagttygttyggggagttttygaagtygaagggtaygaaagggtgygtgttgaggagygtygtttgtatygttatygtygyggttttygggttgttygtagygttgttygtgygttttygttagtttttgttygtygtttagatttagttttygtttyggygyggygygygyggygtagtttattagtttygggtttggttygttgygttgtttttygggggagtttattaggttttgtaagtaaggggyggagggagggagygygyggygatygtttyg

SEQ ID NO: 6210 - DNA, 1542 bp, Artificial Sequence; identical to SEQ ID NO: 6209
  Description of Artificial Sequence: Synthetic polynucleotide

SEQ ID NO: 6211 - DNA, 1768 bp, Artificial Sequence
  Description of Artificial Sequence: Synthetic polynucleotide
gygygtygtgttttttatygtttttttttttggttygattggttttggttttttttaygtttttagtttttaaattggygttygttttatggttygtgtaggaygttaaaagtayggtaaattttagggygatttttagtagaygttttygaygtatgatgtygagtygttatyggttttygtygttttttgtygygttyggggttyggtttgyggtygtygttgygttttgaagygtatygygtygtyggggtttygttatttygtygttygtttttygggtygggtttttttygttttttttaggygttgtttttattttaggyggtttttgttagttgtaatatagagataaattttygaggyggggagatttttagggtatygggatgttgaagtttygyggtttttatttttaagtttaattygtgygtygtttgygygtggygtagttaatttgggtaagggaagatygtttggtttatagttggttggaaagtttaggttttyggyggtagtagtttyggtygatttttyggtttttygggtttygttagaagagygyggygtaaagtatttatatttttagyggttttaagtttygggygagttttttgggtttattttttttagyggtaygaattgygygygatgygygttttgaaygttttattttttagtttgtttttttygttaggttggaagttagtygygtygttttygtygatttygggygatgttatygtttttygaatatttgaygyggagttyggtattaagagtttygggttaggaagttgttaggtaggggagggttagygttagttgtggaygtttygggatagttttttattttagtttttgtttttgttttyggygyggygtaaaygtaaaagttttygtggtygtagttttagtttyggtggtygttygattttygtygggatttyggttgtatttattggagaagyggyggtttygattttygaggaggyggyggyggttgtttttagtygtggtygttatagttattgttyggtttygttygtagttgttttagttgtggtttttgttygtttgtggtatttatagtttttgtygyggttttygtagtttttttttttttttatttttttaagtatygttygygtagyggtttttygygagagaaatattttttttaaaaaaagaaagaaaaagaaaatgatattttttttttygtygtttttattattattttatttttyggttttatttattttttttttttatttttttttgttagttttygtttyggtgyggggtttttygttygtaggattagygtagtgggaggaggtagaggtgattaggttttgttyggtttgggattttttgttttgaggtggggaggggagaaatgggaagaggtggagtagyggttttagttygttttgyggttgygaggtttagattygagattaatttttttygygataggtgaagttttatyggagtagaaagttgttttatttgtattaagaatgygygttggagayggttgtttyggaggttttggttygagagaaaattagttttygttgttygygtttttyggtagygygttttttgygtttttttygtyggatatttagtagaygtyggaggtygggaggttaagattgggygygtygtaggtygggatygyggtagaggttgttgtgtygatygaggagagggttttgtygtttttatttgttttgggtgtygagagtttattttagaygyg

SEQ ID NO: 6212 - DNA, 2656 bp, Artificial Sequence
  Description of Artificial Sequence: Synthetic polynucleotide
aygtttttttygyggtaggaaagtaygttggtgttattttagagttttagagggttgagggaagattygagttttaaaattagtygtttttaggttyggygtygggaatgttttttagttygtygygtttttttygtygttttttttygygygtttttttttttttgygttaygtttttagatygttagttattttygtygtygaggtttttttttttttygtttttttygttygyggtttgggaggaggagattgygagagataagygygagggggagattggagaggggtttggtygtgygtyggygtyggttgtgatggggagttyggagtagttaggyggygagtagtagyggyggyggttgtagttyggagtagataggagagtyggygttttttttygtaggttgygttgtgaattggtttgyggattgggatttygygtttttygttttttttttttygttgttgttttttttatttyggtttttttttttygtttgygaattttyggyggyggyggyggyggygtttygagygtagagygtttttgttygyggttttagtttyggttagygygyggtgggygttgyggyggtagtagtygggggatyggttygttyggagtaagagygtygagtatygggtgaagaagattaygggggaggygtttygtagagtygtggatygttagyggaggtaagggtgygtggggatttgtagygtgatgatttggttgtttggtgtatygattggagygygtttgtyggagtatagttttagttgttgggtgtaaatgggttgygaggtgggttggggaggygagagtygaygaagygygtgggggaaattttttattttgtaaagttttaattttygygtagtttygagtygtygttgttatygttgtaaataggagaagagggtggtttggtttygyggygggagtygggaggtttatayggagagttggttaagtttggggttgaggatttggggaggggttgygaggggggttgyggattagtgtatttattttyggtttttagtygtttttgtaggtggatgagaaggtttaggtggygagtttgtttggtagtyggtgtttttygggygtagtgggggatgtttagatgtygatggatgatgtatttaggggatttygaggtgtaagttgggttatygttaggygaggygyggygtagagagggagtttagtttttattttygttaggaaagggaaagggttattagtttgygggttygttttttaygtttgattygggtttgyggggtttgtggttagggtgagatgtagtgaayggyggyggyggtttttygattggggaygatattttttayggagtggttggggatagagattgtttttgttattttgataaggagagggaatyggaatgttttgygagagtgtatgatttttggygggygtgtgggaaggttgtttgtttttgaaaagaaagtagygygggtttgattatttttaggagtgyggaggagttgttttyggattgggggygagaaygttaggggtattagtttygagtttaggttttattttygggyggttygggaygaattttttttataggttagtgtgtgtgtagggtaagtgtagggggttgaggggygttggyggggaggtagtagaggtggtttggattattttggygyggygygyggtgagygygaggatttygttagtgggagtygttgagttaaagtgtatttggtttttyggtttgtatgatggygagttyggatatttttagttgtgttgtgatttgaattttttttttttttttttygttgatttttgttatatgtgtttttygagatggtttaatattgaatatgattgggttttgyggaaagtaatttttatttattttttatygttttttttttgtgggyggggggtggygggggygtgtttggggtaaggatgtaggggtggtyggagtttggttgygagttaagagagtygtttgggttgttygggatgagaggaataggggtgttttyggggtgtgggtgtgttggyggtgatattttgaggttgtagttygttggaataatgggtttaaattaggyggtggagaggggttttyggaatggaygtygggggyggggaggttgyggagattttgygaggttttygtgaaggattaggaggggttttygggagggagtggygtttgyggttyggagygtgggyggtyggtggttttggtaygyggaatttggtggatttttagygtttyggtygggagttttagttttatttygtygtygtygygygtttaatgggatttagtttygggtttgggygaatttgtagtagtygyggygggagggagggaygttgggatygyggtaatgattgaagttttttttttttttttttttttttttygttttttttygtttttagattttggygygtttgttttttaagttggattttatttttatttataagtgttagataaattygygagaattttttttaattygtttyggttttagttagattagggagggygtttagggggagggggygagttgtttgggtagtgtttggggaggtgygaygygtttattyggggtttgagyggttggggtttttgtgyg

SEQ ID NO: 6213 - DNA, 623 bp, Artificial Sequence
  Description of Artificial Sequence: Synthetic polynucleotide
gygtygtagygttttttgtttataaagttttgttagtyggagaaggtgtagttgttttaagagaagaagtgygaggtattgggtayggttagggtygttttygygttttgttygtyggttyggttttygtggggttyggtggttygtattaaggggaggagatagagtagtaagaggtgagggattattttgtaggagttattttttttttgggagtttgygggtygggygttttttttygttgggatyggagygygtagtyggggtgyggggygtatagtatataaggtygtttygaggagttagggagttyggaygygyggagtatygygtygttygttattagttygyggtyggtaygttagtttygggtttgttggagtatttttatatttttgtttttattaggttgttagggagygtttttgtttattgggtagygyggygtttttygyggygayggtgaygygttttggttttgataagtttggttttttttattttatygggtggygtygttgttgattttaygtttagtygtttttattttygtttgaaattttttygatagggtttygtttygggggtttagtttttagygygtatatattygygtggtgtyg

SEQ ID NO: 6214 - DNA, 1967 bp, Artificial Sequence
  Description of Artificial Sequence: Synthetic polynucleotide
gygygtygtttttgttgtttagtygaatttygttttttttagggttgygttgtayggggttgttttttygagtygttagygttyggygttttttyggygygttygttttttttattttgtgygttygyggyggtgggagtagagtyggtyggtttttggggatttagyggtygygttggtgatgggtagygttttttttttaaaggygggyggyggggygggggaggtygyggttygggtggtgtygtygtaygggttyggatttygagggggaagtggtttgttagtttyggtttygggaagagtgaataataaggttagggtagtygttttagatygttatatttttgggtttaataaagttaggatygttgttttgtttttttygttttagaagaataayggtttgtaaaatggggtaaaatgggtagaatygtayggtygttgttgttggtgtgatygttgttgtattttagtygatatgaygttagttttttatttgttaaattgttggttagttgtaaagtttattttyggtygygagtattgaaggatgggagggtygagygtygygttttgataggaggaagtgyggaggggyggagggygaggagggygtgattggggttgtttggtgtgtgygygygygtgtgygygygtgtgtttttataygygtygygtgtttagtgttgtayggggygggagaagaatggtaggtagtygttygaaatatttygttttgttttttttttttgggygaggttttygattttggtaaagtgtgaataatagggagttgggaggaagatagtagtgatgttgtygygggtggygggggttgygtygtygtttagagaatttyggtagtgtgtagggaggtgtattttattttggttatttttatttyggtttttttggaaaatttttttgtgygtgtttatttttttttttagttgttatttttttatttttatttaaggatttgygttttggttttgatggaygggagggaaggaagaaaagtaggggtygtagagagttgggtgggttgggyggatattttgggyggggggygtgtgttgggaagygatygaggaaagtygggyggaggggttgtgtgtygyggtygtagttttaggtatygttgtatttgttttggayggtygattttyggttggggagygtayggggygggttagggagtatttagtgygtttttttygygggyggtataagagtagygttyggtygtygtttttagttaattygggttttttttayggygattaattagtgygaagttggttgggygggaagtygygagaggtttttattgyggygygggtggyggttaggagttgttaggatagtttttyggtgttttagtttaayggtttygtttatttatygttaagagaaatttygttttgyggtyggtttttygtttgttyggtagttttygaggaaataaaatggagattaggtggttatygggagtgtttttggttyggtygttygtgttygtttattttygttttttttaygtygatttggagtattttatygttttygttagygtttattttygygtygyggaattygggtttgagygygtygtyggggagggtattttggtaggtatatttaygygygtgygttgatyggtygatygygggtygggggttttattgayggyggggyggggtygtggtagggttyggagaggaggggtggggattaagtttagttygtttggttttgggttttygttgttatttgggygggggttatttyggttatgttttttttygyggtgttygtgggtgtygygaygygatttgtttatatggggygggggaaggggggtgtttttgagatattttygttttygggtgggagygtgataatggagttyggatatttggtgggttttttgggggatygtttggyggttttttttattatyg

SEQ ID NO: 6215 - DNA, 2558 bp, Artificial Sequence
  Description of Artificial Sequence: Synthetic polynucleotide
tygygatagttaaaaaygggtgtttygtttygataatagattttygyggattttttggtatttggtttattagygttygygaattttgtttygggagatttattgaaattyggatgtttaagtygggaggygygtagtaattaggaggatgagagggtygggtttgggttaggaaagyggttttttaaaatagatgttagggggattgtagtttygagttatgagaaaaaagttaaaggygagatgataygtattgaattggggtaaatattggaagaggagataaaattgygtgtttgagtatyggggtgyggggagggggggataaaattygtatttagtgtaaattaaaattttgggagtaggtgggggttgttgygygttttttatttttagtttttttattaaggattttgagtttttatgtatttttgttttttggttttttttttttttttygttyggtyggtgagaggyggtygtyggygttttagtagtagttagatgttaggygaagttyggagygyggagygtggggaagggaggggaagggaggggaggggaaaggaggggtggggyggggagygygygygggttyggttagtgyggggtggtgggygggttgagttyggggayggygygggaggggggagggaaggggggtagttgtgggtagggagtygggttyggtygttagtattaaagatggagaggygtyggggttttgtaggggagggggttyggygttgaygtgggaygyggyggaggygtagtagtyggtggtgatttgttaatttygtagtagagaggagttgagggygatgagagygggtattgygaattgtygggygatgttgtygttgtygtygtgatayggagagtaatagttttttagtaatattttttttygatataggtatatatttttygataggtaygtatatttattttatagtgttyggttyggttgyggtgagtgaggggtygggaagaggygtatygtttagygagygtygygygtyggggtttttyggggttggagaggtttggggggygygygttygtttyggttattyggtygttgggtttgtgttttttttatttggygtgttttttttttgtygttgtagtygtygtygttatyggttgggggtyggttagaagggggagtttyggttgttagtttgggygtagttgtttttttagttttttttttttagggtayggtyggggtgagaggtggggggygtagyggtgtgygggggttgagggygtgagtagaggggtyggggattyggaggttttgtatygttaggggttggyggagtaatagagttygtgggtgtttttatgtatgyggatyggtgygygggygtaagataaggttgtggtttatttatttgtgtgtttattygtyggtyggttgggaagttagaatyggaggagttgaygagtagatttgggggyggaggggagtaggattgggattgtttaygttttgtttttttttgagaaaaygtggtgggtttttttttgattggatttgatttttattttttttttgtaggggagggagggaagttttagagggtttgtagygttgygggtttttttyggttttyggygggatyggyggtgatatyggagttygtygtgygttttyggtygttttyggtgggtgtyggtttttgtatttgatgygttygggatgttttttttattttggygygttygtygttagttygtatagygtttygtatattttygtaygygtttgaaatgygtayggtttygtyggttygyggaattattyggaygtayggagygtttygtatygattygttygtygttttttygagaygttygtatygtgtttgggtygggygygttggtygttggygtygttggttagaggtttgggatttagtyggtygtttttagggggttayggttttgggtyggagagggagggygggtagattttttttygtttttttttttataattygttgyggggtttttgtgtttttttttygtygyggggygggttygttttttttgtygttttygtygyggagtttagttygttyggattgtygtygttttttttygtttttttygttttttttygtttttagtttagtttttttttttttaggagtttagtttttygggaaaagttgtttttttaagtttgttgaagtygtttttaagtttyggtgggggtygttgggaattgggggggtgtgagagygyggtygattttyggagttygggygggttatygtyggttttttttygygtygtttggttggaygttgtagttagygttagtyggatygygggygtygagyggygggtgggggagayggttgttygtgggygtttagattttttttaggatttaaaaggtttgttttagggygttaagtttttatttttttggttgtttttttttagtttttagaaatttygatgtttgygggaaagtaygyggtggttyggttyggttgaatgtttattttaattttgayggttttygtttttatttyggggyg

SEQ ID NO: 6216 - DNA, 2558 bp, Artificial Sequence; identical to SEQ ID NO: 6215
  Description of Artificial Sequence: Synthetic polynucleotide

SEQ ID NO: 6217 - DNA, 1508 bp, Artificial Sequence
  Description of Artificial Sequence: Synthetic polynucleotide
tygtttyggggygagaaggagaaaagttagagggttgaataggtgaygttgagtttgttggagygtgtgtgttttattaygtaagggygyggagttyggtygttttatttttygttatttgygygttygggggtaygttttttgygatagtttggaatttagattatttgygtttgtttggtttygatttagtgtttaggtggttttagtyggaaatgtttgtttttttttaatttttygatttyggttgtttygyggattaggtaygtagygttttagtygtaggtttggatatgtyggatatttggatttatttttagtaatttttttttttygggaagagggataygttttttagtttgaagatttgtttttaggtttaattggttaggygyggaagyggagaatttygtattttggggygygttgttygaggtggttayggtggygtattaagtyggggttaaagtyggggtagaggggtggggtagggtygggggagggtgatttttgggtttggagaataaatttgttattygagggatttttagttttygggatttttattatttttattttgtttttagttaatgygyggataagygttatgyggtgygttaatattygygttagggttggggttygyggygggagagggaygtayggatatagyggaggaattagtygtygagttygaggtttgaataagtaaggatttttaggttaagagttayggtttgaggatttttygattyggagggtatttyggggttttagtgttattaagtygtaggaagagggtaaggggttgggggaggggtttagggtagaattgtygtygtgtagggagtagggagatgaggggtttttttgttattatttttaygggygygttttaaaayggtagaygygggtggttggyggagyggtygggggttgatttttattyggtttttgttagggtgtttgttttttttygttgygttttattyggggttttgtatttyggtyggtttttttaygtatttggagttygtygggtatttygtttygtygttagtygygttattttggtttygtygttttygtygtttagtygttygygtaggttttatttttgtgtaaagagtttaggagtaggaggaaagttattagttatatgttataaagaggttttatttttyggggaggtggttttgtggtyggtygtgyggtagygtttttttttygtttagygygtttttagtygttygtattyggygtttygttttttttgttttttagtttagygttyggttgyggyggyggttttttttttttyggtttttyggtttttgttattygyggggttgggttaggyggtygtttttttygttttttygyggtatttygggtggtgagygtygygygagttyggagtttagayggattttagttttataagtttaggaataggagyggyggttygggttagatygtttygattyggtttygttgtttgagaggyg

SEQ ID NO: 6218 - DNA, 1119 bp, Artificial Sequence
  Description of Artificial Sequence: Synthetic polynucleotide
tygggygygtaggyggyggttagygttggagttttagttagttttttttttttaygtgygygttaggttttggttattttggtaattygtttygtttagayggtattaggtagttgaatttagttttttgttaygggggaaaatgtttttattgaagygtyggagygtagtttttgttttttattgtaagyggygttatyggattttatttgtaaatttattagtgtgygttygyggggagggggttygggaattygggttygggtaatyggygtygtatgttaattagggggygttygttttygttttgttygtggtttttttttttygatttttygaygtttygggaggagtggggtyggagygtagggttgggaagggttttaggatttaggaaggagaygggtgttttttagagaggattttatttttttygaggttygggyggttttyggtttttttttggggtgtygtagtttttttygattygttttttygtagtygtagtygttygggtttggaggtggtygggtatyggtgtygaygtygygagggtagygttygyggygggaatattaatgtattttaaagggtayggtygtygtygtagtaggtaattagttggatygyggyggagygygyggaggtggttgttggttgtaaggattgygtttagttttygtttygtttttygaggttttygygtgggtyggygggtagtgygtgggttataggaagygggttgattggattyggtttaggatttygtataagggtagttttttgtttatagttttttttttagtttttygtttttttttygtttatygtttttttttttyggygatyggtttygtyggttgygggggggtggggggggtggggtgttttgtgtagtygtttattttttgtttyggtttygtgttttygttggggattgtttgyggtgagtttgtygtaygtaygttagggtygaggtagtgatgyggggtagygtgggaggaygggttgyggagttygygttattttgtttgtggggagygttgtgtttgtttttttgttagygygtttagttgtttyggtygtygttaygygggattgtttgttatgtygttatyg

SEQ ID NO: 6219 - DNA, 1119 bp, Artificial Sequence; identical to SEQ ID NO: 6218
  Description of Artificial Sequence: Synthetic polynucleotide

SEQ ID NO: 6220 - DNA, 653 bp, Artificial Sequence
  Description of Artificial Sequence: Synthetic polynucleotide
gyggagaagttaggagygatgaggggyggggyggttttyggygtttttttttttagtttygttttygygttgtygtyggagagggattyggggygtagtygtttygtttttgtyggggttttaggaggaatttaagaaaagagagatggagggaggaaatggtatygttttaggaaggggtaggatttttaggatygaaggygttttttttttttttttttttagygatattgggaaataaagtttygyggttgaaaagaatattaygygyggttaggattygagtagggttttggggygttaagggyggggaaaatagggtattyggagtgtaggagattttttagggtygttttttttttygggggtgttttgaggaatygyggyggggattygtygttggtagtttgygggttttggtgttagygygtatgggygggttgtgyggaygtggttggttttttaaaggttttagatttygttygggtygtttagttttttaaagttgtgttttaaagtttaggggagatagygaggttggggaygtygggaagtttttttgaggtgtggggtttttgagtagaaaygygygggggattgttagggttgtagaaattttggttygaggyggtggttggttygttttattttyg

SEQ ID NO: 6221 - DNA, 1768 bp, Artificial Sequence; identical to SEQ ID NO: 6211
  Description of Artificial Sequence: Synthetic polynucleotide

SEQ ID NO: 6222 - DNA, 1101 bp, Artificial Sequence
  Description of Artificial Sequence: Synthetic polynucleotide
gygttaagtyggttttttaatttggtttgttgaaygtaaatygttgagagtttgttgtatygttttttggggtttttggttgtygagtttygttaaggtaaagaygttagtaagygaggaagygtagyggaagaaaaataagygggygygygaggggagttttaggagggttgtygagtggttggtaggyggttttygtttttttygggtggtttygtyggyggttgayggttyggaggaygygygtttygaaaagttagatttygggyggyggygygttaygtygygttttttygygtttttttttygttgygtttygggaaaggaatttgttttttyggttttaggattggggagtgtgtygyggggtygagggtggggaatagttagagggagaygygaattaggtygttggyggagggtttagggggagygtagaggygayggtttttatgtyggyggttaatatgatggagaatyggtygttgttygttttgtaggtgttygagtygtagggtgygttygagggtagttyggtttggtttagttygtygatttttaygtttygtygtyggygttttaagatgygtygtatgaagaaygtataggagtagagtttggaggtygggttggttygggatttgttygtygttttggttttyggtaaggagtttttgtagttgtygtttatygagattaygttttttagygaygaggatatttygtggtttaattgttttatatttagygygttttygygtygaaaaygttttttttttygtaagtggttgagggtgagggagyggaaggagtgtagtgaaagtaggtaygttttygtttygttygttttttttttttttttttygttttttttagagtygtttagggtttyggggtattttgggggaaaygttttgggggagaataggagttygttattagaggygtttttggagggygttgygtttggttttagggatggtggtatttagtttttaygygtgttattygttttttaatttagggtgaggggttttatgttgtaygataygtttaygtggggttttaygttgtattttattttttttgattttygtagyg

SEQ ID NO: 6223 - DNA, 1101 bp, Artificial Sequence; identical to SEQ ID NO: 6222
  Description of Artificial Sequence: Synthetic polynucleotide

SEQ ID NO: 6224 - DNA, 2341 bp, Artificial Sequence
  Description of Artificial Sequence: Synthetic polynucleotide
gygtggttyggagagygtggataaggtaatttgttttggatgttygggagaagggagttyggtygaaagggtttagtttttygaggttgttttaattggggygygyggyggtttaggagggaggyggggaggttttygggttgggtyggggaaygtyggtttttaggttgggtagggaggayggtttagagygygggttttygggttttatttygggaaaagtttgggtttgttttgygttgttgygtgttgygtttttgggatttgttgattgttttagagggaaygtttygyggtagtgttagttttttggggattaggaagggygatttttgtttgggagttagtgtttgggtygtygggttygggtaagygttgggggtttggttygagaagatgyggataggtggtttagggygtygyggattttygttttttgygggtatygggagtttagggtygaggygygtygtttygaggggtttttttttttaataatgygttyggaatggagttygygttttgatagygygggttagttygaaatygtttagaattygtttygatgagtgggtgagtygttttgggagtttgtygygtttyggtagyggagggtttgagtggaaaaatttttattggatgtattttttaatggttggtttgtttyggttttygttygagtttttttyggtagtaggygttgggttattygtagttttagttaattttttttttatattttttttattttatttttaaaaagtttgttttyggttggaaaaagtattaatgaaygtatttgtgggaagaaayggaaagtgaatgagttaggagggttattttyggttaatygttttaggaaaagtaaagaagttaaaggtttttggttttggattttgggggaaggtgatggggggaggtttagatttygggaattagggygyggaygttgggygtggatttygttattgttttyggttagtttttattttttaggagtaagtattttgtgtgygtagygtatgaatgtgtttgggtattttygygtatatttatatagtgtgtgatgygaaaagtaggattagtaggggaggaagagggggtgtggggggggagggaagatgagggagagtagaggggagagaagagagaggagagttygaggygagagagagagagagagagagagagagagagagagagagagagagagagagataggatttttttttygattygtaaagtgaagttattttttaaaattagttgaaaaaaaagttttattyggttaattgtttttttygtttygttataataataaaygtgtataggggagtgagggtagggygttygtagggggtaygtagggagggtttagggygttagggaggtygygtygggttaattygaaggggttgygaggttaggttgtaatygggttaatgtgtggaatattggggggttyggttgtagatttggttaaatggaygggattattaaggtaagyggyggggtaayggaygygggyggyggggatyggtyggggaggygaagyggygggygggtaggtgyggggttygygtttyggaagaygtggtttttttttttttttttygygtttyggtttygygtyggttttttyggygttygggtggygagttttattygygggttagtyggttaggygttygtattgagggygattttttttygaaattttagtttttaaagtggagtttyggttttttttttatttygttgttygtyggggttgtaggaggggayggygggaaatygggggattttagggtayggaayggagttaagggygagagatttyggggtttattatttttatygatattyggggttttygtggttttagygttaggtattgggtttttttttygtagaggyggaatayggygggggygggggttgtagtygttygggttygggtttttgtttggtgggttttggggtgggtaagtggtttygttgtaygagggtaggggtgtaagtgagtgtgtygggggatttatttgagygggtttttttagatggaagtttttgtttatatgttagygttttttttttttttyggtatttagtygttyggttttaggygttggagagtygtyggtttygygggatttttgggtyggtttygtygttttttyggyggggaattttttttagttttygttygtatagatttttagygtttygagttttygtttttygygtttaggygtgygtyggttttaggattagggtttttggagttgtygttttygaaagggttttgygtttttyggagtygttttygttgtaggggtyg

SEQ ID NO: 6225 - DNA, 3857 bp, Artificial Sequence
  Description of Artificial Sequence: Synthetic polynucleotide
gygaggggyggggggyggggagggaggygggtygyggygttggtttyggggttygyggtayggttttttttgtygygttgtttagggttyggattttgttyggygttgygtttatygygagggtgttagattygtygygtygtygtygygtttttttagtygyggttttttttttygtygtttttttttgtttttttagtttttttttttaygtgtggatgaygttaaaatttygygaaaaagtygygtggtggtttttygagyggaggygygatttygtygtttagyggttttttttygggggygtttggagggggagaagggyggaggyggtyggtttttttttttttygggaggtaggatttttygaygtygatygtyggaygtttttygttttaaagtttattggaaaatttatttttgtaaagtaaatgtatttttagagttattttyggtygygtgaggygtgttttaagttgaattagataggaagagggggaagttygggttttttaatttttttttttttygaagggaggggagtgagatgttaggtgggtgatagayggtaggygttygtttttttaatttaygtttgtygtatttgtygttttagtaatttagtttygtttaagtygaaattygtygaagggagtgyggatgtataggtttggyggattttgtttttttttagaaygtagyggtttagygtttyggygggygyggttgygattagagggtttyggaagygagtgaatatttgtaatygtattgttygtttttatttattttgttttttygtgtttttygtttttygaygttttttttttttttttgttygtatttttttattttgtttgtattttttttttttttttgatgtgttttttatgtgttttttyggatttatgtgttttttygtattttgttagtygggttttyggttttgattgatygtttatttttttayggagaaatataaatatagttttattttttgggggagtygaggggaaggtagtggtttttatttttgagtttgaatttagttattattygttttttatttggtttaggygtttttgygyggagaaggygggattygaattygygttgttttygggttttgagtygatygyggaattatttggttgggaggtattttttaggtaagtttgggagtatgtgtgtttagtgttgtaggtttttgtagaaaagtgtttataaatatttaatattttgttgtattttttatttttaggttttgtatattttttaatygaaattttaaaaygttagygtagagggtggggagtyggtyggaaaaagaataaaagtttaataaaattggygttygttaaagtttattattagttttatatgggatatatatatatgtattttttttttygtgaagggtgaaaaggagataaggaagaattaataatttattttttttygtygttttttattttygygttayggtgattagtttggattttaaagttagagtataggtttttgygtttttttttgaaatygaagtttatattgaaagaaagtgtgtatttttgtttagaaggtaatatgygttttttygygtgttaggtggagtgtattttaataagatattagggttttaatatatggttggagtggygattaaaagggaaaatttagtttttagtttaagttttttagagatatttttgttaattttygtatttttttaygttttattttaygtgtgagagtttgtaaaattatyggggattggattygatggygagttttaygttygggaatagttagtaatyggaaggggaagtggataggggaattttaagaggygagtttgttaygygggaagygttygaatttgygggtttttatgaatgtagagggygtygggaagggggggtattyggtygygattttttttgttttttttattygttgttttttttttygttggaatttttttgtaaagtaagayggagtagggggagggggagagggaaggggygagagggttttyggtttattttygagaygtgaggattygttatttaggtatttttttyggggtgggttgggtttygggaygattattygtttttttttygttttygttgtttttatttygggagatttagagttttggatgttttttttyggagaagggggggtgtgyggagtyggggtggaagagattttgttygtagagttatattaagtgatgtttagaggttgggagtttyggyggtttttgttttttgtttgtygggttagatttatattttaaaaatatttttygttttttttttttttttygttttttttygttgtaattttttttgattygtttaaaggtggtttaggtgaaattggagtaatttttttatgggggttttaaaatgtaagtgaatgtttttattyggggtgatttaaaagtttaagtygggaagtttaaygtgattaaaattaataggtgattgttyggggtygattgtgtgygggtgtatayggtattyggttygggtgttattygyggygttggattgttttattttgagtttgtaatttgggttttttagygagttttttttttttttgaaagttaatggtttttatagtaattagatatttttttygttygtttttttttttttttttttttatatataggagatgggatatttattttygttgttattgataaggtyggaggyggtygggtttttttttagttttygttygttttagygttygtttttttttygtttttttttggtttttttttgatgtagtggggaaygygttttattaaaaaaaaaaaaaaaaaaaaaaaaaaaaagtaatttgttyggtaataattagygygtagtagtaggagttttagagttattggttatgtaaatagagggaggggagayggygttttaaatttttttttatttttttaaagygatattttttttttttttttttattatttttttygttttattttygtttaaagaggttggtttyggggtttgagttaatygtttgtatttttagtttattygtttttttttttygttttgtagggaatttagtgtayggtttatttagttygygttttatttygttttgttggtttttygygtttttgttygggttttttttttyggtgagggaggtatttagtyggtttyggtgtgtttagagagttygagttaygttatgttygttgtaygtgttagtttggttagtatattagggygttggtttttttttttttttttggagtgaaatatattaaagggygyggtgggggtggggggtgaygggaggaaggaggtgaagaaaygttattagatygtattttttgtaaagatagttttgatttaagtatgygttagagtaygtgttagggtygatygtgttggyggygattttatygtagtyggtttttagggagaaagtttggygagtgaggygygaaatyggaggggtyggygaggatgygggygaaggatygagygtggaggttttatgttttyggggaaaggaaggggtggtggtgtttgygtagggggagygagggggagtyggatttaattttttattygttttttttttttttygggttattttttagaaagttgtatyggtgtggttaygtttagygtagatatttygggyggtttgttagtagatgtaggggygaggaagygggttttttttgygtggtygttggtygygggggaatygttgggagttttgttttyggtttgyggyggttttagaygttgtatygygtygttttayggygttygaagagtttttagaaataygatggtttttgttyg

SEQ ID NO: 6226 - DNA, 1439 bp, Artificial Sequence
  Description of Artificial Sequence: Synthetic polynucleotide
tygttattatygttattttttyggaattttttgggttygygttagttttatttggttaygattyggtaggygaaggggtgyggaggyggttttattagttygtttttagttttgtttygagagagaagttygttgagagggtagatagttgagaaattygattttaattttttagtyggygtttttygaatygtttygagagtttagattagtygggtagtggatttyggagtaaagtgttatgtatattttggagaggagggaggygtggagggaaagggyggtaaaaatgaaatgtttttaagttagtttygtaatttttttyggttygagggaygggyggagggtagaggaggtagyggyggttagygygaggtgagggatttatttgaaggtgaggaygtagagyggtyggtaggatttgtggttggtgttttyggttatgtttttgttttagaagtygttggtgaagatgttttagyggagyggggygtygggtygtaygtyggggttgtttaygatygtttataygtygtygtgtaygaattygttttgtagggagyggtygtagtataggtagtttgtttyggttagtagygtygyggtttyggtyggygttagttygtagtttygtygtygggagggtgtgyggttttygtygtygtttygggtagaggtggttattattatygygtygtygtygtygttgttgttttggtttttttygggygtttggtatttttttttatyggggtttyggyggygygyggygtttgttyggaggggggttygggtatggtgttgyggtagttggattygtygygagtttttygygtttygtygtygtttgygtygyggagttggtttagttgtaaataaatagtagttttttygtttttttyggttatygttatttttttygttttattgygtatgttygttygtttttttttttatygttttttaatttygggaygygggtyggttttttygtatagttyggygttttttgttttyggttygttttgtttgtaggtggatyggggttygyggygygyggttgttygggagttgyggggaaggatattttaggtttttatttgyggtgttyggttgtgtttatttttaygttttygtttttatttttttttttygaatggggttgggaaggggtatatttggyggatttttttygggggatttaggagggtttagtaggtgygtagtttggaatttttatatttattttttagggagaaaagtgtygttgtttttygggaagttttyggttttttagtattygggataatagtagyggygttyggagagaygttttttattygtttygygttygygtttagtygtyggttttgtgtttttttgttygggtttttttttattygttyggygyggygtttygtttggyggaggaattygyg

SEQ ID NO: 6227 - DNA, 1288 bp, Artificial Sequence
  Description of Artificial Sequence: Synthetic polynucleotide
tygataggttgtagtygygggttatttyggaggttaaggtagttatttttgtaagggagttttgygtttaagtatggtttgttygtttygtttggtttttattaataaggtygggattagyggtyggtggaaygagygagagtagttttagttttataggtgagtygtttttataagtagttaagtygygagtygtttyggygtygttatygttygtatttatttttttatttygggagggagatgggaggygtgggagaaygyggagaggygyggygaggttgggagygggagayggygtygggaggygggaagyggattagagaatgggagaagttyggtaggtggataggaggaaataaaatttaaaygttttattttygaagtygttaggagttgagygaaggaaggagygaggtaggaaagygtggygttttaaatatgtygygggagyggygygggaggygtagaatttyggagtttgtagtttagygygyggggttttagyggagygygaggaygygagyggagttttttyggttatttgtgttgttttygttttggttgtttttgtttygagggaagatgttygagtattttttttattttatttggtyggygaagtatagttyggtgaygatgtgtagagttttttggtatagattgtttatttygttttttttgtggaaatttatygtttggtttttttttygtttttttttttttttttagttagtygttttttttttttttygtatttttaatttttttggygttttaagttatagttygttygyggtgattttggttggagattgygtygttgagagtyggtaatttttaggagttttaygttggttttatggygggagyggagggygtaggggaaggagaggygygygaggaggttgyggttgtygygaggtttgygttaattttttygtygygygagygagtygaggygygttggaattagagattyggtatggagtgttgaggggaggggggagtygtaaaaaagttaaagtaagttttygattygtaagtaygttttttttttttttttagygtattggtgtttttggygggtgtttggyggygaygygtttaatygtagttyggygygggygttaggtgataggyggyggagygygtagattyggtttttygygttttttgaagaagggattygtgagggagggagggagggagggygggyggttyggygtttttgtygaggtyggggatgtttatygttgtttagagttggttygaggagtttttttyg

SEQ ID NO: 6228 - DNA, 1006 bp, Artificial Sequence
  Description of Artificial Sequence: Synthetic polynucleotide
gygygtgaagaatttagattttttaatgygtatattatttttataygtagggtygaggyggtagygyggttyggagggggttyggagggaggggtyggattygtttyggygyggtttygtyggggaattagttttygagtygaataaaagtagttaaagattygtatattyggtagaaggggggyggttttaagaaagttygggttggggyggtttygtattttttygtttttttygtygttygaatttgttgtaaaggtagagataatggagaaagtttygggagaygygyggagagattgtttttttggggagggaggggygggtygggggaggyggggtaaggaggagggaggggtygtygagggygaggtyggygtttagygtyggtttttygtayggttttttggatgttaaattyggtttagggagtttaggagtygttgtagttttagtttttttttttttttttttygatgattygggtaatgttaattttttttygggattgaaagttttaaatttaaggtgttaagttgatgggyggtttttgtttttatttttygatttygggygygtgttttgaaagataggagagaaaaaagattatttagttgtaggaggtaaggttggagygagtagygttygtttgttttttaagtaaaggagggaagtttatgtgtattygtgtattgggtttyggagtagtttyggggtgtagggtattttttttttagggygtgyggaggaaggttattaaaataygttgtattgtygaggtggagttgggtaaagtaggtagagattggtggggayggatggygagtttgggaagtttygggtgttttggtggagaggttttttgtygggggyggggygttggagagttttttyggygyggagagtttttygggygyggagagygtagagaatttggttaggaggtgttggatagtttyggaattygygygttttttgttaaataaagygtggagattyggattyg

SEQ ID NO: 6229 - DNA, 1185 bp, Artificial Sequence
  Description of Artificial Sequence: Synthetic polynucleotide
tyggttttttttgggygtagtgygtatygtyggygtttttagatttttggattattyggtttgggggygygggygyggttggggagggaggggagagttggtttatttggygttgaaggttggaaggtatagtttyggtttttyggagttyggttyggtagtttygtattgttygtagagggattgagtatttgaaaagtttatygygtttygtagggygtttyggyggggttaatttgttyggttgyggggtatagttttaggggaattgggttagtaggtaggggtyggagttgygygttygyggtggttagggyggtygtygggtygtggggygygggyggttgtagtttgggygttggggygttttygattygtagtaaattttygattaggaaatttttgtttaggttgttaaagtygggygtagyggggaggttgaggagygyggaggaagttataaygttttagtaygtatyggygtgggttgygatygygttggggagtatagtgyggygttaatyggtttgttgygygttygttttgygttygtttgtygttygggygtttygtatygtatttagagtygtagtttttygtygtygtttttygtagggttggagygygyggagttaggtagggaggaaaggttattygggayggyggyggatttggaaygatattatttatttgygttgggygtttttttaagggatgggaggagtgagtgtgggagggggaagttgtgagtttttttggtygatagygtaggttttgggagygtaggggggagtttttttttttttttatgtagatttggaygggttttttttttgttttttgtttttttttggayggayggaaggtgtgtttagtttatttatttatgttattagttttataaagtgatagaygyggttaataataagggtagtgttgtggtaaggggaggggattygtagtgggaggaggtgggygtggaggygaygtgaatygggygygttygttattttttygttgtygtgtagagtygtggtattttygttagagtttaagtagttttttaggygtggggtttggtggaygttggtttggagygttyggagggyggggtgggggtgggggggaygygttgtygtttggggtgttttygygtatttttgttgggygaattttggtttttyg

SEQ ID NO: 6230 - DNA, 409 bp, Artificial Sequence
  Description of Artificial Sequence: Synthetic polynucleotide
tygtttttyggggaaggggtttttgaggttygggtggtygtttgggtaatygtagtttgtttgygttttttttttttttygygtgggttttagtaatatttattgtagtygggttaggygagtyggygygtattatyggygyggggggaggagagggtygggtttgggaagatgttgyggaggaygttgyggattygygagttyggggtaaggyggyggygtatygttttttttygtygttttttttttatttygttttttatygtygtttttagttttttttygggatgagagagagtygygttgyggagtaattttagtggatgggttygygggggttgagygggyggaggaygygggaatttygtgatatygattagttgaygttgttygygtgaaattagagtyg

SEQ ID NO: 6231 - DNA, 1813 bp, Artificial Sequence
  Description of Artificial Sequence: Synthetic polynucleotide
gygggyggyggaggagggttggyggttagatatagtatygttggagtttagagagtygggtagaggttggyggagagtygaggttggtttagtttttaggagatyggygagttggggtgtgtgggagygggatgtttttaaggygaaaagaagygttagtttygtaagyggtttttatttgggttgtttaggtyggatgtttaggagtttatagtaggggggatggagygaaggatygaggggttgggaggygaggtygtagygtattgaygtaggttagygaggtygttggtttygaygtagggygttyggtaaggtgtttggtattaygagagttaatttttgygygttattttyggaggttagtgygtttagggygygtyggttyggtaggagggtgggtgttagtttttttttttatttttygagtttttttttyggygtttaygtgggyggagtagygygagggtgtgygtggtaggggtygyggyggygtgtgtygtgygtggggtggggtgygggttgggyggtttygttttygggtttygygtygtyggggygyggtttttagttttattttttttgttatttgggyggagatttgggggattgtgatttattttgyggaagatayggaggggaygggtyggttatatttttygygttatttyggtaggtatygggtgggtttttttttygttttttggtttgagggyggaattyggagaagagtggaaataggggtggygtgaaggagagttgggggttgggggygggatygggagggggtgttgggggaagygaygtagyggttgggagattttgtaagggggtttgaagaggagtgggggatgggtatggaagggtgggggattattgaggtgggatgygagagtggaagggggatttagagggggygygatggtyggaggagggggagatggaygatggggyggggyggtatyggtygtygygttttttgtygttaggttygtttttyggtygtygggtttaygggttttttttggttagygttygtttttygtttttyggygtatttgtatttatttgttyggygtttaggttygagtygggtagtagtagyggaygtagygagygtagtttygygtygtatttttyggtygtttttttttygttgygagtttaygtygttgtygtygtygttatygttttaaaaaggataaaayggaatagaaaatgaatgtatgtataaaaaaaatygtaaaaagtaattgaggaggatggtagtygygygygyggttyggyggggygggagtygagaggtygyggtattggtggtygygattygggtaggyggtyggygygtgtygtaygygggtggttgtagttttttyggtygttygygttyggtttaggtayggtatygttttttttttyggggagttttttygattggtttgtttttttgttagttaggtaggagggygyggygttygtttygtttygttttygttttygttttgggtagatgtygggagtttttttgtygtygtgggagggggagttgagttgtyggagygtgygtattgggttagygggyggtyggggtagggttggggtttyggygttgagygtttttagtygygtygggtagtttggygtttygttgagtyggagtaattttyggtaggagtttttaggttttggttaagtttygggattygggaagttatttttgttttygggggttygagtttggagtggggtttgtaggtaaagyggggttggggtygttttggtygttagtggttaggaagaygtagygatttyg

SEQ ID NO: 6232 - DNA, 1294 bp, Artificial Sequence
  Description of Artificial Sequence: Synthetic polynucleotide
aygtttttttyggatgygygtggagygttttataggatygtygttttttgygygttggygygtataygtttttygttagtttgggygtygggtttygaattttyggtttgtaaatttgygtattttttttygtygygttygttagataatttggygaatagttygttygttygtatttygtttttttyggttttttttttaaattttaaaygtatygtygtgttttaaagaaggtgtttaygtygtttttagatttyggagygttttttttttattttygggattttttaggtygtttatttttttygtttttygtttagatttgagagggatygaaaatatattttygattygggtagttagggtygaaattgttaagaggagaaaaggtaaagyggaaggagggtggttataaatagatttttttgtttttttttaaaaggatattgtygttttaaaagtttttttttygggtttttatttttygtattttygtattttgggggagygtatttaattgaggtaaygtagtttttttttagtgtttgtagaaaaattaaagttaggggggtgagttygtyggttgttaattttttygtygtttttttygttttattttgttttygtaagtygagaaygggttgtaaaagtttgtaatatttttggggggyggaggggggaggggaggggggtttttygggttyggggygtygtygtaggttygygygyggtygtyggatttygygtttygggygttygttttyggtygtttttygtttygygttygggttttygtygttttttttttagtttttttttagttttttatttttgttggtgttggaatagttttgtttgygtatyggggtaggyggttygtttttgygggyggatttttggtttagyggggtttttttggagtyggyggtygygttygygtygttgttgtttggttygttggyggyggggtygggggttgtyggagttgattttatgtttttttttaatgtagagatygttggagatggygagtttygagattttttttattttttgtttttagagtaattttatggtattaaaaaaaaaaaaaaaaaaaaaaaaaaaaaaaaaaaaaaaaaaagaaggagaaggygatyggygaaagtaggagggaaaaagtaggyggyggygggygggtaagtaaaagygygagggagygygyggagtgtttgggtggaygtgtgtgtgygttygaaaggggataagaggygggtttggttataggtagygttagygagagtttttttagtyg

SEQ ID NO: 6233 - DNA, 939 bp, Artificial Sequence
  Description of Artificial Sequence: Synthetic polynucleotide
tygatgtygagagtggttttgttggagaatygtygygtttgtagtttttgtattttttttyggagttgygttagggaattayggaygaattggaaggggtygagaagaaaggttttggttattatttttagttttaagttttttygtttttttagattttggatttttttyggggaggatttttaggagttttttggtagtttttygtygtttagggtygatttttttatttttttttttattttyggttttygggygagggaggtttygygtygttttttagattggttgyggtyggaagattgtagtygttttgagtttattttttgtttttttataattaaggagtatggtggagttgggttaattttaggtatagtttagtygagttaggygaggtttagagagatttgattygtttggtagttttaayggatttgttttygtagtygttgyggatttttyggtygttatggygattgtgaaatgtggggtggggygtatgygttggaagttattygygygggtagtttttgagtgtttttttaygtgttttttagygygagtagtattttygtttttgygttttttagagygtgtagttttyggtgagggtagttttaygtatagttttttatattttttttagygtttgtagttttyggtgygygtaggttttaagtttatatgygtagtttttattttgygygtagttttatgtatagtttyggaygggtttttagttttattggygtagaatttattatygtttgttttttaygygttttattgggagtgtagtttttatttygagygygtagttttaygtagtttttttatattttttttagygtttgtagtatttttagtgygtatagttttgttagtygttttttygggygtygtttttgtattatttyggtttataattttgyggyg

SEQ ID NO: 6234 - DNA, 939 bp, Artificial Sequence; identical to SEQ ID NO: 6233
  Description of Artificial Sequence: Synthetic polynucleotide

SEQ ID NO: 6235 - DNA, 899 bp, Artificial Sequence
  Description of Artificial Sequence: Synthetic polynucleotide
tygaaygtagttaygygtttattggttttttgtttttggygtttttgggtaygggggagttggggyggtttygtttgygtayggyggtgtygggattgggggygggtaygtygttttygttttttaygygttygttygttygttygttttygtttttttygtttygagygattttttgttttagttttgtaggtttygtattgtagatgtttgttggtttttttgygttyggyggttttygyggtgtttygtaagttttygtgattttttagtattagtyggttgtgygttttttgtttttaygggtyggttagtygtagatatttatttagtttygygagtttagtygtttagygagtggggtagyggggatygagayggayggtagtygtgttagagttyggggygttttyggatgyggtaggataagttgatygggtttttgaggygyggggggagatgtttgaagyggtagggyggyggygtgggtattattttgagtaatgtgtttaagaagygtagttgtatttttyggatygygtttyggttgttgtgtattttggagtygggtgaggattttagggttgtagatggggygttgtaaagtagygtyggggttgttygygtttttgttttagtttgatttygtttaggtyggggagttttggggaaagttygygtgttatttggtgyggggtatygygttggtatttgtagggagygattggtttggaagggtagagggtagaygggggtttgggtggggtagyggttattttaggygyggagaattygttgtttttatttttttttygyggatttttattttgyggtttgtgtgttyggtttttttygygtggyggggaagtgygggtggttgttygggtttttagaggtyg

SEQ ID NO: 6236 - DNA, 899 bp, Artificial Sequence; identical to SEQ ID NO: 6235
  Description of Artificial Sequence: Synthetic polynucleotide

SEQ ID NO: 6237 - DNA, 547 bp, Artificial Sequence
  Description of Artificial Sequence: Synthetic polynucleotide
ayggtagatttyggagggggtgtttaggatagtgayggttgatatgaagttagyggtgagggatagygttaygggtattgyggttattttgyggtygtttattaggaagtttttggaggtttgttggtygtttttagygaaggygtagtagatgtygatggyggtygagatgattagtatgttygygaatattaygtagttttatattaygaaggtgtygatgtttygtggygtgtttatggtygtayggtygtttgagttttgygygtaaattggtggtttygyggygygtagtyggagttyggygygtattttttatttyggatttttggygygtaggygtggygtttygyggggattggaggygttttttaggtgtyggttttygaaygtatttygaggyggggtgagggttggtagtygtttttgtattygtygttgygagtygygttttttaaatttaggtatgggatttyggaaaatygattygttgttttgagtgtttattaygtgaggaattggagtggtygagttygttaaggygtyg

SEQ ID NO: 6238 - DNA, 2505 bp, Artificial Sequence
  Description of Artificial Sequence: Synthetic polynucleotide
tygagttaaygygttttagtggtaggtggygaatggtyggagattyggttttttagtggtgtttatygttaygggttttygttygataggtttatttttttttatgttggagtaaatttyggttgaaagagggtygtattaattggtttgygtattygaagtgggaatagagagggaggaaaattatgttttaggtgttayggggggaaaaaagtgaaatgygaatygtaggggagagagygatygttaggtagatattttgtgaatygyggtggagagtatatttaggtggggaggttatyggtttaatttattatttttygggagaatgygggtagggatagtagtagggggtagtatttaygtttttaygtttgtaagggttttttaagtttttggttattgttttttattttttgtagtttyggtgttygtygggggygtgtgtgaggggyggggtygtatggggaggagggatttaaaaaaaaaaaaaaaaagygaggtaattagtatttttygattttattggtttttygtygtttttgttttgtataygttygttttattggttgttyggggtttgttggggttyggtaaggtttgtagtygttayggtygttgttgygtttyggtgtagggtaggttggygtygagygaattagggtygggaattgggagtygggagtygggagttagttgttygyggagttgyggyggyggyggtatttggggtggttttagttttaygaatatygtggtyggygttyggtggttattgygtttagyggggtttagggaagagyggtttagatattttttattttggaagaaaggggtaagtttyggygggagtttttttttyggtttggttygttttttattgygtttagtttyggttyggattttggaagatgattttagggtttgttttgtatattttagyggyggtagtttygggaggtagtygaaagtattaatagttggtagtagyggttagtggaaaagtgagttaaggyggygyggattyggtttttttygygtttygyggtattygttgtttttygtygttttttttttttggtttttaggyggttgtagtatgaagtggygtagygatggttaggagaggtaagaagttygtggtgagaaygttggaggatttgaygttggattygggttatggtggygyggyggattyggtgygtttttttaatttgtttttgtgttgtttygattygtattyggygttttygtatggygggagttgttggtygtttttagttgattttatgtatagtyggtataatagttttgatattgttaatattgttttggtggaagatttygaggggttggattgygtyggttagtattgttygyggttgttgtyggatttagaygaggttttttggattttttaggagttggaggygttgttgttgygttygygggattttygggtaggttyggyggttttyggyggtttgtttaaggaygygttggttaagttgtygaygttggtgagtygggygttggtgygtatagttaaagaggygtagygtttgagtttgygtttygttaagtgtattaagtaygagatttagagygttatggagatygtgttgttttggggtttggtygygtattgtayggyggttgygttggtygtattgtttttttataatatgagtagygtyggyggygatygtttgggtygyggtaagtyggttygttgyggttttatttttttygtgggtygygtgtatygttggatggtggatagtygygtggygttgygtatttaygagtaygtygttatttatttgatagtttgtatggagagtttttttygggatatttattygygggtygtggttttyggggtgtttyggagttgtagtggttttgggttaggttygggtttyggtttaggttygagttygggttttggtgyggttttygyggyggataaagagygggaggygttygggggaggagyggygagyggyggygtttgtagygtagttagtagygttagygggggtagtagttgttgygtttygtyggtygtygyggtygtygtagtttygtyggtagtygtygttaattattattattattattattatgygttttaygaggygtttaagtttatygtggagattttggagtatayggttaataaygattyggagatttggggttttttgtagttttattagtatttgatttgygggaagaaygttagyggtaagtgtttgygygggtgttatttttttttatttaatttggttaatttttggygtaagtttgtttygygtttttttttygygtttttttagttaygygttgttgttttaagtygttgaggaggyggtygggttggaggtagttagaataagaggttgtttgtttgtttttgtattygggtgygygtattttaygttgttggtgttgttttaggttygggagygygaggtttygttttyggtgyggggyggggyg

SEQ ID NO: 6239 - DNA, 1587 bp, Artificial Sequence
  Description of Artificial Sequence: Synthetic polynucleotide
gygygtttygatagtttttaagatggtygttaatgtgggatygatgttttaatattggaagygatttgatttayggygattttaggttagtgygggtagygtyggtygygyggtygtgaggagttttygggygygttttgggygtattggggaggttttygggygggtaggyggaygttttggggyggygggyggyggttgtyggggttygtyggggttyggtygttygttgtttatygataggtattaggaattgatttygtygttgttttttgttyggtttagttatygattagttgtygygattatggagaagygttagtgagttttyggtyggyggagyggtygagyggttaggyggtygggygaggagyggggaaggtaggggttayggtttygggtagggggttgttggygggaattttyggyggttttttttgagtygtattttgygygttttttaatttygyggygttyggggaggtygyggagygygtygtttgttagttygtattyggttggggtttyggygagggagggagggagttggygggtagggaggaggaggaggagaggaggaggaggaggagagaggaggagggagtyggggttggygaggaggyggtttygygtttygtygttygtyggtattttagttttygtygttygtttggttgygtagttyggaygygtygttattygggggtygtygtygtygtygttagagtygtygtygtyggattggtygtaagygtyggtagatttttttttttygggtyggggttttggggttygttttgttttttgtttttattttttygttttttttattttttttttaagtttagatgtagaygggyggtggaggtgggttygggygttygtaagtttgygtttttgtttttagggyggtggagagtygggagyggygtagagtaggtgatttttagttttygggtttaagggaatttttaaatgagagatttttttgtttgttttgttttttgygttttttttygttgtttttttygttttttttttttygtttttgttttttttttgtttttttttttttttttttgttttttttttttttttttttagggygatttttygaaattttattattttttttttattttttttttgtgggagtttgtgtgttttttttagatttggaggtgttttttgyggatttygtaggagtyggggttgggaggtggaattttagagaaygtatygtggaggygyggtttyggtttttgttttttttyggagtgtttyggaygygtttggtaaggttttttagttttggagtttygtaaagtttyggygggtgyggyggggattaggggygggaaaatggtgyggataatagggyggttagagtattttgttttgatygtgatattygyggaagaygygagattattagtttggagataaaaagggatttatttttttttttttttttaattygtyggtaaatttygttaagttttttttgataagtggttttagtattygygtttttttttygttttggtygttttttagttttygttttttygaaygttttatttttyg

SEQ ID NO: 6240 - DNA, 5693 bp, Artificial Sequence
  Description of Artificial Sequence: Synthetic polynucleotide
tygyggttgttgggagagtattggyggtgggttgaggtttttggagagttygyggggtggagatgggggtyggttttttttyggygtttagtygaggagtagttgttagttgagtgyggattygagagagaattttygagggatatttaygttttttatygygtttgygtygggygttttggttttaggaggttgtttyggggyggggttttygggggtygagygyggggggyggttyggyggttttattatayggyggtttygttgagttyggggttgggatgygataggggttygttgtagtygttggtgtygtttattgggaagggygggttgggttygtygttgaatatttygtygggtatggggtgtagygtgttyggtaggtttggttyggggttyggtgtgttygggtgygagattatgtyggtgaatttggggttgttygyggygtgygggtyggygagyggyggttttagygtttttagyggygtygagtyggggttagaggtygttaggaagttggagtyggtyggggattgygtttgygaaggygggtygtgygygaagaagtygtagttgtttttyggygygtagtagtygttttggtagtttgtggagggggagygggaaggagatagggygyggtgagagaaggygaagtaggygggggattygggattyggggaggggattygggygggygagagaggggagygygygatatygatttaaggttagagagatttgyggaggtyggygttttttgagayggtggaygtygtaggtttayggggagggttggggagagagataatgagagatttygaaagggtaagagatttagattgttagagattatatatagagaygggagagatttygagatygtgggggatataygyggtaaaaattyggagattttagttataggttttttgatatttagagatggagagagatagaggyggttagagaygtagagatagataatgatttttaagtgttttagggtyggtgagagatatagagatgygggatagygagagatagayggagagatyggtagaggggtagagagaaaggyggaaaagagatttagagatgyggagttygyggttgagattygaaagttygagatatyggagggtygyggaggagtygaggagaygtagagagaggaaagayggtygyggttagagataygygtggaaattttygggggyggtagygagggagttaggagtgagttygaagatggagagaagtygatgygtttagagaaygtaagayggtggattagagatgagttttaggaatttttagagaagyggaggttgataggttyggggagaggaatygggtagggataaattagyggatagagtagagygygaaatggttgagatygggaagygatttggtygggggaaattggattygggtygyggtaggagygattggtgggttgggtygggyggggyggttttggygttttaaattyggtttttgygttttattaatttagtttaagtttttygtttygttaagtayggtygtygygtygatttyggtgagattatttgtatyggtttagtttagtttgagaaagagaaaattgagttttagygatttgggagagggggaggaggataygaagattttttgggttatggttagagtttygygggttttttggggtagaagttyggttttttagttttgtttygggttggttttgttagtatttttaggttttgaagtatttgaggatattgagattttttgagaagttggtgatagttatgggtttttttttaaggaaaatgtaaggatgagaattttgtttataaatttaggaggtgtagggatttyggattgtaaatttattttgttttaataaatttgtattaattttttgatygttttatatagttttttttttagaattttygggatattttgtttttttttattaggtggggttttgaaggattgaygtgggggaygttaygaaaggattattttgtattaggtattygttttgtayggygggaaaattagygagtttagaagtttgagttttttttgtaaatttattttttttgttgagttttgggattttagttaaggggygaatttttgatgttttttgttatttttttttttttttaaattttgaaatttgtttaaatggggggtgtttggaggygtggtttggaggtagtttaagtaatagttaaaayggttgttaattattttttaaaattattaatttaatttttttygaaagtgaaggggaagatggggagyggtaaatttggagttttaaagggatagggatgggagayggtygyggttygyggygagtyggaaaattagygaaggtygttgttttygygtygtgygygtygttttygtttatatggyggtygggtyggaggtaattggaataaaygtygtttgaaaagggtataaaagtygtagttggggttttgttygygtttttayggggagtygtyggtttygtygttyggtttttttttygttygttgtyggtygttatygtygggattttttagygyggattaggyggggttgtttygttgggggttggggagttttttttattattayggggaaygaggggtttttagtatttagttttttattttatttagygygtagggagaggaggyggtgggataggtyggggygggggygaagtggttttyggggaaattttggttaattatttaggyggggaaaaatttygggtyggtatygtttttattatttygttgtttygggtttagattttgtagggaaagaggtaaatttaggtggagagagtyggtgagtggagatttyggaagataygtttattattygggttttttagggttgggggtttgttyggggttgggggtttgtttagggttggggggttgtttagggttgggyggttggggygttttagtttgagttttgttattgtttggggtttttgttttgaaaagtatagtttggtattttgtttataatttttaggggtttyggttyggttttaaggtttaatttttttttaggttttyggatgtgttgaggttagtgatggggttattttttttttttttttgygtttatttgggtgtttagtttttgttttgttaatattgttattgaatttattttttaagagaaattgtttttttttaatttgygttataatttagaagtgtagatgttttttagatatagatagttttggggtttttttaaatttagaagttttagaatagaagaggagaggtgtttttttgagtttttagttttgggaagaataggatagtgagtttggtgagtttaagtaatgyggtttagggtaaggagttgaaaaaatyggatagggggagttgggatggtttattaatttagtgtgagggaagtgagaggaggaaaagttgaggtggtaaggggatagtttattttaggtttaagtttggtattattatttgaagttttttgtaaattggggtttttygttttttgtagttttaaagayggtggaaatttggggttggtttaatatttgtgtttttagtttgtaggaattttaggggtttyggggttggagggtggattatagttttgtttagagtaattgtyggtatttgggttaatattgttagatgttgtgygtatatatttygttatatggaataggagttgttgttttygatgttagtgagtaggyggtttggaatgaatttagatttttattttttttttttatattattttttagygttyggaatttattttatgttaagtatattaggtatagggyggtaggaaggttgtgygtttgttygtgggggtygtatgtatgtggatttgttagtattggttttagtgtgattggtgggagtgtgygygtttgtggagttgtgttttygtgagtgtatttgtgtgtgagagggtggaatttatttataygtgatygtgygatygtgtttagaygtgtgtttttggagtttttgaaygtaagtgtgagtgtattttgtgttttgygtgggtgaatgtgttattgtatttygtgtgtgtttttgtgtgtattattgtatgggtgagattatgtatttgattttgtgtttaggatatgtgggtgagtgtatatgtgtttgtgatygtgtgtttagygagtgggygatgttttggagyggyggaaagygtgttggtygggatttttygtttttagttttyggaataggataggtgyggaatagygaatttyggggygttttttattttygtagtaggtgtayggggtggattttaatattttagattygtttaagyggtygtttagyggaygtatgygtygyggatttyggaagaaggygtgttttygggygtttagggygtttagttgttttattyggygttttttggatygtyggttttgaaattatatttgggatagaggagggggttgtgaatttaggattaggagtgttttttttttttttttttttttttttttgattgggttgtttttgttgggtttttgygtttttttygtattaggattttttygaggyggggtygggtyggattaggtygggaggggtggagagaggtttyggygaattagttaagggtgaaggatttygyggattygtggggygatttataaagatttgggttttttggttttyggttygttygyggtttgayggttttataaaggtttttttttyggtayggttttygtttyggtttttyggtttyggagttagtttttggtygtttgtttgttygygtttyggygtagggagggagggggtatygtttgtttttttgttygaaaggtggaggtaaagagggatttyggattttagagaggtttataattttttataagtaaggyggggggyggaatttagagaggtaaagtgattygtttttaaatygtaatattaggaggatagtagggttagatggaatttttyggtttatagttttygatttygggtaagtgttttattygggygtayggtttgtttttagattagaattaggygygttygtagttaaggaagtttggygggagattttttygaggttttyggtttttaggttagyggggttaaggagttgtgttygtttygggtygtatttggatgaygygtatgttgaggtyggttttttgygttagttgttygyggatgtggygygtgggtttgggygtggyggygaaggtagttttgagygtttttagttgtttggttttgatggtggtgygggggtygygtygtttggtgttygagttttgtttttygttttygttgttggtygtttttttgttygaygaggtygagttgttygtttttttggggtygttttgtagtgygttttggaggttyggggataaattgyggttygtataggatgatattgygggyggayggatygggaaggggatagyggygttagygayggttagaygtttttttagtttagtggygggttttygtyggtttaagttayggtttgtttaggttayggttagtttygttggatttttttttaaatttgygatagttttttttttagggattyggtgttygtttattttttttaggyggggttgggtttttggaggggygtttttaagtttttttygygyg

SEQ ID NO: 6241 - DNA, 589 bp, Artificial Sequence
  Description of Artificial Sequence: Synthetic polynucleotide
tygtttygttttyggggttttagggaggyggygattggagtttygttgtttatttataataaaagaaagtagggttggygtttttataygygtttttatttattgtyggtygyggggagaattttatttygygttttygttagggtttyggggagttttgggttggyggaggygaataagatgyggtttgatagaattaggtygtgtttttgtaaattttaatgtygtttygttagtygyggyggttttttagattttatttgtyggggagtttygagtygygtaaaatttttgtaagttgtgttttgtagaatgtaaagtygggttggaattygttattttygtygttttagtygattyggtygaygagtttttttttgagtttttygggttatttgtygggayggttatttygttyggtgaagtyggtgtatttattatattttttgttgtttttagtagggaagtyggyggtgaggygggggagtaggtatggtggtttyggggtttatgyggggtttattgtttatttagaatagyggttattgttgtttattagggygtatttatygttggagttttygyggyg

SEQ ID NO: 6242 - DNA, 1294 bp, Artificial Sequence; identical to SEQ ID NO: 6232
  Description of Artificial Sequence: Synthetic polynucleotide

SEQ ID NO: 6243 - DNA, 1373 bp, Artificial Sequence
  Description of Artificial Sequence: Synthetic polynucleotide
gygagygtttggygttttttggggygtagtttygagagagtttttttygggatttyggaygtaaggtttttgagtggttttggaagttggatttttyggggattttgtttygaattttggttatttggaagtaattttatygagygttttttttattgtttagtttygaatygtggyggaaygygtttttyggtttttttagagttttttttgygggagaagtataatttttttaggttttggagayggygtttttatattttaatttygtttagayggaagaagtgagaggtgygggyggtttygttatgatygygggaggagagygtaaggaggtttttygtaaagttggaggttaggtyggagygatgtttygggagyggagtttttttagtttygggtttttagtygyggatagttggtagtgttaaagatttygttattatttgyggttygtagttgygattyggtygtagagtygggtatygaggaaggygtaaagttgagtttgggtaggtataayggtttttagggattggtattttttagttygggttgttygygggagggtagygagttgtgttaagggtttygttattatygttagygtatagttyggagttaagygygyggttgaggaaygattagggttttgtaaagttggagtttgggygygtagattttyggatyggagttttyggtttgaggtygttygttaggaggaaaatgaggtygttygaattaagttgggaygygtagtaaagttygagtttttygygtatattaggggttygggygggagyggggagttttggggayggagaaggggygygggaygtttggattaggaatttatttgaygtygagtygggtagygtygaggttgttttttygygttgygtattygttygttygtttygtattttttttttttttttygggygttygyggtygtygygtttygggttttgaatttttygagttygtygtttygygyggttggagggygtyggttgtatttattygttttttggtaggagtygygygygtttttttttttttttttygttttgtgtttttaagatttttttttatttttttttttttagtttttattttttttttttttttttttttttttttgygtttttttttttagttttagygaatttaagttygggayggaggttgygggttttttyggygtagtgttgggygtttygygygygtttttggtttatttygttygttyggtygttgttygttgttyggtygtttttyggaggagtygyggygttaagtagttttttatttagyggttggaaaygyggtataaatatgtagggattgagtygtgagtttagygagggtyg

SEQ ID NO: 6244 - DNA, 1524 bp, Artificial Sequence
  Description of Artificial Sequence: Synthetic polynucleotide
gyggttttgyggattttaggtttaagggggtatygttttaaatattygaygygtttttattattagttttttattggtaggttttaagygggaaygggattgggaaggtttygggtttggggggttttatttygatgttttaggggygttttgaatttagttttagttaggyggyggtattttaggtagygtagggagygygatyggttyggggagggggaggaygyggygttttygttttttttyggttygtttgtttatttttaggtttttttgttygtyggttttttggttttgtttattttggggttggtggtgggygygggtygggtttaggtttatgttyggttttttttattgtttgttttttttttttattattttattttatttttttagtgttyggtttygtttygttatyggattttttggaatgggggaygygggygygaaataygaatttagttatyggtagttttttttttaygtgygttyggttygtagygtagagggyggttyggggtgggggygttttatttttgttttttatggygtgtaygaagtttttttggtatagttggttgygaagttttttttttaggttgaagtygyggaygttgaygattttttttaygttygataagttttygttttygtygtatygttggyggttaatygggygttgygaggatttaaattagagagttygggatattattgtgggggttggaggtygttttttaatttgggtttagtattaataggtgtagtagtygagygttttttgtattttattattgtaatttaagtaattttgygtaattgttaaagatgttgaaaagtaggataaggagaggggttygtatttygagggtttagttgygttttaygyggggtattttttttyggtgttttyggaagtattgaagggatatttggggatttttttttgtttttygttttygaaatgtgttgggtttygtttattyggtygggagtttggttatgtaattygygaagggggtttyggataygggttggyggggtaaatgtaggttttaggaggagtygttgyggygttyggttyggyggtaatagtagttttagyggtygyggyggtagagtygggaagtyggaatygggggtyggyggtatttttaaagttggagtygttttygagttatyggggaagttggaaagttgaaatggaagggttgagattttagtygttttygtygttygttygttagtgtaagaagaggaggtggggggaggagaatyggggtttggaagggggagaggtagayggttygttataaagttyggatyggagattttaaaaygtattagtagttgttttatttttttataagygygygygtatatttattttttaaggagatttttttattatttttygtatttttttgttttttttttttatygtttagygttyggttttttagttttttagatttygggygaatttygagttygtttagtttttttttaygttttttttyg

SEQ ID NO: 6245 - DNA, 1009 bp, Artificial Sequence
  Description of Artificial Sequence: Synthetic polynucleotide
gygtttgtagygaaggattygygtgggagygagaaatgtttttgtttagtgtttygygygttggatygygggggygagtttgagggtggagaggtygtygggtggaggygygtaggggtgygtgggtgggtgyggaaggagtgtagggtatggaggggaattttggggyggygygaaggaggagygtttggaaaggygyggtgtttggttatagaggggttyggagtgggagtgtaggggtgyggggagggagtgtagggaygyggggagggagtggaggggtggggaygtgttggaggggygygtttygatagaattggagaaattggaaaagtggaggggyggggtagtggttggaggaatttttgaagygaygyggggaatatgtgaaggagtgttatgttggaatttggaggggaggggggatgttggagaggtatayggtgatggatatggaaggattygggaggtgtggagtggtgggttyggttygtygygggaaggatatagagggatataggttgttttggagaggygttttyggatatttggaggggygtatagtgttgggatttggyggygtttggggyggaggggygygtyggatttagtygggygygttygggggtygggygtagtgggagttgaygggygtttagtyggyggygttttgggttyggttaggygtaggayggttttggtagyggtgtagtagtttaggttagtttttggggggtttttggttttygttttttygygygtttyggttagtatygttyggagttygggyggggaagtgggygttygyggtttgggaagttgttttttygttttggagtagagtygtygttgyggtygttgaggaaggayggagtagaggttygygttgtttggggagaagattgtggtgttatttygtygggaatgaagggaaatgtagyggttgtttgygtttygggattttaagaagtatagtaggtaaagagaatagttayggttygttatttyg

SEQ ID NO: 6246 - DNA, 961 bp, Artificial Sequence
  Description of Artificial Sequence: Synthetic polynucleotide
tygtttttttygatatttaaaagtttyggttttgygtaatattgyggattttttttagtttttygttygttttttttttygyggggtttygtttagggtyggtttttygtttttaygtygtagttygggttagyggggttygtygyggtggygttygyggatgttgtygtattggtygttgyggtayggayggygtagtttygggygyggttyggtataggygtyggyggttttygttagttagtagttyggygaggygttggtttatttatggttttygggyggyggtttttgygtttagttttgygygtagttttygtttttygttyggggtygtygagttttygataygggygagatgttgaayggygtaggtttggataaagtttttaagatgtttttgtygyggaggtygaggattygttygttygtgggtgagttgggaggggygyggygagggagggtgggttyggggygggggyggygyggggygygtttgyggttatgygatattgtttygttygygtttygtttttttttttgggttttttgggttttttgggttgtaggattygtygaygyggygygttggtygtaygggggttgggygtygttgtatttgyggggttaaaaggttttaggtyggggygaggtgagyggygggygttagagattttyggttygtttttgtatagatgtgtgtgtgtgtgtgyggtttttttgtgygygtgttygtgygtttttaygygyggatgyggtttagggatgygatttaggyggtagttatygygatggtgggtayggtttggyggygtagagaagatgtagttttttttgtyggyggtyggtatygttgtgttgtagagtttaaaagtagagggggaaaaaggtattygaagggtttttygagtgatttttattatttggagtttygggttttygygygtttatagyggygayg

SEQ ID NO: 6247 - DNA, 961 bp, Artificial Sequence; identical to SEQ ID NO: 6246
  Description of Artificial Sequence: Synthetic polynucleotide

SEQ ID NO: 6248 - DNA, 980 bp, Artificial Sequence
  Description of Artificial Sequence: Synthetic polynucleotide
gygtgagygaggtaggtatatayggattygyggyggtttgtttgtaatagygttgggaatgtatattggaaaattatattttgtatgttgaaaaygaataattgtttgatatttgggttgttgtygagaaaattaygyggtagyggtaggtttygagttaggggtygttattttygatggaatatttaaatygtttatttttatygaatttttattttttaaaygtatttttygygygygtgtatatttttaaaygtattttygatyggaataaagaggggttttagatttttttygtgygtayggggtagtygggagggttaygagagggaggtgtgtgtaatggaagtatygagatagatagatagatagatgtttatgtattgttgtygattttttggyggyggggaygggagtyggaygygagggggatagatagggtgyggggataggyggttygygggggygggggggttatygagggggttattttggttygtttaggtygagggggttttttyggtgttttygaagygygtgggttattygtgtygtatgtyggygtagttgttygttgtggtaaggggggggyggtygggtttyggagygggtygggagggygyggggygygtatttygyggtaggtgagyggygyggttgtaggtgagtagtagtttyggttygygygtttagtttttttygtygygttygttyggtttataygtttttygygygygygtygttttygtttygygygygttyggtygttygttygttygtgggattttygygaggtygygygtttttaygggttagggttgttttagggtgygggtaggygagggyggtttaggggygyggggygaggggygaaggagttaggaggttgagaattgtatggtagttttgtttgtttgtygygttgygygttttattttagtyggyggtttygggtttgtatygggyggggtaggggagyg

SEQ ID NO: 6249 - DNA, 408 bp, Artificial Sequence
  Description of Artificial Sequence: Synthetic polynucleotide
tygtattttttgaagttygttgggygygttttgggttgtttttttttgagtagtygggtttagagttaaggygygatgattgtygygtaagttagggtttaygyggtyggggtttttttttygtttygggygtattagaggttagaaagyggaaagyggttttgttaggttaaggtygatagaaatygagagtatgtygttatttgtyggagagaattgttttgttaggttgttataggtgatttgttygygygagttayggtttttgygtagagtttttttygaaggggagagttagagttattygygggtttggtyggggttttttttagttyggygtttaygtttygygttttgygttygtttttgyggttgtttatgtttaggtgtttyggaagaggygtygyg

SEQ ID NO: 6250 - DNA, 2190 bp, Artificial Sequence
  Description of Artificial Sequence: Synthetic polynucleotide
gygtttygaaatttggttttttgygtttaggggaaygaggtataaattttygttatttagttttattgagtagagattgygagttygaatttttaagtttttyggggttttgattttttaatggyggyggtttaattgttggtaaaattttyggtttttgattgttttatygttygttttttaaaygtttagygaaggttgatttaggtggygggyggattttatygattttttaaattatatygtttggttaaaatygttygtttttttttygttyggattttaaaggttaggtttgtaagttagtaagttaayggtatttgggttttgggttgtttttgtgggttagggttattgatgttygygatayggattggatygygtattaygtttgttttyggtagaggttttattygggtggttgagygtagygtattggggtttygyggttygagagyggyggggaggagygggygttygtygagygtttttygggatagttyggtttggggatttaagygggttatgggatgtyggygttggtttttttttgagatttttttgttttttygtaggtaygagttttttttaaatyggttttttttttatattttygtgaygygaggtygyggttagtgtttaatattattaaagtttyggttttagtttagtttygggtagtttggtaggtttttaggagtttttgttttyggtttygggggattttgygtatttgttttaggttttttgggaatgggttttgggtgttaggtaggtttyggtgygtgttgtttttagtgtttagggtttyggtagtgagattttaattygatagttggataagggattagygattttgtygtaaayggatagttttagygyggattyggtttgagygttgatgttygygggtttaggttagttatttttygaggygttttttyggagaaagggygtagyggttttaagygtgttygttgtaattagtgttttaggttttygtygtagttagttttttygggttatagtttygttttttygygtgtatttygttttggtttyggaggttttgtttttyggtygttttatygtagttygttttaggtttyggtttttagtygygttttatttgtgagaagtagatagttgagtagygygtatagtaggatttyggtgttttagtagttgattatggtgagygygaygyggtttgttygttyggtgttygygtttttygyggttaaygattyggtygttagagttygttttttygttygtygtygtyggtttygygttttgagygttygtttygyggttttagttaggagataattattttttygggtaattttygtygttaggygttygttggtygttgtattygagtttyggagttygtttygagtygtygtygttgtyggggaggagtygagaggagtgttygtttggygygtttygagtttttygyggatttygatgaagagtagtygagggygggggygatttataatttttttttagtttattttttatttyggtatttttttttggtgaygttaaggggttttttattttttattygtttttttatttattttttttttttttttaggttygtttttttgyggttayggagaggggygggggtygaygagggygggtggttyggggtygagygygygtggggaggtgttggygaygygggttygggagygyggtttyggtaggtttagggtttttgtttygygtttttttgtttttgtttttttttttgtttatygygtttaggaaatttttgtagattttttttattyggtttatttagttttgggggtygttygaaattggggaagggataaggttgaagtttygtygtttggttttaggggyggaaagttygatttaagggaagttggtygygttttygygayggtgtttttggtayggaggattgaggygtagttyggttgtttttttttgtttgtttttttygygttgtttygtygtttttgatttttttagattgtttygagaagtttaggaaggtatyggagattttyggtataaggtattgaatttggagygtttgaggggaattgaygtttgtttggtatttttgggaagattgygaattagtttaggttttaggggagygtgttygtgtttttttyggtygtattgatgtattyg

SEQ ID NO: 6251 - DNA, 2190 bp, Artificial Sequence; identical to SEQ ID NO: 6250
  Description of Artificial Sequence: Synthetic polynucleotide

SEQ ID NO: 6252 - DNA, 679 bp, Artificial Sequence
  Description of Artificial Sequence: Synthetic polynucleotide
tygagtggagagtagyggtygtagygyggygttaggttygggttgggttggtyggygygaattttygggggygtttgggyggttaggtygggtggyggttgygtaygtaggagtattttttgagtttagtygttyggtyggtttgattygygggtgatyggataygagtaaygygtgygtttygatttgtgttttgygyggggtygggyggggatyggtygggggygtygygygttyggtygggttgattgtygggggygattttygyggggtaaggygggggygygggagtagygygtagttgyggggttattttatttgagygttttgaggttagggtyggggtttgaggatayggygttgggtttygggggaygygggtttaygtyggygttygagygttattttttygtttttygtyggtttaygtagtttyggggttyggtaygtgaagtgtyggygygaggttgtttaggttatygtatgggtygggygataaataatygtataggatatataatattttggattgttataagtttttygtaggaaaagataaataatatttgaggygttgyggygyggttttttygggttgaataaaaattaggaggtggggggyggtggggygaagtaaataatagaatygaagaattgtygtayggagtttgggtyggyg

SEQ ID NO: 6253 - DNA, 2013 bp, Artificial Sequence
  Description of Artificial Sequence: Synthetic polynucleotide
tyggtagatttggagaygttttyggttttttgggagtttttgagggtttaggtygggtggggygygttttgyggtaagttttttttttttagttatygttttgaggagtagaaggygyggggatatatatatataygttygggtaygtygtygtatttttttaattgaattttggtgttttttttttgtttgtaaagatattttaggttttgggtttgggagttgttttygygyggttttgtttgattttagyggggttatagtagtttggygttyggagyggttttagygyggygtygygggtttaggtgggtgttttagagagygggyggttgygygattgaggagttggaggygtattttttygttygttagayggttyggttygygttttygttttatttttttygygtttttttttttggaaaggaaggtyggagttgtatttttaaagygttttygtttttatttttttyggttygtygygttttaggggttttataaatttgttgtaagtygtyggggttgtagttgtaggtaagggtgaggyggggtygyggtttgggttgtygagtaygtttttttttagttttaagygtgtaygttttttayggaygygtatttagtattttattttygtygttgttttygaggttttygtttaattagaggtygygygygtygygtygtyggygggtagatatatyggtttttyggtttgygtttttgyggttttggtttygttgtagygtttyggttyggttatatttatygtttygggygygtygttygygygyggtttygtttygggtyggtatttttyggttyggttgttttyggttttygtttyggtttyggttttygtttygtagggttyggtttygygatggtggtygyggyggygagygyggtagggagggygtgtgtatgygygtgagagygygtagygtgtgtatgtgygtgtgygygggagggtttyggtttttttgygygtttygtttttgttttttgttygttaygatgygatgtyggtagaatttttatygygygtttttattgttyggygtttatattygygtatataygygtatatttaggygygtatattyggtttygtattttygattygtttttttggagygtttataaagattttttgtygggayggtyggagtttgyggagygyggttttgggttttttygggattygtyggttttaggtgtttygttgtttttygtagggatttygygggyggttyggttttygtattttgtttggtygggtygyggtygygtttttagttygaatttgggtttaggtgtygattygggtttttygtattttygygggaagygtyggtttttttygyggygtygtygttttttttttttttttttagttyggttttttyggygtttttttgttttgttttatttgtttagttyggttttygtttttttygttgtttttygtttgtttygtygtygttttttttygygtttttttttttttatygttttgygttgttttttatatttttygtattatagygggtgtygttygtygttygyggggtttagggttygagygygtagtgggyggygaggggattygttaygttyggtttygtygtttttttygtttttygyggtttygyggttgttagtttyggtttggygttagggtggygaygtttygygttagtttyggttgtygttgatagtttttatttygttygggtttaaagggatagygtattyggttygatyggttttattygggggtttyggggaagggatttygttgygygggaatagttyggggyggtggtatagtyggggtygtgygggygaygtttttttygtygtygtggagttyggttttyggggttggaggtgagttaaggagaaggayggttagattaygttatttagggggygtttagyggttaagtttttgggtygataatgggtgtgyggyggtgtaggttgagygttttggattgygtggyg

SEQ ID NO: 6254 - DNA, 1501 bp, Artificial Sequence
  Description of Artificial Sequence: Synthetic polynucleotide
tygaaagaggggygygggtgggygygttttttygygagtattttatttaagggggaattttttttagygtayggygaagttttttttyggttgttttatttggtagtttttttaggatttyggttagtttttaattggttttagtaatgtttagtyggagtttttttgggttttygagtgggagaaaagtgagagtaggtgtttttttagyggygygtttygttagggttyggtaggatttygtttttaagtyggggaaagttggtyggygtttttttttttygaygaagtygttttagggttgtttttagaggaygygyggtaggtaaagagaatgaatttgagygtttaygaaaygttttgtayggttttygggagttgggagaaataggtgttttttttygaygttygygggygaygtttgtygtattttgttygttgtygygtttttttygggtatttttygttttyggygtttttgttttygtttttagtgttagggyggaggtagtttyggttygtaggtaattattgttagyggagttygtyggggagygggggtgggygygtyggyggtgggygggygggygyggyggggygygggtataaaggggygyggygyggggtttyggagtttggttttygygtagtatgttygttagygtttygtygygtygttygyggtygtygtygtygtygttgtygttgttgttggtgttgttgggtttgggyggtygtygtttgygtgyggagtygggygayggygygtagatttgggttygtttttygyggttttttgttttygaggtygygggttttttttagggtatttttttygayggttttttttgggtygtgggtagygtygtttattagatygagggyggttggtagtagtayggtaagggtgygtttatttgggataygtttatttattattttttggtattttygggagattttyggaaygttagtttgtygttgggygtttygtygtygttgtagttygttatyggggaygtagttagygatagttataataaygtttttygygatayggaggygttgygygagttyggggttatttattatygtttttttatttygtgggygygagtgttttttaatggtagygygggygtttttaatygygaggggttgygttattatyggygtttgttggagyggttgygggagttgggygtgtagttygtggttattttgtattattgggatttgttttagygtttgtaggaygtttayggyggttgggttaatygygttttggtygattattttagggattaygyggagttttgttttygttatttyggyggttaggttaagtattggattattatygataatttttaygtggtggtttggtayggttaygttatygggygtttggttttyggtattyggggtagttygyggttygggtatttggtggygtataatttttttttggtgagtgygaggggttaggyggagggttayg

SEQ ID NO: 6255 - DNA, 668 bp, Artificial Sequence
  Description of Artificial Sequence: Synthetic polynucleotide
tyggggtygttygtaygtaaygttttygggtygggttaggttggttagggtagggyggtygtttttygaggaattgygggyggggyggyggggttaagttgagygttygttttgttttyggygtttygyggttgygggyggagygggttttgyggagtttttyggtygtttttttygtagttttygtttttagggaaggtaaattaygtatyggttygyggagagaygtygtygggggtttttgtggtygygttgggggtygttttttggtgttgttttygtygggttgggygyggtyggggttgyggggttgtagggttggggggyggyggyggggtygggttgggyggtagtagttgttggagygyggygtttyggttgyggttattagtgtagggatgtgtttyggttygtttttattgaaatgyggygtttygtatagttttattttagtttttttttttagaggagggyggyggyggyggyggyggygggygygttttttttttttgttttattygtttataygttttttygttttttttttttttttttttttttgygtgygygtttygtygttttygttttttttggtagggygtatttattayggttgygttttaggttttttttttttttagygttttttttttatygtagtaatttyg

SEQ ID NO: 6256 - DNA, 1006 bp, Artificial Sequence
  Description of Artificial Sequence: Synthetic polynucleotide
tygggygttttgttygttygttygygygttttaggatttaaagtygggttttaagtyggygttttaygtygaggtttygtygtagttttyggagttggtygtagataagaaggggagggagygggagagggaggagagtttygaagygagagggtygagygttatgygtygygttagtagagattatattaagtatttgygtggttyggaggagatgggyggyggtttyggagtttygtaygagggttttttgtaygtttygtygtygtttgygtygtattagttttttgtygtttttygttttatgttygtggtttttttggggttggggttgggttaggttgtttgtagygtygttttgtttttttattttagagygtaggtgagtggttatttttttaggggatygyggttgagagygtttatttttttttttygtatttggaaattgagtttggyggtagggttgggttatttagagtttgtatatttyggaagggaaagtgattttagaagggagagaggaagtgttgagtttggggataatttggygtagggttgtygggygtattttgtttttttttygtttaygtattttagtttttyggtgttttgggggyggatttttttggtyggaygatgggtttgaattttatttygttttttygttgggaaataatattggttttttattttttttggtagtgattgtatattttttttttttgttattttttatttgaagttaagaattaatttttgtttaygtaggaaaaaagatgagygtttttatttgggtatttattttttttttttygtttattattyggygggtttyggtttttgygtttggttgttttgtaggtgtgttggggttayggtgttggagggttgygyggagygggaggtygyggtgttygtgtttaggtygtttaatgggtgggtagaatgatayggygygattagagaggygygggttygggatgggggttttgyggttgtggyg

SEQ ID NO: 6257 - DNA, 867 bp, Artificial Sequence
  Description of Artificial Sequence: Synthetic polynucleotide
gygyggaataaggygttgattgttttttagttttttttttttygygttttttyggtagtagygaaaattyggaaatttgattttggttttaggagagtygggttttatgaggtgtattgagtatgttttgtagggttyggygtgggagggaygygttggygttttttaggttygggyggaagyggygttygtaggygttgaaagygagygattttttgagttygggtggttyggygggtaagggyggygygggagattygtagggygygggygyggattyggggaattagggttatygttgygggyggatgggggttatygaggyggttygtttttaggygtatatttygtatatttttttgttaagtgaaggggttaaaatgtatagatgggggagtttatttaggaatagaggygygagaygtatagttatttttgggttgggagtaygagttagtagattttyggagygygttaaayggataatatgttyggtgttgtaaatagaggtttttgttggtagggatattggaaagaagggyggagagggagtatagygaaaggtggggatygtagaatttggaatttttgyggagatyggaaagaaaattaatyggagtattttttatatgtagagttayggaaattgttttggaaagagaaagtggtagygtttgggttttttyggttagttygggttagtyggttgygygtgygaagttttttttagyggagygggatyggtygyggyggtggatygtggyggtttttgtatttttgttttagtygygtttggaaatttgagttyggattygyggttgttgtaaaattygtttttagtttattttattgygaattttgttttyg

SEQ ID NO: 6258 - DNA, 1072 bp, Artificial Sequence
  Description of Artificial Sequence: Synthetic polynucleotide
tyggttgygtygttttagtttagggaygttttygttttyggttgttatttatyggttatygagygttygtttygtttygggtttattatgtttgttgtagtttggttygtattagaggygygataataaataagtgtattggattgggttttgtattygtttyggagtagttgttttagagattyggtgttgtttatygygttgttattttttyggygttygggaggaagaygtaattttttyggagttttttttagagttatygggttgttaggataagttataggtatagaaygaygyggttgttgttygtttttttttttttttagaaattttaaaggatgtyggtgatagagagttttaattaatgaygattgtgygtygtatttggggaagggatatagaaaaaaattttgtaaatatygtgaggatgaaattgttaaagggatgtaagagttttttaaatattaattaggggtygyggyggyggygggttyggygyggagatagygtyggygggattttagygyggtggtygtygttgygttggggggyggaggatagygtaggagttgtagtygtygttttygttggagtagtygaggggtyggtgttatttttgttygtttttttattattatgtatagtgtgygttgtaagaagaaggygggagatgtatgtatattttygygattygttttttttggttygtttttyggygtgygttattgattaggggggaatgtggtgaagayggygaggaggagagtygaggggggaggggagggtyggtyggygygaatttaggtyggagggtgygaggagttagaggaggttggagggggyggyggttatagttgggtyggagaaagttgttttttatgtagatggtaattgtgagtatttttgtgggggggagggtgtagygaaggttgttagggatttygygatygygttttaataygtattggagygagtgtgygagtgattatgagtgtgagygggtgygagygttyggyggggttgatygttaygttggyggggtyggyggggttaggtagtttttttygyg

SEQ ID NO: 6259 - DNA, 1633 bp, Artificial Sequence
  Description of Artificial Sequence: Synthetic polynucleotide
aygygygtatatatattygttttygtttgtttatttttttttygggggagtyggygygygtttttatttttgtygtatatttyggygagtygagttygtagygttttaggattttgyggttyggaattyggattgtagttttgaatttttatggtggttttttaaatattttttttttttttttttttygttttgattgtatygtttttatttgggggttagaggagtaaggtagtagtttttttagttagtttttgttggtttgttatygtttatttggtttataaaagtttgttgagygtagtttagagggttgygttgttygttttttyggttggtagaagggggtgaygttgggtagyggygaggagygygtygttgtttttggygggttttyggtttgaggggtaaggtgaagagygtatyggtygtggggtttatygagttggatttgtatgttgtattatgtttttttggatyggggttgtgatttttttttttttggggttgttgtttttttttttygtyggggyggatgtgaaggttyggagttgyggagaggttygttaggygtayggtgttaagggatttagtttggyggatattttttattaggagatygtaggtaagygygggygygttgtaggggtaggttgtagttttyggttgtygtaygttttattggtygttyggygtttttttttttttttttgttgttgagttggtgtttattttttgttatygttatgggatttygygttttygtgttgggyggyggatgtttttgyggttttttyggygggggaaggtgtgygttttygtygttttattgtgtgtataygygggagtattttggttttygtttttygttgttttygygtttttttattttttagttgatggtttaggttyggttggttagggagttygggttatttyggggyggttgtaaggygtagayggagagtygagtygggygtttatttygygttttggttygggtaaatttggaagaattgygatygtagtttgtttagygttatagtttgagtggygttttttttattttygtttttgygtyggtaggggyggtggagagaygyggagggtttttttagttttttttttttttattygtttttygggygatagagygttyggygttygggtygggggygggtaaggttgggagggattttygtyggggatttggtttttggaygtyggygttttaaggttggtttggggattttaygggttgtttgttttagatgtggggygggttttttygttagggttttttagtgtttttttagttgttgttggttatttagggttyggggatattttgttattyggtttggagtyggtttygtttgttagygaatagttaattttagygggtggtttagttggggattygggttygggttygggggtttygtgtttttygtatgttyggttattggtattgttttattaagagtttgagagygtttattttttttttyggygttagtgtgtgtagtatttggttttygataatttgygyggtagtttgggtgtttgtttttyggtttttagttttaatygaattygagtttttttggggttttgtgaatgaaaygtgtyg

SEQ ID NO: 6260 - DNA, 1143 bp, Artificial Sequence
  Description of Artificial Sequence: Synthetic polynucleotide
tygyggagttttygyggagatttgttggagttaggttgtttatttttatttttttattygygygttggtttagaggtttatttaggtagyggttttggtgtygagggggtaggtgtagygttgtagtgatgtttagtggtttygtttttagttatttgttttttaatatttgttagatgtttaggyggggtaggttygaggtgtygtyggttttgggttttttaagttagtttaggggtatttygyggtaggygttttygatatttaygygtaggaatagggagggygtatygyggttttygygtttyggttaggtyggtaaggattttatygtttygttttygggtggaggygtttttttttatttttttttygygyggggttttygttygtagtttttttagtagtttttttygtagttttagygtttttgagtygttttggttyggatyggttaaggaattaaygagygygtatygygggtttygggygtagggtayggagtyggtygygtygtagtttttygggtatyggyggyggtgattaatttgtaattttagygtttagagttgttatggtgttygygggyggyggyggyggygatagtgggygatyggtaggattagtgttaggygyggygtttagggygggyggggaygygggttttttatttayggyggtttagtttaggtagygygttyggttyggttggggtygyggtttaygttygtygtgttatttattgagygtygtygtygtygggtaggttgggggaggggtgggagtyggagttttygggtttttaaaaaattattattttatttaaatttttaaagttagttttgttatagggattgtagtgatgtygaagggygggtatygtagaggaggttgygtygtagttggtggggagygttagggtyggtattggtagtttttttttgtyggttgttattygtagttagttttatagtaatagttaggtttttatttgygagtttttttygggggtttttygtatttaatagtayggyggyggtgtgtaygggagttygtygggtataygyggggtatatttaagtgtattgttaggaggtygggagtttagygtgygagygtgaggttagattgtgtayggtatyg

SEQ ID NO: 6261 - DNA, 1143 bp, Artificial Sequence; identical to SEQ ID NO: 6260
  Description of Artificial Sequence: Synthetic polynucleotide

SEQ ID NO: 6262 - DNA, 1371 bp, Artificial Sequence
  Description of Artificial Sequence: Synthetic polynucleotide
tyggttgagagygtatggygttttgagtagtgtaggtttyggtatygagggyggaaagygttttgagtttatagtygtaygatagatygtyggtttgggttttttaggaattttttgtagttttgttyggttttygattttygttatttattagtttttttaggtatttaagagttttttagyggygggttagggtyggttttttttagtaggtttttttggagagygggaggaagataggaggygttttttyggtggagggttttttagygaygtagttaggagygttaggaggttataatyggaggagaggttggygttttagttttagttttagtttygaagygattttttttttttygaggtggttttggttaagtttttagttattttygttaaatgaggaggtgggygggatgtagayggtggagygggaggtttgggygygttagtttgggagttagtgygyggggtagggygaygggtagygyggggaygygaatttttaatttttgygtttaagaygaaggattyggtttygatttttttattattyggygygtattagygttygtttagtgatttttaggtttggtggtggttaggggtgggaggtgagtygaaagggaaaaagttattttatttaagtygtygtygggttggagttagtttgygygggtttygagttttyggygayggygttagtttttttygttygttygygyggtgttttygtyggtagttttttyggatttygygttttttttygggygttygttttttyggagttttaaygtttgtgygygtatttggtagtagagatagtagtagtagtagtagtagtygyggyggygatagtgttaggggtagygagagygggttagagtttatggttggtggtygggttggtygyggattyggayggtygggagygggygyggyggtygtagagayggttttttttygygyggttttagygtagattttagatttggagtygtgygggyggagaygygyggggttttttttygtttygtygtygttgggtttttagygttttyggattygygggaggataggaattattyggagtgaagttgygttaggtgygggygggygggygggygtgygyggggyggggygtaygtgyggtaggggaaggggttttaggttttagtttttagygtygggygagtttttttttygtygggttgggtgtttyggtyggyggygttygattagatttgagtaggtgttgttattattattaggaaggagagggatttagtttttgttttaggttttyggggygtgtgtagttttygtagggggttgggattatygggttaggygggygtygtaggagagayg

SEQ ID NO: 6263 - DNA, 1545 bp, Artificial Sequence
  Description of Artificial Sequence: Synthetic polynucleotide
aygygaatttygygggtggtttygggtggtgggttttttttagygygtagttttygttygtttttttttyggygttgtagtygygatttgggatygaayggatatygttttttyggggtttyggyggygttttgatttttattttttttygtygtagtttttggtagggtatttttttggygygaygtygygttttttttygggatygttttttyggttttttagggtgygtttagttgttgttygtgygtttygttagtttgagygtttygggygggyggyggtggagaagtttagtttagttttttttagtygygttttyggttygygttgtttttagtttgtaagtttatgaygtggygaygtygatygagatataaagatygaggttgagatygttaggggttgagggtgaggtygygtttyggggtygttggagygygggygttatgygagattgtttyggttgygygtygttttagaggagttygagygttttttttagtygyggygygttggttttggtygggattgtagttaggtgggygtygygygtgtgagygtygygygtgtgagygtagatttggattygggyggyggaggygaaagtygttttattygyggggtgtaattttgggygyggaattygggttgtygggtgatagtgattagttgattttggagtttatyggaggygyggtatyggaggtygtgyggattattgtygaatagtygttggagattygtagagaagggygggttttgygttyggggygtttyggaggtaagttyggagagttygggtygggyggagggygggagygtaygagtgtgtgtgtgtgtgtgtgtgttygyggtgtgttygyggttyggtgtataygygygygggttgtaaagttaggagttgygggagygtttttttgtttyggtttggtttyggagtattgygggtygyggaggtgtgggggtttttgtygttgygtttagggtagyggyggaaaaggtgtgtgyggatgyggggyggggtygtatttggtggatagagtagggattygggaagagaagttayggaagatgattatgtagtttggggtaagtttttttggttgagtatygttttaggaaayggtgttttgagggttaaatatgtgagttatttgtgtaaaaagtttgatatattagaggygygaagtaagatggaaagttggataagttttaggtggatygatyggtgtatttaatttttaaattgagatttttagttaygttgatgtggaatgggatygttgtttttttygagggtttgataaggatgtttaattttatttgttagaaagtaygggagttgggtttggttygyggggagygtaagttygtttataygyggtttaatttaggtaaatgtagtatgttygatttgttttgtygttattttttygaaagygataatttttttgggttatygaatttattagagtagttatttgttttttygtyggyggtgyggggagygtaatatttgagtagtttaatttttatagygyg

SEQ ID NO: 6264 - DNA, 1545 bp, Artificial Sequence; identical to SEQ ID NO: 6263
  Description of Artificial Sequence: Synthetic polynucleotide

SEQ ID NO: 6265 - DNA, 1027 bp, Artificial Sequence
  Description of Artificial Sequence: Synthetic polynucleotide
tyggtttyggttttagtttygataaygtttttagtgttygtagaagyggttttyggatagygaggatagttygtygtygtaggtttattyggygtttgatggatatggtggttaygttttggagtataaygtattgtattttattgyggagaggaygggttagagtatttygggtttttyggttggggtaagggttagyggatgaggggaaaaggtggggtaagtygttgyggggagaggattagtgyggagggtaggattayggttagtgtggagygggtgggtagaggtggaagyggttggtgggygtgagggggyggagtygggtagttygtggggyggggtaggaggygagggagggggyggggttgggggyggagygtatttgtggttgygtagtaggygtattagygttttggygatgaygtttattttygttttgggygttaggtggaagtagagttgygttatygttattattatygyggygttgyggttttgtagtaggggtttggtgttgygtagtagtagtyggtggtyggggtttatgatatagggttttygggagggggyggtygyggyggtygtttttttagatttygygtttttggtttygtttttttttgagtygtagaaggtttttttygygtttttttttagtagggatttttggayggggagatygaygggtttgtgggygttttttygggatatatttyggttygttttgtttgggttgggtttatttaygttttgggtggggtttaggaattgygtgygggygtagygggtgagtatgttgatgatgattatttggttttatttttttaygtygattagtaggttatagagttttyggtagtttttgtgaattaggtygatgygtttygggtagatttttttaaaggttattattatattgttygttattagttggggaaagaataaagaygagagggtgaaygygaagggtggaaggtyggttgtyggttattatttttttyggagygtttttatataygtatyg

SEQ ID NO: 6266 - DNA, 693 bp, Artificial Sequence
  Description of Artificial Sequence: Synthetic polynucleotide
aygaataaaygttttattttygggtagtyggygggtgyggagygagtattygtggggygggataagtgyggaagtygttgygttttygtttttttattttygggggayggttatttttagggttttygaggagttygtttygtgtatttaggttttaggtyggtttttaagttttggttygtygttatattagyggttttttattygtaagtataaatgtgatatagatattagtttttygtgtttttggtttttagggttttttttatygygttttagtatttgtagtttttttatttttatagygttygtygtygttaaggtaatagagggatgttyggtgatagattyggygtyggttttyggygtygtaagagaagygttygygygggygttttggattygtagagttttyggygttttygaagtttttggtgtggtygggattygggagaaggagtagggttggtggggttgttgtagtyggtgagtgtgtgttggygttgggggttggaattttttaggttagtttttgggyggtgtygtaggattttgttygttgyggttttgaggyggaaataggggttggggtygagygygggttggaagttttggtttttggagtgtygtttttagtttggggtygaggyggtygtttgtgtagattygggatttttaaatagaaygaattyg

SEQ ID NO: 6267 - DNA, 1496 bp, Artificial Sequence
  Description of Artificial Sequence: Synthetic polynucleotide
aygtygagygattagatgtaaaattttttagygtttgaaattatygyggaygtygtygtygtygtygtygtygtygggtgggagtygygaggagygtttagtggygyggtttgtygggtatggtggtyggttyggygatygttgattygtygggttygggggttttggaagygaggygygtttttygatttygagattttgtagggttgtaatagayggtggggaggtaaaaaaaaaaaaggaaaaggaaaaaatggtgttaaagttattaagttttatttattgggtagaattaaaayggatatattaygtatttgtaaaatatatatatttatttttatatatatatatattyggagttygaggaaaggaagagaaggaagatgtagtaggagttgtagtagtygtygygaatggttygtygygyggttgtagaaatgtataagtgtttygagttttaygaaaygtaygggttatyggagygtttttttyggtttttttttttttttttttttttttttttttttttttttgtygyggtttttttttttygtttttygttygggttgggagyggtaggagagyggaattttttttttttttttttttttatattygttttttttttygtttgtttttttttttttttttatttatttatttatttattygttggttygyggttgtagtyggtatygttattygtagtttygyggtagttygttygttttaygtttygtagygyggygttygttagtygtagttygggggaaatygagatygaagggaaaaagttgtatttgagattgygagggtyggggttggggagggagagttggygagttggttgtaygatayggaaaggygtttttttttttattttttggttttygygttattyggttttgttgtaattyggatygyggtaggaagtgaaatgaaygtggyggaggtgattggggagtgtttttaagttttgggtggggggygtttttaagtttgggtgggtggggggygtaggtttayggayggygayggggggtgtyggagygtatagatattttagagaagtatttagagtyggggatygggatygtagaygygtagtttttggtttgaatgatatttattttygtaatttagagtttggggttttggttttggttgggaggggattgygggatatggtaygttaggtgtttttygtgttygttgygtttttttggaggtgggttttgtattyggttttgagtaggtatggatyggggaaggaagaaataggggtygaaagggttgygttggagagtygaggtggtttygggygagttgtgygtgtaagagaaatggtygggggaaattgagatgtaaggggtatattttggtaagygttaygttagtatygttagaggtyggtttttygggtttagttttygggtgagttgagttggttgtygggtgagggggygggygggttgtttttttyggattygggggyg

SEQ ID NO: 6268 - DNA, 5820 bp, Artificial Sequence; identical to SEQ ID NO: 6021
  Description of Artificial Sequence: Synthetic polynucleotide

SEQ ID NO: 6269 - DNA, 699 bp, Artificial Sequence
  Description of Artificial Sequence: Synthetic polynucleotide
tygtggtgggygaggtattyggggtttttttttttttggtttaygaatttttaatttygaaygttgtgggattgtatgggtttttgttygggttaatgaaatgygttgtygagaggaggttgyggygyggtttgaggtyggatttttataggtyggagagttttttgtyggtygyggtyggatttttygggaaatgggattagagygyggagggagtttggttaggaggttttttaggatttagtygygaygttgaaaagtatgaagggtyggaattaggtatttatttagygagygttattaattygaagttatagygttaattttttgattyggtygtttttataygtagygtygggattagaggygyggtygtygttygtttygtttttatattttaaaygygttygtttygygttttygaggttgygggtttagggttaattygtygygtygygttygtttggttygagygygyggygggtygggttyggttagttggggygagtyggtttgttygttggttygggygttyggtttygggttgggtaaggagygtttggttatgagtygygggatagtttaggygggayggatgygttttttagggtttaggygaggtygygyggtgtagaatygtygggatttttttaattygggtatgygtatttatagtagyggtttttggaggtygyggyg

SEQ ID NO: 6270 - DNA, 1845 bp, Artificial Sequence
  Description of Artificial Sequence: Synthetic polynucleotide
tygttttttygtygygygttgggggttgtttttaggtgttggtttttgtgtygagaaaattttgygaggaggygagggagttggataaagagygggygagggagggygtttgttagtttgaggggtgygtygggyggtgygygtatttttttgggtttagtttygtattyggtygttygyggtggttagagtttagtttttttaggttaggagtggygttyggttgtattttygygttttygggagttgaataaagttaggygggagaagtaaaggttagygtttggaygttggagttggtgggaggaggygagtagaggygyggagtaaagttgttaaattgygygyggagtygggygtggggygggggaagggagaggagggagggaggggtaggygggagtygggagggagygagygggttygtygygtttgagtaatttttgtttgtygttgtygttgtygttgtygttgtygtygtyggttyggattygttyggagygtagggtgtttgtttagttgygygyggygygyggaggtttyggygttygtygttgygtttttyggtttttgtttttygygtyggttygygtgggtttyggygggygygaatttattatgtagttgtagtttyggagttggatgttggtygygtttaygttgttygtggttttttttattttygtagatattttagagatygaagaagaaatygggtaaatagttgtttttaggttygtgttaygagttttggygggatttttttttttttttgtattttttatttttygattttttttgtgtgygtygygtttygttgtagtttygttggagagatggggayggtttggtagaaggtggyggygataggggttygggayggtttggggagaggagggtgggggygyggttgttgtggggtgttttygggyggggtttaygggaagtttttagttggttygygtygggaagyggattygtttattttgtttttttgtttggygtgtttaagygtagtgtygtyggggtygagggagggygtyggggagtgtttygggygggyggaggggtygagagtggagggaggtaggagtttttttgtttttagtayggtygttttttygttttggtaaagtgggtagggggygygtagggatttttgagttgggggaggggtttttggggtyggagyggagggyggggttttgtatgggttattgggaagyggaatgttttttgtatatatagataggtataygygtttttygtyggttygggagttyggygtaggagttggtattattagagaagggttygtatagttggattgagatttttygttttygtttggttttggaygtttagttaagttayggtaatttyggygattttgggtttttgtgygttygtagygyggagayggagatatttygggaaagtttgtatygtygttyggtgggtttttgggtttttaggygggygatttggygttttttttttttygatttygttagaggtagggtgggatygygagttyggattttttyggtttyggattttttggagtgygtatttgaggygygggaygtatyggttgtgtgttttaggggttgagattygygtttygtttygtagttttyggttygtygggtygggttttttttyggaatttttaaagggyggtagaygataggtggggaggtagtyggggttttgaggaggttygaggagagttttttggttttgggtaaggggaaggtgaggttttaaagagggtagaaggtttttttttttgtgggatttgtgttttgttaggygtttttttygagtttygygtygygtgyg

SEQ ID NO: 6271 - DNA, 1844 bp, Artificial Sequence
  Description of Artificial Sequence: Synthetic polynucleotide
tyggygattttttggtattttggatagtttttyggggagtagtttatygttaggyggyggttgttaagagaggaatttttttgaygyggagtttgtygtttyggggttygtttttyggtaggttyggggagaggtggggtgataatgggttggggtgygygygtgttttataggtgygagatagagygagtygtyggggtgtgagttagygygttgggggttaagaagttgggtgaatagttayggaattttatttaygttyggtttttttatttatttygtttatagygygtgttttagtttagggygtgygtgygttyggtgttygatttygggttgtgtgtgtttatttggygagatgtygagagyggggggagtgtttttgtyggtgtatttgggtttaggttaggggattttttttttttattttygygtgggtgtgggggtgtgttygggttagggygygtgtgtttttgtgtttgtgygtgygtgtgygggttagggtggtgggatygygtattagggtagggtgtttgygtttgygtttgggtttgtttggtttgtatgtyggygygatttygatttggattygtgtttttggatgtygagaggttagygtggtgggggtgtttagtttttyggaggagtattatgttttgatattttygttttatygttttaaagttggtttggggtttygtagggagtggtttgtatggggagggttygygtgttgtgtttttgggaggggtaagagagtgggggygtagggggygggttaggtttttgggygyggygygggttygggggattygygyggttgaygttaggttattttttaaatagagtyggtagygygtttygttyggtatttttygaagagttagatygyggtyggygttagygttatygttyggtttattygttagttygtatagtygygtygtygtygagygtttygtgagyggygtttygaggattaggaatggggtttygggygttgggygygtttygaattyggygtaygtaagagtttgggagygttygagtygttyggttgttyggagttttatygtttaggatygggagatgttggaaatgtaatygtttgtttttygaggagtygttgttttygggattttttggtattgtgygtattttggttagtagttttyggagaagayggygtttttaaygttygattygygtggtygtggtagygttaygygagttttttaggygatygtagggttatagtagtttagtygtyggtgttttttyggaaattatgattttyggygygggtttatggagttatggtttatagggttttgggtygygyggggttattttagtygyggagggygygtaggttgtttttygtttttaygttttygtttttttgtatttatttgtgttatagttttttgtgttgttgygaygatttgggtyggagtygttttttyggygygtttygttgttttygyggttttagygygggyggttagaaatttttttagaagtttygtttttgtgattttttygggtygaygtttagygagtttagygtttttagygygttygtygtygtygtgttygtttttygttttttyggttttaattatttyggtttatttaagttgggtattaagyggttgttttaagtttttattgtgggygtgaagaaggggggtattygggtygtgttggagtttattygagtatattyggaygtgygggttttgggtayggaattttatttttttgataggaattayggtygygggttggattggtataggtaaggattaggagtttygtttygtgygtygggtttttgatyg

SEQ ID NO: 6272 - DNA, 1480 bp, Artificial Sequence
  Description of Artificial Sequence: Synthetic polynucleotide
gygggtgyggtttttygggagttygygggatttttttattttttattttygtttgggaggttyggygtgggttggygatgggggtggaaggttttygggtttgtggatttgyggtaggaggggyggttggtagtaggagtttttgtattatttttatttttaggggygtttyggggtgggtgggggtatttagtgtttygygaaaggaagaggaggagggggygagygtggagatgagtttaggagyggaaagtagygygygttttttygatyggtagygggggtgggygttttttyggggygygggagygtttttaaagtygyggggygttygtagygggtaggagttttgttttgtatttttttayggyggggygtttygtaygtttttttatgttggttttyggtttyggaayggygygygttttttgtttyggaaygtygtttttagttaggyggagygttgggagttgggtttaggyggygggaggagggygaaygggttyggggttygggtttygatggtygygtygtttygggggagtyggagtygagttggtygtygttygygygtatttattaagttygttgagttttttttygtaygagtattagatgtyggtgtggaaatttttgaagaggaagyggtygtygtyggttttttagttgtagagygygtygttaggggggtygtttttygaggyggtggyggyggyggyggyggyggygggggyggyggtgtygttggtygtggygttggygttygagttggggtagttggygygttygttttggtygtagttyggtttggggattygttgygtgttttggtattagtgygtggtgaggaaagyggtggtggygaatagtagygttagtaggtttagggttayggttaggagygttyggtygyggyggttagtttttatgtygttygygtygtygggaygggattgtatygtyggggagtttygygygygaagttggtagttggygtttygygttagyggtygttgttygtygygtttyggggttygggtgtttgagatyggyggyggyggaygyggygygggtttatgttttttttaatttyggggtgggggygyggygyggggggygtgyggggygggttggyggggygggyggyggtggaggagyggttayggygygttyggagttyggagygygagtgtatttyggttaggagtygttggygtttggtagyggttayggygtagggaygygygttttttygtggggagatatttgtaggyggtyggygatattgtttyggagttygttygtayggggagagggggtygttaygtygggygygggygggggtttgggagtggagggaygttttygaaagaaattygagttagggtgagggtttgagaygtaaggagaattttaggtaaggygtttttgagaaaagatttttayggyggaygtggggtaataaaattygtygggagyg

SEQ ID NO: 6273 - DNA, 5065 bp, Artificial Sequence
  Description of Artificial Sequence: Synthetic polynucleotide
aygagtyggggatttgggggttygggyggtygtagtttagtgggttgaggtgtygattagggttaygtttyggagttttgtyggggtttagtttttttttttatattttaaaatgtygtttagggygtgggtatttygagtggtattyggagtygttgagatttygtygagattgttttttgtgygtttttttatagtygagaggttagtatygtgtygggaygattyggggattygagttygggygtygttatatygtttygggygttaggtttgggagttttgaggtyggtatygtgaaatatttttaggagtaaggagggattttaggtgttttttttttgtattttaattttttgttyggattttttttattttttgttatagtttttatatataaattttgttttggatttgtttagttttttygggatttatagttgtygtttttatyggagaaaataagtgtttttgttttaggggggattttattttggttggttattygtaaatttggaaaattattttatgattttttttttgatttttttggaagtagggagtattaygattygtagagggygtatatygattagaaagattttggggggtagagggtgtaagtgttgtgggaagagatgyggagataaattttgygagttagatttygatatttttttygttygtttgtatygttttyggaataattggyggttagtagtattttttatttyggtygtaattttagygggttaggygttggygtttygatattagtttttatttttttgtagttttgaatttttaaagatattyggttttgtttygtaggtygagggggagtgtgygtgggggtaggggggygtagygaatttttttaygttyggagtttagtttagygttygaagtaaatttttttatygttggtagtaaggtygggyggyggaggtygggtygggtgttttggggtyggygtygggagygttaggggtttygtgyggttaggtyggggygatttttattygtatttaygttttatggggttttygggttttggtygyggttgggattttyggaaaagtagggayggagaagttaggtyggtatgttygttttttttttttygggaggatttaataatttyggaaagattttgtygggagatgtgttygtttttttyggggtagygggggaaagtttagtaaaggtatattgaaaattaaaaagaaaaaaaaaattaygtygagtggaagaagtaatyggggtygyggyggyggtgaggtagggggygygggggttagtygygtgtgagtgggttygagtgtgygtgagtgtgagtgygtgtgtgtgtgtttayggygygggtyggagtatttattatttygtygggggagygaggttatttyggggtyggattggaaatgttgaggtttygtttgtttttttygygatatgttggtttaaatattagttggggtagaataaaaaattattaaaaaaaaatttttttaaaattayggaaatygagyggyggyggyggyggyggtttttttygttygtyggttygttygtttttttttyggtttttyggtttygggygtagygygtatgtgttttgttataattatgattattaataatgtattgygattaattatagaggggttttttgaaaggygattggtatygggttagygttatttaaattygttygttttaattaattagttygtgatttgttgtagatttttgttttttygygygttggtttaataagtyggtygyggggttggttttgygygtygygtygttygatattgggttaattttttttgygatygttygggatttygyggttyggtygtygggggtyggttttttttttattgygggttyggygtttyggtaggygtttttygttttttttttttttttttttttttttttttttttttygtttttttttataatttygggttgggtygatttaaattagtatgtttttttyggaattgagtygtttygggtggggggtggggtygggyggygagggttggggattygggttgtyggygygttgygaattttttaattygggggygaggygygtyggttygyggggggagggagtttygyggygggattaggggggagggygtttygtttygtgagtgttttttygtttttttaagagttattagaaagtagtttatttttatttttattaaaaaaaaaaataagygagtggggaagagttagttttaygtyggttygtttttygtttayggttyggtttttttttygtttggttyggygttttttygtttygagttttttattttttggatttygggttygygggggygyggagaagaggatttaggaaaggtttgggaatttgatgggtttgtggttggggggaggggtagttttttygttattttatttttttttygttaggggtattgattttttagttttttgtttgttttttygttttttttttttatttyggatatttttaggataattagggttgaagttttygggagaagtagtttygagttygtgggataagggggyggttyggtttygtttaggatttttttyggatttttttttyggttgtttyggttggttgtagggygygttatttygyggggaggyggyggtagyggtggygtygtagagtttygggygggyggagagyggggatyggtttgggtttygagtttagtttyggtyggggggaggggaggggttgyggtttatattgagygtagtagygagtatyggtttagggagatatagttygggyggattyggtattggattgggttagtttttgggatttttgggtatttygttttggggagggggtygygttttagtttttygggaygaggtggyggygtagagtyggaaagyggggtggggggagggyggtggggaggtgttttgttygaggttgtttggyggygtygaagttygtttttattttttgggtatttgtygagygyggygttygaatttttygttttattattattttttttaagttgagatgtaatttttttattttygttttagagtttagagttaggagttygatttttttgtygggtttaggygttygygaatttgagattyggtaygyggtttagtttagtttttttttttygygtttyggggttttttygttttaaggttttygaagttttgygttygaaggattaaattaaattaaatttyggttgagtaatgggggaggaggggggtgtagatatataatttttgttttattttaygattaggaaaggagagggtttataaggaygttttaattygygagygtttttgagtttggtyggtgttayggtyggttygygygaagtgggtatyggtttttygagtygatttygtgtatttyggatttgtattgygtttyggtagaggattttttttttttttttagttttttaaatttttttttttaaggtgtaaatgtgtgtgtgtgtygatgaatgtttttgttttttatttgttgattttatttttttttattggtataattttttttttttttttttttgttygttygttttttatttttttttttatttattttttgttttygtttattttttaatatatatatttatatttttttygtttygttttttygttttygttaggttttgatgggtatagtagattttgataaaaagataaaygaagttattagtggggttgatgttgaagaatgaagataataatgtttttataggtggtgttttaaatgttattattttttattgaatatttaaagagatttttyggtaaagatggatttgygtatttttggggtgtgagyggttygtattttttagatttyggggaaygtgtaygggagtaygtgtaaatttygtattygtttttattttataaataggggttttygtatatttattaatttatattgttttaggtataygaaygygtttgtgtgtatttgtatatttttttttyggaatgtgttygtgtttggagtygttygtatttttttttaataattttggttttttgaaagttygggtttttygggtatygtatgtagttaggaatttagyggagttggyggtttygtaaagttttttttttggtgygygtygygtgygtagtaggaagttttygggaataattttataygtgtttgttatttggtttaygtgtgatttaagattaagtgtaggaaaaaaaaaaattttttttttttaaaaaaatattataataaataattaaaygaaatgaatatgygaaaagtagttaygygatgtttaattaaaaatgggygagtagagaygaataaattgggggatttaaattttaataatttttttygtttttttgygttttygayggygtagaggygggygtttygatttgygtttggygtttttygttaattttttgtttgttttttttttttyggtggtttygggaaaggagatgggaggtggaggagggggggatgggaggagggggatggtyggaatggyggggagaggagaattggtttttattgttgatggtaatatattaattaygggttattgtttyggttttaagtttygtggttygttggtgygggygttgtagtgttagggygttggygaggtttygygtgtygygatgtaaagaaatatattaataaaaatagaagtagagtgggggttattttttatttttgtgygggtygaaagtaggyggygagygggagtgaggtgttatttttggagtttttttaygygttttgtttattttagagatttgygygttttaygtgyggtagtatttttttaattttgggtggaggtggggtgggggggggattattggggaattygggtagygaagtttggatttgtaggtttygttagagggtttggtatttaggggttgattygtaatagygaatggggatagttygaagtgaggyggtagttgygtyggggtygygattttattggyggagaggaatygtattygggggaggygtttggyg

SEQ ID NO: 6274 - DNA, 2372 bp, Artificial Sequence
  Description of Artificial Sequence: Synthetic polynucleotide
tygygattgygtaaatttyggttttgatattttagttttaggttttaatttyggaagggtttaggtttaagtttgtaygtygygttgttatggygatygttggttgtttttttygttttgttttttgagtaygtggtattaggatttygygttttttttagttygagagttaggtttggtttagagtygggtttattagtatttygtttgyggygttttttygatttttygtygtgttttattaggttygtttatttagtagygatagattttygtygttygygygattttatygtttttattttagttttttttygagggttygtagttygttttgttttygagygtgtttagyggttttgggtattggygyggttttatttagttatgtagtgtttttttatatattggtygyggttattggttgtagattygtygyggaaagggggygttttgagtttygttygtaggtagygygtttygagagattygttttaaggtattttygtaataattttgtgggggtatttaattttttygtgygtyggttaagatttttttatgttttttgtaatgtattagattagggaggtaaatatygaaggtatttgtattgygtttttattgggatgygttgtgygtaagagayggggatygtttgttgtaaaatyggatgatyggagaygtagggagttaggagtgggtttttttaggatttattttatgtagtttttatatggtttttagagttttgatttygtggttggagtgtttgtttttttttaagtattggtagtataygggtattttgtattgtaygtagtatatgttgtggttttttagttygtggtttgtgtaggtggagattttgygtgggtttagttttyggtttataygattttgggtygggggtattaggyggtgtttggttaggggttttyggggygggtggtagygtaggyggtayggatygtagtagaagatatygtattgttygtatatgayggtggtttttttgggygttttttygtagagttggtatttgagggtygyggttttgttttgttggtagyggttaattattttttttagtaygygatttttggggaagtygyggagttttyggttatttaggatgaggttgyggtgatattgggggtaggtgatataggagttgyggggtatyggggttagggtyggtgataagtgggtggtyggtggyggtatagtygggggaaataygyggaygtygttgggggatttttggtayggggtagtgggggygttggygaatttttygtaggagttatagtygttgttygtttygttgtataggtttattttgtttaggtttagatagttatagtyggagatttyggagttygyggttygatggttttggggggatttagattttggggtttgtattaggatgttgygggygtaygtttgatataaattgtgagagtagggtaggatgatgggttttygatagaaggagtygtatayggggtattttaattttttttttattttttttatggggatyggtttgggaggagatagygayggttgtagygggtgtttgagttggygaggtggtygaygggttygttttgtttagtattttggttagyggyggyggttgtggtggtggtgttttttygygtagtattggtayggatatttagagaggygttagttttgtgagtygtagtygygtagtygtygygtygygygttagttyggatygtttttatttgtttttttagtttygtttyggtttatgagtagyggtttattgggyggggggtaagagatygaagtttttattggttattagattygttygttttttygttttygtaggttatagggggttyggtagagtttgaggatagggtagttttygttygyggttgtaagatttttgaagggggtyggygtgyggaggttaggggatygggaaggaggagttaggygggatgatttattttygttyggtttattttygattttyggtgtagttttttaggagttgggggygtgagaaattttttttygtagygagtgggttgtyggagggggttggggtttttygttagygtttgygtttggtttttagttttgagtttygygtttatttatygygggygagtgttgygtagtayggaggaygttttttttttttygttgttggtagttttygtaggygttttattygggtttaggtttttgtayggtagtggggttttttttttttttygtgaattygttgaygtygtgttttggagtttttttatttygggagtttgayggygttggygtaagttttggygatatttttggttttttttattttgygtttttyg

SEQ ID NO: 6275 - DNA, 2372 bp, Artificial Sequence; identical to SEQ ID NO: 6274
  Description of Artificial Sequence: Synthetic polynucleotide

SEQ ID NO: 6276 - DNA, 2372 bp, Artificial Sequence; identical to SEQ ID NO: 6274
  Description of Artificial Sequence: Synthetic polynucleotide

SEQ ID NO: 6277 - DNA, 2142 bp, Artificial Sequence
  Description of Artificial Sequence: Synthetic polynucleotide
tygagggtagygtttygygtttgattttttygtaagygtttatttgtttttaggtggttaggaaggygtgggtgggggtaaagygygtagagygygggaagttagygygtatatagygggyggttaggtttagtattgygggggaggtgttttttyggtataggattyggtttttgtygtggttygtgtygatgttygttagaaaaggggygatggtygggaagtyggtggggaaattatagtttatatattgygtttttttggggaagttttgagtggagatgatgtygttggtgtttatttgggagaggagagggataaaaaggtgatagtygtttaagtttaaggaygttattttttygygtagggagggaagggaattgatttaggtaaaaagtttttttttttttttttattggttagggagtttggatttagggaaataagygtaatttttgygattgttttagtttygygttgtagtaggtttaggggttttaaaattygtttatttatttttttattttttttataatttyggagttttatgttttyggagaggaagtttttaggtttgaagagggaatattttagtttygtagaygggtatagttttttygyggttttaattgtaaagttygttggtygttttagtaaygttattttttttgtttgggaygygtaygtggttgygaataatttttgtttttttttttaggttatttttgtttttttatagtagyggggtaggtagyggtatygttttttggtygggtattatygtaagggtgttggggggttttaggagtggggtttgtttttttttttttggaggtagggttttygtgagatygattttagggaagaagttgygggaaaagtgttaggagggggttgaatttaygtagaggttgttgaatygggtttygtagaagtgtaggggattygttagttttattayggttgagttttygtygtygtttttttgtaggagttggtttttttaygatttttygtgtgggaagagttygtttgggtgtagygtygyggttygtaatattagtaayggtagtagtagtagtattggtaaygaygatagtatyggtygttyggttattyggtttttttttatgttygttyggtygtgygtttattygttgtataaygygtttygtttyggtttttagtttatttttygygtygygttagtttygaatttggattttygygggygtttgggyggggygggattttaggtttatttagtaagttaattggttgaggttttyggttggggattaattatyggttttgagaaagttyggtagtggttattatatttggttttygttaatttttttaaggtagyggtygttggagtagyggggttggyggggtaaaagtttttggttagggttgtttggagttgttttttttatttygtttttagggagttttygggttatttttttattygggttgtttygyggtttttaaggagttttattttygggattaaatggttygtaaggtttggggtagyggygttgtaggagatgagtttagygtaaagggaatttygtagyggygagtgyggttgttggtttgygygttgtggttttaataggttggtagggygygggygggtggyggggttgyggtatgagttttgttttttgttttggggtttygggygtttttggttttggaggtttggttatyggttygaaaagtaaagggatattgtygtggttttttyggtygtttygttttatttagagaygttttgaggagaagygagtttttgtaygaaggtagagggttgatttttaagttttgtttttttttygaaggtyggtygttagggaagatttggttattttttggaagtattttttttygggaaaatygtagtaggaaagattatgaaatattattgtgtgtgattygtttygtttggggagtaggatgaggtatttygtttggttattaggtagaaaggggygagtygyggggatgggaagattttgattttttgtttattgttgyggtygtyggagatgttttttttygyggttayggaggyggtaatttgagttgtttygtaggattggaaatygtataatttygaaattagttgyg

SEQ ID NO: 6278 - DNA, 544 bp, Artificial Sequence
  Description of Artificial Sequence: Synthetic polynucleotide
tygaatttgggyggtygtygggtagttttttygttygattatggygattgatagtgagtgygtttyggtygyggaggttaggggtggggggaggtygyggtgtttagggtgggaagttygattttagaygttgtttttgtgttggttygyggtagtagyggtygggttttttttygttttttatttttggttgtttggyggggtttgaaagggtaggtggttttggyggygygtttygygagggatgtggtagaagggygtgygtttggygtygaggyggagggattttygatgtygtgtggtagyggggtttgttatygtagtttttygygggtattgtttttaggtttagagttagtttttagygagtygggtaaaygaaggtattgygygtttttggygttgtgagtttaaggttygtttygagttttgggtygggtttgtgygtttgttttttggggattagggtggtttgtatggttyggttgttyggtggtttaygggttgtattygtagygggtagtataaggtyggttggagatyg

SEQ ID NO: 6279 - DNA, 2002 bp, Artificial Sequence
  Description of Artificial Sequence: Synthetic polynucleotide
tyggaggttgtgtyggggttygttaaaggttataaataaatyggaygggtgggaagtaygttttagyggygattggatttttaaaaatttgttggtagagtgaaaataaaaattgttttttaagttggtaaaatyggygttttagayggtgygtaggagggttttgygaggtttgttttyggagtttygygttagttttgtaggttyggttgggttygtagttyggtgttttattygtgggtygggttyggttgyggggttttttygtagtygggatatttaggatagtagyggttggggagtyggggttaggggtttttttgtaattttaatgatttttattattattattygtaaaggataaaygyggttaaggtygggttttatagtggttgtgttggttatygygtggaggagtgtgygttaatttaggggygaggggggygygttyggtgtttyggggagagtttagaaggaagaygttttatygtggtttttatagttagggatagtttgggtgttagaaatttttagagagaattygaggggttgatgttttgggttattagtttttggtgtttgtggggttttttgygygtttatttttatttttttttttttttttaggttygayggattttttyggaggtttaggatagtgatttatagtaagtggtgatagtggaataaygtgatagttygttgtatttgttagttggtttttgggtaggtttattygtygggttygattttagagtygagttttyggagtygtygggtaaagttttttttttygtttyggtgtagtttygygtttttygygttyggygttgtyggggaaaagtggtataataggaaagtttygttagagggttttttttagtyggttttttygttataaaaagttagattttagtygaggttttgattttttttaaatataygtttttttgttygyggttygttattttygttygggtttygggttgtgtagtttttttttaggtttgttygggtttatgtttttttygaagyggygggagtyggtgtagttttaatttttattgygtgttttaggtygttaattagttttgttygygtgtygttggttyggaggttgtygygttagtttttgygtgygtttgagygygttggagtatttgygaggttagggttgtygayggygagaggatattttgaggaatayggtgttttagtttygttttygtttttygttygagttggaggttggggygygttgagtygtagygtttggataagtgygygggtyggagtygtttaggtttgtattygggggttygyggtygaygtatgygtaygygyggtggygggtttgtaggttygaaggttyggttttttttttaaattyggagyggggaagtttaggggttgagagtttyggttygggtygtaggagttggggagyggggaygygggtaggttaggtttttttatttgtygtyggggttttttttygtagtagtaaaggggttttagtgttygtggtagtgtatgttttagyggataygttggtttttaaatttagagattagaggggyggttgagaayggggygttygttgtgtgtgatttttgatygtggaggaagggygggagtygggagtaggyggtggggttyggggttaggtygyggtygtyggttttyggtaaaggygttttggtyggggaagggggygagggtgggyggtyggtttttgtygtygtagttatatttgggaygttgaaatgggttttggggatagagtttatttttagygygttttataggagaagttygtagtttaggtttgggtygtgtagatygttgggygggttyggggttygaggagagtaatayggygygaggtttagtygygagtaataatttygatagtayggtttttygaagaygtgtttygggtatyggggttgtgagygggggagtttygggttttgggttygtttggtayggggygggggyg

SEQ ID NO: 6280 - DNA, 983 bp, Artificial Sequence
  Description of Artificial Sequence: Synthetic polynucleotide
tygttttttttyggtttttygagyggagtgggtaagggaggggggtgaggaaggtaygygatgttttygtygttyggygttttatyggtygtagyggtttatygttttygygggttgttygtyggtygtagtygygttyggggtatgttagttygtygtygtygttttttygtyggggttygtgggttygtagttgttagggagttgyggggtagygtatttggagygyggggtttgggagggagggtgtttggggttagggygaggggtttygggaggggttttttygtayggattttagaaagagggaaatttygatttagagyggtgattggaatttaygttygggagaggttyggagtttyggtygygggyggygggggatttttgtaggaaggggtaggaaggtaagtagttyggygygttttggyggtttygagggatttgggttygggtttgyggtygygtygtttgggttttttttgggttgggagygygtygggttttygttttgtaygttgttatygygggagaygtttyggtttygtygygygtagaggggaygygyggagaggttggtttttgggygagyggagagttttgtttattaagttgtyggaagaagttaaattaaaaagttaatttttaagtttttaaayggaaygttattttattagttgggagatagygtygtattgattgataagtygygtatatttattttygygygyggaggggagatttttagaaygtttttygattagtagygaggaagtygagttygtatttygtatttygtatttygtatttagagttttygagggaygaatttagatttaatttttgtttygyggttatttattttagtygttggagtttggygttygygtttttyggtyggtagtaygttaaaayggyggygygttttgatttggatttygtygagttgggagttttaggtagtaggygggygygyggtatyg

SEQ ID NO: 6281 - DNA, 947 bp, Artificial Sequence
  Description of Artificial Sequence: Synthetic polynucleotide
gyggagygygttagagygygagggayggagggagaggaggagygygggagttgyggaggygatttygygaatttattattgtaaatatattygggggtgttaggaggggtaggggtgggggtygyggygtttatattagttyggtygygtyggattgaggtagtagtgtggtttgagtagtttttagatttaygtygggygggygtagtatttggagygagttttgygttygttttygygtagygtygtaygttyggtttygagttgttygtatataygygtyggaggagagttygtttagttttttygtygagtttygggattttttaaattygaggagtttyggygtygyggggtagttttttgtygtttttttygttygttgtattttttttggggttygttggtttggygaagyggagagggggaggyggaggaggagagaaggygggggtygyggyggtygaagttaagagaaagtggtatgttygaattttggaggyggtggtggyggaggaygggggaagaygatgtygtagtttygtaggggaygtaggygagagtaagygaggygagttgggygtttyggtttyggttygttgyggggaggygygygtygttttgaggtttyggttttygtattttygygtttygaygttgygggygatagggtttggttttagtagtygtygtygtygtygtygtygttattyggaggatttagtaaaagtttggatttgggggagggygyggygttgagygggattattattagggttggaaggagatttygagaatttttgtaggtaaygygygtttttaattttttttttttatgtttygtygttgygttttygtttttttttagagttttttttggttttygygggtttggtagaaagtaagagggaggygaagtttaagatttyggggatgagtatygagyg

SEQ ID NO: 6282 - DNA, 1362 bp, Artificial Sequence
  Description of Artificial Sequence: Synthetic polynucleotide
gygttttttttattygygtttttaggtttttatgtaygttaygtgggtgggagygtgttttatatattygygygtttaaagttatattygttaygttttygtyggggygggtttatygygygtttttgggtgtygagtttttataggttatatagtygttatttgttgttgtatttttattgyggggataggggtatttagtgttttttttygtttttttygtttygygaaggttttttattttttagggttaggyggaggttaygtttttttygggttttttttttaaygyggagagggaagyggagggaggagtttggttygtagtygtyggtttttttygtattggagttttttttttttttttttttygtttttyggttgtygtagttyggttygtagygygygttagygggggtttttyggagygagtygttaggtaayggggttggtttygtagaygyggggtyggggaagttygygygygttattagtagyggygtygyggggyggggggygtagagattttttttaatttyggtttgttattatttggttygygygtagtttyggtttagaatgttttaatttgygtygattgttgtygtygaggtgttttttttttgtagggatttygaygtygttagttttttttttttttttygtaggtgygtattgttgtgtttgyggtygggtgggygtttygtygttgyggtygyggtygtygttggtaagttgygttttggggtttggggtaggaagtagtggggggygttygaagagtagggtagttayggttatygtggtygtyggatyggttatgtgttaaagtttttggggttyggygtttygttgggygygtagygyggggagtagaygygtygtgggtggggtagygyggtgttgttggygttyggttttygyggggtgtagttttgygygtttttatgttgttttttttttttttttttygygttgttttttygaggttttttygtygagtttyggygyggggtatgaggagttttygggtgtygtttagagattagtaggttgygygtatatttagttagyggtagayggggatatgagtagygygtayggggtttygygttyggyggttagttttattyggyggyggttagygggttaaygttgttygggagaatgaggtaggagtyggyggtagtttttttttttttttttttttygtttttttgyggtttyggygtttygggttygggtygggttgyggttttgttgygtgtttygygygttttttaatygttttyggatgygtttttyggtaagttaggtttttygtttygygaataaagtttttttygtagggttyggaggtyg

SEQ ID NO: 6283 - DNA, 1092 bp, Artificial Sequence
  Description of Artificial Sequence: Synthetic polynucleotide
tyggattttgggaggagygttggygtggaaagttaggttatttygattttggtttttaggttygggataaygtgttagttttaagagagygttgtttatagtttygggtgggttgggtttaattgtayggggyggggygttaatagtttaggatttgggttgtaggttggtttttgtattaattagyggggyggtttygggttttagtttttttatttygtttaygaagggaggygattgygagygtttggggtttttgayggatttygtttygggggtggggyggggagtggttaygtggaggggygtttygttygtygagtttygttttatttygtttygttygttttygtgttyggggtttttygtttagtagagatttggagttagaagtttagagatagtygagtgygtygtgyggttttyggaygttygttgtttagttygattttygttaattgtgtaggyggttgattygtagyggtagyggtagtagygaggattygagygttggttgtagygatattatggattttttttttatggtygygtaggtaayggggygttttttttaygygtttygggtygttaagtttggggaggttyggggttayggtttygttttttaygttggggttgggtagtggygttygttygygattygygtttyggttttttgtttygagtyggatatttttatttggtgtaygygtygggggyggygatygyggttttttyggggtggggygggttgygygtttygtattttygyggttygagttgttttygttygggtttttttygttggtaggaaggttgygaggagtttgggtagttygagtygtttttttttgtttattttttattgttgttttttttttggggtttyggagttttttaaggtygggttagtttagattygygygaaygtggatgggtatatagtttygtttttttttattttgttttttygaggygttagtaatttgttttttgtyggtgatttygggygttttttttgtygtygtttgaggaaggttttgagattygttttgtgatygtgattygttaagygtygaygygtygyggtyg

SEQ ID NO: 6284 - DNA, 1092 bp, Artificial Sequence; identical to SEQ ID NO: 6283
  Description of Artificial Sequence: Synthetic polynucleotide

SEQ ID NO: 6285 - DNA, 1092 bp, Artificial Sequence; identical to SEQ ID NO: 6283
  Description of Artificial Sequence: Synthetic polynucleotide

SEQ ID NO: 6286 - DNA, 580 bp, Artificial Sequence
  Description of Artificial Sequence: Synthetic polynucleotide
tygttygggttygyggattgtygggtyggtttttagttatygtataggtgttttggagagtgygattattttttgtttttygtttygygtyggttttyggtttagtgtttygttttttttggagtayggtttgygtatgygygygttttagggtttagttttgtttttgtttyggtttttgyggggatggatgttttaygtagtaagygagtaagygagttttggagatyggggttttgggtgtgyggtyggtttagtgttaygyggtgagataggtatggttattaatttaygttaaggyggttgtgtatttggtatagaaaatattgttgttgaatgttgtttttatagttattygttagygtttattgatgagaggtgttattayggatattyggttttgtttygtygaagttttggtttattaggattaaagttaggttttagygggtttttttgttatttttggayggtttygygtttttttagagtttgatttttttttatttttgtagtttaagtygyggaagygtagatattyggtttttttygygtgttttatygggtttttttggatayg

SEQ ID NO: 6287 - DNA, 888 bp, Artificial Sequence
  Description of Artificial Sequence: Synthetic polynucleotide
tygtgggaggttagagygggygttgttyggygttatttttgtagygttyggatygtttygtataggtaggggtggtgtttttttttyggggtatagaaaygttatatttygggggygtygtttagaggttgtttttgtttttgtgtttttttatgaggttttgttttataaaggtagtttgagttaggattttaaagaggtttggttatygggatyggagggagtttygttttttaggtyggttttgtaaaygygagtttgygttaaggygttttgygggtttgttggtggtatygaggggtagygyggggttagygttgggagtttygaatttataygtttyggttagttgttygggaagygtttaagtataygtttygagttttagattggattaagttgtttaattatttattttttttttttttaaggagaagtttaattggagaagattyggtttttttygttatggtaggttttttttttttgattygtagttgtaggggttgagggtaggygtaggttygttttggggtygaagttattatygggtttygaggttgtttttttaatattyggtttgtaygtttggygggggygtaatagtgttttayggttygggagttygtttttggtttttgagtaaggtattttttttatttgtygtgtgtttagttgaatttagtatatttttttygtatttttygtttttttttttttttttttgaatttgtttttttgttttgygggtttttaatttttttygaatttygggygttyggttyggtttaggygagygttygyggttggggaygygggtggggaygyggyggtttgggygttgtaggatgygtttggtygyggaggagaygattagggagygggtyg

SEQ ID NO: 6288 - DNA, 1483 bp, Artificial Sequence
  Description of Artificial Sequence: Synthetic polynucleotide
tygaatattgatatygttttaaagttgtaatttttyggtttygttayggttttttatgtataaagagagggaattagtygtyggtgatttygayggttttyggattagggatgtttygagttygagygggtagggtgtttagtagggttaggtgatgggaattatggggttatygagtayggattttggttttttyggtggtttttgtgagttttggggttaggyggggattggaggagygttygygtygggagggagygtatygygttaygtgttygttyggygtttygtttttatttyggttaygtttttygygttttttttaaagtttygttttttagtttygttattttygttygtttygtttttygtagttttaagtttagygttttyggaggygyggayggtggggtttygygttttttgtgtygggttttgatygtygygygygtttatttattttagyggtygygggyggaggggygtaygygygygtagttttttyggagggyggtggggygaatagtaaygygygtattttagtttttggttgttgtgttgagattagttygygygttygygygtttttttttygaggattyggagtygttygygtattygttaggggtygtygtttygagttttaggyggaygygtaygygttttygtygttyggattttagtyggttygtttttygtttttttatttttyggyggyggtttttaggtaygygttygygtataygtyggttygggtaygygttygttaagatggtaggggtyggggtttagttgttagtygtygtygtygyggttttttttygtagttagyggtttygaygtttattyggagaagatgagttttygttgtttttygtagtttagttagaygyggagtygtygygttyggggtyggttttttygttagygttygygtttygygtttygtygtygtygtygtygtygtygggtygtttttggttyggygygttygttttyggtagygataatgaggtgagtyggggtyggygtttygtgggaggtggtagyggttagygtyggaggggttgggttgggggttygyggtgttttygagggygggaggggggttttaygggygygggggtttttagagaatygygggggttttgtagagattygggggtatttagagygygggaatggtttygygagagtygtgggggygtttggagagtygggagggtttgtagggtttgtggggggtagtgttttgtaaggggtaggyggygttggttttggttgtttgtggggtttttttaggtttyggggggtttgyggyggtttgggaggtagattttygygggtaggtgtggtygtgtttygatygygygaggatygaagttggyggaagtttttgtgyggtgttttttagttyggaggaggttggtttgaagtttttaggygttgtygaagtttttttttgttagygtttagagtygyg

SEQ ID NO: 6289 - DNA, 3714 bp, Artificial Sequence
  Description of Artificial Sequence: Synthetic polynucleotide
gygygygaggttggggtagtttataggaggagygygggattygggtttgagtttgtatttaggtagagygtttattttygtttttagtttyggattttgaaagtaaagtygtygtgttyggtagttagttygaattttttagtttttagggagtyggggtyggggtagggaaggttaygggtggyggtataatygggattttggagtggaggygtagattgygggtttygttgygtaygtttygtggttyggttggggtgggttttggaggtttataggttaaggttgaaygggggttttggagygtgggyggggtggagtgtataggttattgggttttgagygtttttatgggttaggattttaaygygtygtgtttttaggatagattggagggggaaggggttgygattatgttttagtyggaagggttttatagtagtygygttgttttttttttgtyggatattyggtagtagatatygaygtttgggggttagygaggtaggtgggygyggatygygattygattttggtttttaattttygtttagtggygygyggggtygtygttttatatttttagttygygtggttggtgtttggttygtygtyggggyggaaggggygttgtyggygtaggtgggyggggtyggagygygggggygygyggygyggagygagygtagggttygggggygyggggygyggaggatygggggtttgaygggyggttttgygyggtgyggggygyggyggyggygggygygyggttagtgaaygygygggyggggyggyggtggygggaggtattaggggtygtttttygygttttttttttttatggygttgttttagtygttygagtygtttygyggygygtttygtaaggtttttagtttgttggagatgggggygttttgtttggattyggagattattttgggttttattagttattttttgyggygaygaggtaaggtgagggttgtygggaggggggygggyggygtaggygtygtttygttattttgtygygyggttygygyggtygggggtgttgygtygggaaggagayggtaggttyggagtygygtttygtagttygggttgggattygttgtygtatttttttttattagygttgtttaagtttttttttgtttttaaggttgtgttttaatyggatttattyggaggttgtggttagggyggagagygtagygtagggattttygggtttattttgygttttgttaggatgggygaagtagggggtyggggtttttgattgatygtgagttttygaggtgattttagttttgtgtatttygtgttttgyggatatgggatgtgagtttgtgtttttygaagygtygyggyggtagaagygttgaagttgygggtgtggttggttaggggygtaggatyggtgttttygatygttgygtgtttttgtgttgygtgtgtgggtggggggaygggatatagagagtgtgtgtttyggagtagtggagyggygggaggyggtgttgtttgtyggtagtgyggggtggggtttgggtgttgtttttagtatttagatttagatgtgggttgaygttygtttttattttttaggttgygaagagaygggtaggggaagygttttyggttttttaggttgggtggaaagygattgtaggtttayggattttagaaagagtggagagtttttgttattttattttatatttttttgygttttygaatttttaaggttattaaygattyggaaagtygggaggggattatttattttattttttggggagtgygtgygtgggyggggaggtttatttaagtaaaagggggtgggtaaaayggaaagggttattttgaygtattgagtttttgygaaggttttatygtatgtgtyggtagtygygtgttttggttttygtygggttaygattttyggagttttygagtgygttttaggtttgggaygygyggygttgtttttttagtttyggagtygtgtgygtagyggtyggtagggggtattygygttayggggagttygttygtygygttygtttggtttgattygggttttggggttgattyggagtttggttyggagttgtttgyggtygyggatgtyggygatatttggggttyggttaggtatagagtaattggtygttagggaagggygggggggyggttttttagtyggagataaataagtaattaatttyggagttgagtttttatttgttaggtttgttgataataggttyggygtaygttygtaggatttttygtttttygggyggtayggygygtatatttatttgygggtataygygyggttgtaaagataygtgtygttygtagaygygtygaggtatagataygtyggygyggtygttgttyggttygaggygtatatygyggygatattaatttaygygygatagttagatttaaagtggttygygatatgtagagtaygttgggtttgttggaaaggygtttgggagtttyggggtyggggtttygtttttttttyggtttatttygtygtgggttttgggtaagagygtttttttygtagttttagttttttygtttgtagagggaggggygtyggygttttttgggagaygygtagttttggtgtttygggagaggggygggaggygtatgygygygygtaattagattttygtygtygtttttagygttttttttyggggtagggatttatttaataggttggggtttttggagtgygyggggtygygtggggaagyggggattttattttttttaygygtygtttagtattgggtaagggyggggtattttttgggttttygtttttygtygttygtttygggagttygagtttygttttttttyggtttygttttygtttttygagygygtttatyggagttatygygtttttygygatattygtaggttttgygaattttygagyggttgggtygggttatgggggygtttyggggtyggattaygtagtygyggygttttyggagagttagygtggtygggagygtttgtygggtttttttygygtttyggttatggtyggtygyggygtttttttgtgygttgygtagttygyggtaygygyggttyggtttggagagggaggygggyggygggggttygggayggygaagatattygyggtgtgygttggatttttgggggtygggttttttgttgagggtagyggattygtaggygggattttyggggatggagggagtgggtgagygttagggtygtgtttagggtttttaattttggtaagagygttaygttggggtagggygygtaggggtttggattygayggaygttttaggtttattgttygttttygtttttatattttgtaggtggtygagggyggttyggttygygagtygtygtygttgttggaggtgttttttygaaagaggttattygtygggttygattaggatttatgyggtagtygttttgttttygaaggygtyggggtyggtttagagtagggttattyggtyggyggaggyggttggtgtygttattgttataygaagttggtggagtttaagygataggygtggaagttggttagygggttygggattatttttygggtaagtgatatttttttaggtygattttttygagtagggttaygtyg

SEQ ID NO: 6290 - DNA, 1266 bp, Artificial Sequence
  Description of Artificial Sequence: Synthetic polynucleotide
gyggygaggagggttgtaggtgaagygyggggagagggaggtygttygtttyggttttttttttaggggttttgyggttggttagygtttyggttgtattttttggtgygygtygyggyggygttataggtttttygattttttgattatygttttygggtygygygttyggtagtygggatyggtgatggygygggattgayggtygtttttttttagatttttttgtttygtttggggttygttggggttgyggygtygtttygagttgtatgtggggygggygygttygagtttagagygagyggttttyggygttttygaggyggtgtttygtygygttagagtaygaggaggagyggygggtygggttaggttttttaygygtygtagtttyggagtaygggtttttyggaggggatttggggygttttagtttaggaggaaggattyggaagtagaagyggagtygygagtygagtygagttattgttttygttgttygygggygtygggtgggggtttyggyggttggatgggtagyggyggygygggtygygggyggygatgggygaggagtagagtayggtgagyggyggyggygggttttaggagtygtagattttggttagtggtattgygggttattttgagttttygaggttttagggggatagygttygggygttttygttgygygtygttttygyggagtygagyggyggtggttgyggaagygattggggttgygyggatattagygttttagagttygygaggagtttggggttttygggttggagtaagagtygagtatyggygtagtttgygggattggtatttatygggttttttaatttttagattttgttattgtagttggagttggaggaggaagaggaggaagttggggatygaaaagagggaggggatgaatagtaggaggygtttttyggygaagagttggagtttaggattygygtgggggtygtygayggattggttttggaygtgttgggttagyggygttygtttttygttaagagataagttttttgtttygtgtattgygtggagagygatttgttygaggttttygtttyggagtagttttygtygttygygtygttatttggggtttygttagtgttgaatttttttagtattygtttttttttttttagttttygattgttttttttaayggattttttttttttygayggyggtagtatygagttggagttttatttggygttygagtyg

SEQ ID NO: 6291 - DNA, 1316 bp, Artificial Sequence; identical to SEQ ID NO: 6168
  Description of Artificial Sequence: Synthetic polynucleotide

SEQ ID NO: 6292 - DNA, 10783 bp, Artificial Sequence
  Description of Artificial Sequence: Synthetic polynucleotide
tygyggagatatttygagtttygtaggtgtttgagttgygttgygygttttagtygggaagtttttttttatttaatygygtygtttygyggaaagtttgggtattgtagaygtttttatyggtttatygatagttggttttgaagygggggtttagaaaagtaaaggggatagtgtttggagttaygatgtttttgatgtgaggyggttttatttaataattaaygaattaagttggaattgtaggttttatttttgttggggggaggattttaaggaatgttatttttttgttttttattttttgttttaygtttagttttttagaaggtattaggygtgagtagagtgygaggygtttatattttygtgttttttttattttyggatatttttgtattttagtygaggttttagtayggagtgagggttgtttggggtgttttgttgtgtgtggggygtttttgtttttygggttttgattttayggtttgggtyggygaggygtttttttttggygtttggattgtgygtttgtttygtttttaggygaygaayggtaggagtygggggttyggygggattyggatttagggygggyggaaggygagggtttttttttttyggaattttygtttyggaaatttgtaattaaatygggtttttttttygtatygttttygygttttygggtygtttttttaygygggtatttatttttygggttttygtagtatygtttttttygygtttattygygyggtygaygtygttaggggttttgagatygyggagatagygygttttggygtttggtggggtttttttagtggttagagygtttttggattagtyggttgtggtttgtgtttaaataygatggaaatyggggttgggaygggyggtggtaygtaygtggaggagaagaggtatggygggaaaattatagtygaatataggtygattygtattttttaggtattygtygtygtttgattygyggttttttttaaggtttygattygtygttattttttggtattatttatygggtttygattygggtygygagttygttgatgygtagttgttttyggyggttttygggttttgttyggattygygygtagagaygttygggaaygttgggttygggygttttttggyggyggtagtaygyggtataygttyggtttttyggttygagggggygygtggagygtaygygggattygygygygggtttgggttgttggtttatattttttygtttgttyggatggyggygttgaggtttattygtttttttattaataaygatgtttygggagggaaaaaatagagtttttaaaaattagagtgygagagaggagtgtgtgtgtgtgtgtgtgtgtgtgtgtgtgtgtgtgtttyggggygttggtgaaagtaataaaatttagatygtttttttggygagatagyggyggttataatgygtyggggggattaggggtttatttgtagattttggataaaagatgatatatygatayggtttagagtgttattgygtttggttttttagggagttataagtatatattttttgaaatatygtttagtatagtatttaattygttygttatttaatatygggaggggaattttagtagygtataagygygttttyggttttttggttttgggtggggagagtttaaatgagaaggatttggtatgtttagaygtttttttttttggtttttgtttttagtttaagtaattatttagygatgggttttaataaataygtttgagaattgtttttatgttyggtaaatattggattagttttttaatgattaggtttttgaaaaggttygagaaatatatattaggttttaattaagtttaatagttaataggtaaggaaataagttatttttttatttgaggtggggaatgttgggaagggggatttttatttttattaaattatttgattttattaaatatgatygttgtattaaataggaaagggggygtatttaagttttttattagtyggaatttttattagtttagttttgtttattaagggtygagtgattttgtggggaatatatttgggttttagtttttatttttatagagtttagtataaattatttttgtttagtatatatggtttatttggggattgtttatgggagttttgatttggtaattgtaggggagaaggtatgatttaaattattttygattgtttygygttaatttggatygtttagaggaggtaaaaaatgggtaaattttttggaagttttgttgtgtttttttggtattgaattttgtaagtaygygatataggagatattgaaaattaaagaggaagtattttttttttttaatatggggagagaygttgttggaagaagtttttgaagtggttttttatygtattaagaggttagtgggatggattttygygtataatttaaaggaaygygygygtttttagtttttyggggttggtaattaagtggttyggtygggygtaagtygttttggaatyggttgtagtttaagtttagttgggttygggattgagyggtatttttggttttttagaatttttttygyggtgagtggaagggyggtttygygygygggygtttyggggtyggtyggttgygaaattagggggtggatttttatttatttaggagtygttaagttygtaggggatygagtattatttaggttttgggtattttgagttgttttttgagttttaggayggttygatggtgtagagtttttaggtagaagttagttttttgatatatatatagtagtgagtaaagtgygtataagtgagttaaattttgaagaygtaggttygyggatttttattttagygttagagttaaggagatagaagagaggaaggagagaagtgaggaagggagagagattatgagaaaaagagattatgaaagtagagaaagagattatgagagygagattatgagaagagagaaaaagagagattttgagagagagagatagaatgagagagatttaatttttagtgttayggggtttaggyggggtaagygtttttygaagttattaaagataggggtggttttttttttttttttttagttttttttttaatagatatagtaygaatttttaatgygttttttttttatagataataatatagggtttgaaagtyggatataatttaggttttgtgygggttttttttygygttttttyggtttagttggttatatggaatttagtatggagttygtggatgataaagggatttagtgataggtttaataaaattttaaggagatttttgtttgatttygggatttattgtyggygataagygygttgaatggtgyggggtggggyggggggtggggggygggttttttttttttttttttttttttttgttttygygattttttttttgtttttttttaatatgtaygtttttaatattttyggtttttagtttttttattgtgyggttttgtatygttygttgtagattgggygaagatagattgttgaagyggatttygygtygggtgygtttttagggygttggggttagggttatatagggtttygtaggygtttttattgattttatggggattygaggatagagagaggygggygtygggtttatttttygggttttyggtyggttataggagygtatatttagattgtaggttygyggttttggttatagttttaaatttgtttttaatgagtaagtggtggaagtttgttagggtgaggattttttaygtttttttttttttttttggaaatttgagggttttttgtgattatttttattttggaagttttggggtttggaaaagttaaaatggttttaggttttttgatagtttygttttaagagatttgaaatttttatttttttttttaagaggattttgggattaggggaagttgtaagtggatgttgagtggttagtattagggtaggttgggygtttaattattgtataataaattatttgggagaaattygttggtttttaaaaatagtaagatataagtttttaaatattgttaagttagtgtggagaataaagggagattttttagtatttagaaaaattgtttttttttygaggatgagttyggagatgggaaaggatttttattggggtattagaaagattttygagtttttaattatttaggggyggtgtggaaygygggaataaagtgttatygygtttttgggttgttgygtagagtgttatygaygtatagatttggtygtayggataattatgtttgttttagatattgaattaaatttgattattaattatagggagygagaaagttagttgggatygttttttttgttyggtttttttattgttatttaattttttagttttgatggtgtagtttyggagagaatagagatataatttttaaatgygtygaygtttagttttttagygtttgtagtattygttgggttttgagttagagttttaagtatttttagaaattygygagatagaggagaaaggtttattttttagttggttaggttttttaagaygttttttygygtggttaagtgtgygttagtatttgttaaggagatttttttttagtaataagggtgggayggaattygtttttygtyggaaagatggatgygtttttttygggygtgttyggggttgtgtgtttattttttattyggggagtttattttatttttaaatttttattttttagtaatttatttagttttaygtttaagggttgatttggggggatygtatattttggttyggatygtygaaygttggagggaaggaggttygggatttagttttyggagagaggtttggaagttyggaaaggatgggagygtaagggaagggagaggtatggtttgttgggattgttaaagattttygttttttggttttttggggttaaagattttagggagggttgtagtattttttttttttttygagtttagaatttygygtattttttttaagttttttaagttaaagtttygygygttttgatygtttttatttttagttttagyggttttttaggttagtattagttygtagattttgaaaaggagtggggagtggggagaaggtagttagttttaattttagatttttatttatttatttttttagygtgaggtaagttaaatgtaataaagtgaaagttatygagtgtagtggttttaatagttttttaggttgaaggagttatttatagatttgggttagygaggggggtttgtttttttygtttttgyggttttygaagttattttttttttygtagtyggaygttgtygttyggggtttagatagygygygagattaggggagatgygggggagggtgggyggttttgggttttyggtygatygttygtaggtyggaggtygagygttttttttttygttttaattttaggygyggggtgtagtttgtggtyggaggggtttgtatygggagtttygttygttttagggtttyggtattttyggttttttygttygagaggaatygtttgtgggagtttygygggyggtygggttyggtttttaggtttaggttttyggttyggygtagtaggataaaygggagggtagggatttttttttttttttttttttaaatataggatttttattaaaatttttatttaaaaaatygaaagttttttgygttyggygttgttggggaatygygtygaatagttgagttttaagttyggggttgaaggttyggaggatagggtagagggttttttgtttatagggtttttttttttatatttgagaaatgtttgtataataaaataaaaagagaaaggaagaaagtaggggaaaaygtaaaaataaaaataaaataaaaaataaatttaaataagttataaagaaaggagttggatttagaygggaaataggtyggttttgaaggttattttggtaataattattatygatatttataaygaaaagygaaatttgttattagttgttagaaygtttatatggttataaatatttagtatttttttatttttttttaaaaaaaggaagaaattttttgtatttttaaagtgttttttatttgttttagaagayggttgataatatygttatttatataaatatattttataaaatgtaygaaagtaggggtggggggtyggtttttttttygtttttaagtgaygatattaaygttgggayggtttggttttttyggggagaggtaaagaagygaagttgygtaaatattttgtaaatayggygtagagtttagtttttttttaaggtttagaaggagaggtatgggtagagttgggtgggtggaatttgttattttaaggagaygtaggtaatttttyggygtttttttagtggagtygagagttaattygattttataataataattataataataataataattattataaggatygaggttttttygtygttatygtygtyggggtggggtttgggtttggggtygygagtttygttggggyggygtttattaagtttattgttgggtttggattagggggtgtgttgtygggtattggggggtgttggtygagttgtattgggygttgtattgtatgtgttgtagygattgygygttgtaggtagaaaagggaatgttygtttggaaggtggyggttgttaggttttgggttttgagygygtgatatggtttgtygtttttgattaagaygggtayggttattyggygyggygagggtaggggygttatttttatatttttttyggttygggygygttttattttgtagyggtggttttggaattagattttgatttgygtgggygtgaggyggatgaggttggttaggtgttygygttygggygtygataggtatygttgttgtygaaagygtygttttagttygtaggtttgygttttggagaaaagtattygtygttttygttttttgtyggygtttttttygtygttyggggtttttttgttattgttyggtgattygtyggtygagggtttyggggatttggagtttgagttttgagggggygtttyggtagttagatygtgtattggggggagggggagagagaagygygttaggygtttggaggtygygygtagtttgtattagattyggagtattttggatttttygtgygattttggattttygygtttggtagtttagtttygttgtttttgttatgatttttgtttttttttaygtttgaygaagaygtygggattttttagggtaaagagggaaattygtaggagtgggggttaggggttygttttttaaggggtttatatagtgtgggtgagaatttggggggggaagtggtattgaagattatygygggttaagggtttyggygtttttaagyggtttttttttyggygagaygtgggtagatttttaaaagaaatattttataattttagtattgatyggttyggttatttaaggtaggtttttgggggttttygtttttgttttygggttttttagatattttttgtattgtataaagygttttttatgatygygtagggggtagggtgagttatttatattygggttattygaagtttttttattttttattygtattyggaygaggttygttggttatttttagggygttaggttagttttttttagyggtyggagttygggggttgyggttggagttatyggttygggttgatattatatattagtttttgggaggtatagtttttttttttttttttttttaatttttygtattgaaaaaaattttggagattaagttttttttyggaattaaggaggtttgaagaggagggtagaggatattttatataggtgttaaaaatttttttayggattygagtgagggggttygggtttatatggttttttttttttttatttttagygtttaattygggttgyggttgtaggaatggaggggattayggtttyggtagttaagttttgttatttaygggagtattgaaggttttyggtgttggttagttagygygtgtaygggttgtygttgttgtygtagaaggggttttttaggggtaggttttgtatygygtttagggygttttgttttagyggttyggtttttttggttggttygggtttttygtttttttttttyggattttyggttatagagttttttttatygttggtgttyggtaggtttaagatgtttttgatygaaaatttygtttttgtgttggttagygatatggttygagattttaaaatttatgtygtaaagttgtagttttatttggttaattygtggygtttttttgttttggygggygggggaggggggagttggggggagggattgggggaggggaggggggaattggttttaattattgggataattattatttttaaaaagagaaagaaattggggatggggaggaaaaaaatgaagtttaatttagtgtttttttttgttttttttgaaagtaygyggaaatggaygtaggaagtygggyggtttgygygtygagygtygygggtttyggttttagtttttaattttaggaggggtgttaaggyggygttagttygggtttyggyggtygttyggygygyggtggyggttggtggygaggaaaaaatgggttattgttygagygattagtttatataaggttgggttttatttaygaatttggggaggyggggagagggggagaaagagagggagggagggaaagaaagagggagggagggggagygagagagggagygggagaagggtggaaaaaagggggaagagatattaaaaaygtaaaggttggttaygtgtgggygggttttgggagttaagtggatgaagatagtatttgtagatgtgaaattgtgggttttggggagtttygygtttttagttaayggttttttagagtaagatgagaggtgtaaygtgttaattaattgtaaagayggggygagtttttttttttttaaatttagtatttatatataaagggttatygygtygttygygagtttatatatttgaaagggtygttttaataaattgtattttaaaaaaggtgggggtggggaggaggaggggagaaaataaaatagaaattaggaggagggaaaaaattttttttaatatttatyggtttttattttttygttttygygygtttattttyggtaagtyggaaaattggygatttgtggygtttttggaaaagggggagggggygaaggtygagttgyggaaattttttttttttatygttggtggttgtttaaataagattyggtttaaatggtaagagtttaatttttgtaagttttttaggttaatattttggttgaggtttaaggatgagtgttagaaatgataaggtaagtaattgattttagttaatygygagagagtttaaaatttaggagagagtttygtttygggtyggttagagttattattaagygattygtttttttttagtygttttttatttgttaaagatttatttattttttttatttygtttttttttattttttatttttaatttttygtttttatttttttgyggttaaggaggaygygtagtttattttttgttttgygggyggtttyggggagggyggggtaagagtgaggagttttaatttygtttggggtyggattttggttttgttgtttttgggttttgygggttttttttttygggtggaggaaagggtagayggttttgtttttttttgttttttattattttttttttttyggttttttttttttttagtttttggttagaggtggagtagygggaaggyggyggggygggattgygggggtgggggtgggggttgtgtttttagtttgggtgaagatttagaaagttgygggggaggggggtygttgggtggttygaygatgtttygttttttttttagttttttttttttaygygagttttttagtgtggtttttttttggaygttttgggtgygttyggagtaygygttttaygtttttaggttaagttaggttagtgtgaagtttttagttattttyggttttgggaattgaattttttygggatttgtatttttttttyggygttggggttggaaaagattaygtygtatttgttatttttttttttagttaaaatttttttggggggggggtgtaggggtgtagattggttatttgatgttygttygttttagaggagtgttaggaaggagttttgtttgggggyggggaggggtatagaaggttatttttgyggggtttaggtttagtttttttataatttgggttttttygygygggttaagttgagygygygggtatygggtttttttygygygtagttgtagyggaygtygtygygttttagttgttttygggttgttagygttgggtgagggtattttttttygagtygttyggyggttttttgtagttttagttgtttygtttttagtatgtgaygtgggtgataatggtttaggttagagtaagtttttygtyggygygttttgggtggtyggattygggtaaatataaatataaatygattgttaagttgyggataatgagygaaatgtagataaatgtttygttttygttggaagtttttgtttyggttyg

SEQ ID NO: 6293 - DNA, 810 bp, Artificial Sequence
  Description of Artificial Sequence: Synthetic polynucleotide
gygtaygggtyggggagggggttatyggatttggatttygggatatttygggggtttggggggygggtygygygtttatttgygttttygtygtygaaggagtttatgtaygggaagtagatggygagygtttygaaggaggyggatagattgaggyggttttgygagygttttatgttygygtyggygtygggygtttyggtygyggyggyggyggyggyggygggyggtttgggtagtttggtygttttatttttgaygyggagtayggygygyggygtggtggyggyggttyggggtygggtygaggtttygttgyggggttggygggygyggyggggtyggygggygggttaggagttggyggygygyggagttygaggygygttgtgttgttggyggyggyggyggyggyggyggtggyggyggyggtggyggygtagygygttttggttygyggygtttttygtyggtagygygaggygggtttggagyggygtygtagttaattygtgtygtygggggagggggygtygttgyggggygtgggagttyggagggygygggttgyggttttttttagtagttttygggttyggtaggtgygygyggggaggtaggygtygggygaggttgtttgggttttggttygagggttgttttygatttygtttyggtttttatttttagtyggtygatttgyggagaggtyggygtttagttttttatttagataggttttttttagagatattggygygttyggaggggatgygtttaaagggtttygtttaggygggtyggtattyg

SEQ ID NO: 6294 - DNA, 1142 bp, Artificial Sequence
  Description of Artificial Sequence: Synthetic polynucleotide
tygggggagaaatttyggtttatagtygggatgygttttygtyggggttatygyggyggygaaygtttyggatttygtatttyggtgattttttgggatgaatygaagtyggattygtattttggtygtaataagygygttttaygtygttaygtattagyggtgattttygagttttttgtygttttggttttttygtaggygggtttygaggttttygtagggagtttagggttayggttaygtgtagtygttttygagttygagtttgtaggttyggggttyggttygygttttggtggygttyggygaggttgtagygygtaaagtttttattttaagttttygtygyggygttttygtttyggagttggttyggtygyggttttygtttttttyggttgtttaygggttyggggygaggaygygagaggggtttggaagtygttyggggagttygttttgtttttyggagtygtygttaaatttyggtttyggggttyggtttagttttygttttyggagttayggtygtttygtttttgtttttyggttttygtygggtttygagtgygtygggagygyggygtagtagtygtygagggagggagygaggtaggaggygggayggagggaggggattgagygyggggyggggagaaggggygggtagtygaaagygtagygtttggtttygtttygtttygggatagtggtagyggygttatygttayggggygtttaggygtttaatygggatttygtattttggattygggggttttggygygtttgttggattgygtttttygyggttagtttttgagttygygttygggattgttygygttaygttttttttttygttgttttttttttygtttgtttttttaggagygattattttgyggttttttygtttgtaygygatagtttttaaggttttygygtttygttgttttggagttttaygtattaggyggygyggtagttttttagggtygygygttttgttagtttttttygyggtgtaagtgtttyggtggtttygggttygygtttttagtagtatygttttagggtttatatgtgttagatattaaaattttatttttygttgtttyggggtygygttttaygyg

SEQ ID NO: 6295 - DNA, 2885 bp, Artificial Sequence
  Description of Artificial Sequence: Synthetic polynucleotide
aygttgtagataggygygttgtagggyggyggttttttttttttggtattatygatagtygaggaaattgggttaataaagtyggatattgyggyggggtygyggggygtaaatyggygyggatagatgggttttygggggtattttgttyggttttttggatttyggatggtggtagagttgggagttgygtaggaygggtattgygtagygtattttygtttatattyggyggggtayggggttygtagtagtttatttattygtagttyggttttttttttyggaagggagaggggatyggtggggagggggtttgttggatattagggttagayggggtttttttttgatygttagggttaagtagggygygggttgtgaggatttttttttaygtagtttttygaggtagagggttygtaaagyggtttttatttaattttatttygyggaygttttaggtagyggatggyggygggggggggaggttaggggatatttaggggataaattttttagatttygaggtagtyggygayggygtttaatttttaaataaatagaataaatttttatttggaaaaggtttttttyggggtttttttgygttygyggtttagtttttttgtagayggttatygtgggtttttygtagggttgyggagtttyggagttatygaggtgggaggtgtyggttaygygygtttttaggaatagagtattgttttgtagtttagtaygaagggtyggttggagygggagygygaggtttattgtaagaggattaggagttagtaagttyggttttttttygtttttatttttygtgygttyggggttaggatygtttgttyggaatttgattagtgttygttttygtygtggttttgggatttygyggtggtttttttttggggaygaayggtagtgttygaaggatgttttatttattttygtttttagatttgttgggtttygataatatttagtgggtgtygygagttttygggygtagagtttagygttyggttttygagtttaatttygygtttygayggttttggygtttttygttgygttaaattgtttatygygtataggttggaagygaagtygggttttttttttttggtttgtagggtttttttaggttttttttgttygggtagagagatagttataggggygatyggaggaygygtgygggagggtygggggttygygyggttayggtttttygtgatagtgtttgtaaagygyggagggygtttyggagaaggyggygtatttgttagggtagggttttagggyggygtttgyggagaaggggtatatagtggtttggtygaagggygttaagggygyggygtttaygggygyggttaggttttggttttggttgaggaaggttattaggygtygtatttygtttagggtttgygtttgtatgaggatatagtttttggygagtagtagygtggygattttggagagtttgygtatygaygggttgtgygygtaggggatgayggttygtagttygtttagygygtygtttaggtygtgtatgygtygtygttygygygygttgatgttgagtygtagagatygttgttttygyggtygtygtygttygttygtygygttttttggttygygtygtygtygtygttgttygaaggygtygttttygttttygttttgttygtygttgtttttygtygtttgagttggggygygaggtgtaggygtygyggggaggtygtygttygggttyggagtgtygtagtygygggtygtttygggttttygygtygtttygtaggygagattygtagtygtygtygygtagtygtggtttagtgttaggtaygygtttttygatagygatttgagttyggttatggtygygtygtttgggttygggggttygtygggtgggyggatgtttatgtgggtgagtagttttygaggtyggttygagttygtygttgtygttgtygttgygatgaggttttyggttttgygygtyggtttggtttgtttgygggttttagagtttyggygttygttgtttttttygtttttttttttttttttatttttttttttttttagtygygaygygtagggggygggttttatttttttttygttttygtttyggttttaagtygyggaggygttyggtgggatttygttgttgtttaattaggggggatygggtgagtttttttttttggagtygggttttattagygtygtaggtttataggtygggggtgggggttttggatygaggggyggygyggggyggygyggggyggygygygyggttttggagygttagtatttgtttttygatttttyggtygtygttttyggtygtttyggggatttygttattaaaygtaygygttttaggtgggtattygtttyggttygtttttgagtttgattttagygtaagagtttttggygataygtaggggttagagygggggggygygtygtaatagtagtagygttagygttaatattttgtttygttgaggggtygtttygggtyggggttagggtygtgggygttttggtgtagtygyggygtagygtgtattyggagttygtatattttttgttyggggygttttgtggttaggtttgaggggtagagtgagagggagtttttagaatttgttgaaaaaygttaygagygttgtaggtyggggagggygggaaggtggagggtagygyggtttggggtttttygggggtgggaggggagttttgtgagttgtaggatygttttttttttgttagtygttttttgggtatttattagygaaaygygtgaggtttggtgggttttttyggagttttyg

SEQ ID NO: 6296 - DNA, 1460 bp, Artificial Sequence
  Description of Artificial Sequence: Synthetic polynucleotide
aygygtatgagagagtagagyggtagygaygyggtyggatyggtygygggggttgygggaggaagygttgtagggattygggyggygtyggyggtttagtyggagatgtaygygttgtaatagatygygttgttggygttygatagygyggagattaggttgtttttttttgggtaggatatggygygygggtttagtttggttagtgttaygtggtaygggagttygggggygtygggtygagttyggttgtagttgaggtattggtygaattyggtgaggtttaygtyggtttatagatyggyggygggttttagyggttyggygttttttagyggyggggtttygggyggyggygatagygggtyggggtaygggtygggygtgtttagggtgtygtagtataggttagygagyggygtygyggggggygyggttttgagygttttygttaggggagtttygtagtaatygtyggggtttygygataattyggtgggygygtagggygygyggaagggtygtagygygtagttttygggygtygygggyggtgggaagaaggtagtttygtygggttttaggtygtttagaggygagygttygggygtgggtagttttaggtygtygaattyggygtttagygggggtagttygyggaaggygygagtygagttagaygtygyggggaaaggttygggyggtggttgygggggygttaatttygggagtaggaggtygggttttagtygtygggttttgygygtttgttttttgyggygyggtyggtatttgtagttggggtggtygygtaagtgttgtaygygtagtygttyggttttttttaygaagggtygttttttygtygygtttagttttttttaygttttgtttgygggtygtgggygttagtgagtggaaygtygtygggygggtgggygtygagtttttygtgygttygggaygtttygygagggtttggygtagttttygtatttygyggttygggatttttgtttttttygttttatttyggttygagtttttttygtttttttttttttttttgtygttttttygtygtttatttagtattttgttgagtatygygttgtgtaggttygggttttgttgagttagtygtttgygttygttttttgtttatattatgaaggygtttatgggtygtyggatgygygattygtttgtygtttggygtttttygyggtyggtygggttgaggttatagygtttyggttyggggttgygygggggattgygttgygggttgggyggygaggygggygyggygggygyggygagggyggyggggtyggyggygaggtygygygtgttagyggyggtttygtgtttyggggtttatgtatagtygyggygggygggygggtygttttgtgygtygtagtygggyggygatttttgtattttagttgggygyg

SEQ ID NO: 6297 - DNA, 1560 bp, Artificial Sequence
  Description of Artificial Sequence: Synthetic polynucleotide
aygttttgtagtgtygggttttgyggygattattgagttttttygttttygtttttagttttttygttttygttttyggttttygtttttttagtyggtyggggttygtygtttaygatttygtaygtgtygtygaygtygttttgtygatttygtygtaggaggtggaattgtagtggtgtyggyggttttttttttggggyggyggtggygaggygttygttggyggygggtagyggttggatgaaataygttttttttagtaggtagaaggygtygygtaygttttygtagaggttgagggyggtagtygagttgggatygttatttayggtgtyggagtagaagtagtgygttaggtyggttttyggaagyggygtttyggattyggatttgygttttaygttttggagygtgaagtygggygttaaaaagttgttgtygggtygtagttttagatttagttgttggttaaaggygtgtaggyggaggygygtggtttygtgtttyggggygygttttagtttyggtattattagtttttygtttttttyggaggggygttygagtgygttygatayggttagtagygtygyggygagtagtagtagygtgggtattggtttaaagtttygagatttyggagttygtttygygttttttatgtygttgtttagtttgygtttttygaatttttygggtatagttygttgtattggagttttaggagatatygttygtagtagygtayggagygagggatttttagttygggtygggagagtaaagtttygttggtttgttttggattgttaaaattaataatttttattattygttggaagggygygtagagtyggttatagtygaagttttyggagttattaaaaggaggygttgtagttttgtyggygygygggaagttttttttttagygtaaagttggagatattgagaggtaggygtaggtagagtggttttgttgggataagaagygttttggggygttttyggggttgaggtaaygyggagattggtgtttggygttttttttyggttttygttttggttgygatgttgtttattttgtttagggttttttttttttygttyggtagygtattttggttttgtaatagtttttggttyggagtygttttttagygagtgtaagaatygggtagtygagyggtttttttatagtggattagtgaaatttttatttttattttattttttttttttggtttttttttattttaaagaygtygttttyggtttygttggtgttaaatygygtttygygttgygggttygggagggggagggggtagttttygygttggttttaygttattgttygttaatttaggggyggaaggggygttgtgattagtattttgtattgttggggtygttttagggagaagatttttttttttatygtttttttttttygtyggttttttggattattttttttttttatygttyggttgyggtaatttagttatygygttgggttgyggtttttaggagggagggttyggttggagaayg

SEQ ID NO: 6298 - DNA, 5118 bp, Artificial Sequence
  Description of Artificial Sequence: Synthetic polynucleotide
tyggtgtygggagttttgtttttygtygttatttttggttagttttgygtaagaaygtygttttgtttggtagttaggtygagaygtagtttgaatgtgagtaggaattyggagaagggaagggagagaattagaaagaaggttygggagggattygggaagtagtgggaggtttgygttttggagtttygygagagttygtyggtttggtaygggtttttttygggtygttyggyggtttaataaaggtyggtttygataygtattyggttttttgtgggagagaaatataaagaagagggaaaaatayggaggaggttaatagtattaggaygygggggttaattaggaattttyggagtyggggtttattagtttttgtaaatgagtattttattttttaggaaggggttttagttgygygygttggtgggaatygtagtgtttgggattygtttaggtygtttatttygggygtygggygtaggattyggataagttttggggaygtttttaggaygtattagggtaagtttgggtatygggatttaatttttagttatttttgggayggggtggggaggtataggagatatatygagaggtatttagtattygattggtattagggttaagggagtttaggggygatatagattttttygattttttaagttatttyggygaygggaggatgttgagggaagtttgttaggtgaagaaggggttagtagtagtatagagttttygattttgttttttaggttttagattygygttatgttaagaygggtttttygatttttatttttgatttttaattttagttattggatygagygygtaaagaatttgagatygtttgtttttatygtygtaagtyggtygtaggatagatattagtgggtagtaataaaaaaagaaatygggtttygggataygtgtyggyggttggattaattttagyggttgtaattaaggagygygtaygttgygtttgttggtgtttattagttatattggtaggygtataatttygygtttygattggtggttttatagygygtattatatatggtttygttgttgttggyggggtaggttygaaggaggtatttataaatgttygagttttttttgatttttattttttygttttttgygtygttygagtgatagattttattaattgaayggttatgggttatttttgtaatygttggaygatataatattaygttttagttttttatgttttaaatatatatttaayggatggttgtagagttagttgggaaataygyggattgaaaaataatgttttagaaggtaygagattggggygaaggygagagygggttgggtttttagyggagatygtagagggagatatattttagaattaggggtaataaygtgggtttttttttgtatttgtttattttgtaattttgttatttgaagattaattatttattatgttaatttgtttgtttgtttttaaaatygtatttgtatagtaaaagttttttaataayggaagtaattygaygttttttatattttttaggagattgtgtgygtgtgtgttygygygtgygtttatagtgttaagtgttagtattygagatttgtagaaataaatgtttgaattygaaatgtatgggtgtgagaaatttagttyggggaagagattagggattgggggagataggtggttgtttgtattataaggaatygttaaygttagtatttgtagtttaagtagggttgttttgtaaaggtttagtaattttttttgtaggtttgttgtatayggtttttggttttttttatttgtaaaatgggtgaatgtattygtattttagttattttygtgaggtgtttttttagttygggtttaattttttatygttaagagtttttaggttttagagttagtttgtaatyggtaaaatatgttttaaygyggtygygagtggttttatttygttgtttggtttatagygtggagaagttttgtttaggtttgaaatttttttttgtagttttagaaagtaggygattgggayggaaggttttttgttaattttttatagyggagttttgtttggattatagatgttagygttgtttttgttttaaggygtgtggtgattataaagaygatattgaaaatatttattattattyggtttttttgttaataaatggaggggtgtttaattataggtaygattttgtttttgtgttagygyggttatygtgyggaaataattygtttttgtatttatattatttttaatttaaaggagagttgtgaatttttttaaaatatttttttggagttygttttttttttttttgttygttttttattttttaagtttttgtttttagttgggggygttatyggttgtygtyggagttgtagttayggttattttttagaygygygagtagagtattaagatagtggggattttgtgtttgggtatygtttatatttggggygttaaatgtttaygtgttgatgaaattagtgagatgggaataggyggygggaaattagatagaggaagagttagggaggagattttagtttyggattttgggtygttagggtttttygygygtattttaaaaggtgyggttgygtggggtattaggttagtttgttagattttgtagagtttttaaattattttattttttaatttgattttgtggtggtygtattttttatagaaatttgattaygtttttttttttttttggttttaagygygtttagttttttttttattttttttgagtygttttttttttttttttygttttttygggttttttttttagtttttttttaagaatttttyggttaygggygtttattggttgtgygtagggaggaggygtgtgttyggtttggygagttttattgagyggaattagttyggatgatattagttttttagtttttyggygggtttagtttattggygaggtagtttttttaggataygtatattgtttttygttttygttttygttatygttgtygtygtygtygttgttatygggttataaaaatyggtygagtttttaaaggtgyggatgtttattatagatygaygygatattagygttyggtgttaggtttttttttgaggtttttyggagygagttttttaaatygtatttagagtaagtgttttygttttatagtagtygtagtttagattttagggatagattttttttaattyggttgtgatttagaatgtttygatatagggggtttggatttttattttgygggttatttttttagagygattttgtttttttgttttttttatatttatygttgtattttttttattaaaagygagaagtyggagygataatagttttttttgtttaagttttagttagttggtgagtttttygtggtttttagatgtagtatatggattttgggtttygygtyggttttgggtgtatgtgygtgtgygtgtgtttgttgygtggtgtygatggagataaggtggattygtttgaggaattaaattattagttttttatttagatttttattttttttaaagaaaggtttttattttttattygtttattttagttygggggtttagtttttttatatttaattgaaagttygaagtttttagaatgttattygtatttygagggttattaaygttttttgaaataatttgttgtatgagagtagaggggagatagagagagtttaattataggtattygygtgtagttaaaaggagggttagagatagtagygagggggaygaggagttaygggttatttgtgtygggatttygygttgtggtattgyggtgtaggygggagtagtttttttgttttttattgatttatttttttttttttttttttttttttttttttattttttttttttttttttttttttttggaagttttygggttygagggaaggaggattttgygaaagttgygaygattatttttttttggggttatggattyggaygttagtttggtgtttagtygttygtygtygttagagttygatgatttttttttgtyggttyggagtaagggtagtagyggtagygtttttattgggggtatygtgttttygtttatttygagtgattgttygtyggagttgagygtygagttgygyggygttatgggttttgygggygygtattttggggataagttaggaggtagtggttttaagttattttygtttagtatttygtygtttaygtygtyggyggttgygtygtttattaagaaggataagaagtaaatgatagagtyggagttgtagtagttgygttttaagattaatagtygygagygtaagygtatgtaygattttaatatygttatggatggttttygygaggttatgtygtaygtatayggtttttyggtgygtaagttttttaagatygttaygttgttgttggygygtaattatatttttatgtttattaattygttggaggagatgaagygattggtgagygagatttaygggggttattaygttggtttttattygtyggtttgyggyggtttggygtatttygygtttttgttygtygttatygygtattyggtagtagtagygtaygtygtatattatttygyggtgtattattttattttgtygttygtygtygtagyggttgttgtygtygttgtagtygyggttgtgtttagygtttttttgttyggattygggttgtygtyggtyggttttattygtttatygtayggtttatttaagttttygtttgttgtygyggtygtttygttggggggygggggyggyggtagtggggygagygggggtttttagtattggggyggtatgttttgtttttgtagtatgtgttaggtgtygtygtygtattattaygtgtyggttatgggygtyggtagtttgtygygttttattttygaygttaagtgagtygattggygtyggygygttttggygataggggagttaggggtygyggggaagygaggattggtttgygttgggttygggagttttgtygygaggaggggyg

SEQ ID NO: 6299 - DNA, 1423 bp, Artificial Sequence
  Description of Artificial Sequence: Synthetic polynucleotide
tygtattygattgtaygygtttttttgggatttygtattggygagtygtttttttyggygttggaygttttatttgtttyggygtygtyggaagagttttgtagagtgagtttttagggttatttygttgttttttttttygttttygtagtygttgtagttagygtgggagtygggtaggtygygtggggygttggatttatygagaggttagygtygtygtygggggagggygtgtttygtaygtgtgtgttygygygtgttygygttygygtgtgttagygygygtgttttggtygtgygygtygagtygggtygtattaattttttyggygtygaygggtttagtttatggtgtgggygtygggtttagggaggtttyggttttygttaatygyggagtagggyggtygtttygaygygygatttgygaattyggagtgygygtygggggyggggtagggaygygtgggygggaatgtaygygygtggttaggtgygygtgggtgygagygygygggagttttygagtgygygygtgttygtgtgygygtgggtgtgggtgtgttygygtgttygtgygygygttttyggggttaagagygygggtygygygggtaggtttggatattaygygttttgttygggtttaggaygyggttggyggtttygggaggaagaggaggaggaagaggaggaggyggaggaggaggaagaggaggagggaggyggaggagtagaggttgggayggtyggaggagagagttyggttttagtaggaaaggaatttagtaygygattattggaggggygaggagtaagggaaggattagaggggaggagagggggttaggggagggaaagtgtgggagggggagtygygggggtgygygttttttttaattyggggtygtttttagygagaagtgatatttttttagttttattgaaaatygttgtaaatattgaaaatagtaaaagtgaaaayggttgygatattaagaygtttataaaatgatygyggattgttttygatgttgatgagaattgggaygaygtygygtagagygttyggagggagaggygyggtgttygggatttyggtygtggggaggagtyggatatagtygtygggaygyggggatgtygagggtatygyggtttggtttgatygaygtaygyggtgatagtygtttttgggagaygayggygtttgtaattagtagtttttaaagggtgtagttaggaggtttagtttgttygttttyggggttyggggttaagttttttttagaagttttygtttttaygygaatttygatygtaaaatttagtttatttgagygtygtttttttttttttatgtttttygggggtygttaygatygtttyggagygatttttaggaatttgtttygtagyg

SEQ ID NO: 6300 - DNA, 1384 bp, Artificial Sequence
  Description of Artificial Sequence: Synthetic polynucleotide
gygtygygtatagaaaaggaaattttatttygtttgttaagggtagggtygggttagtggtaggagaaggttagttgygggygtaggtaggagyggatttaggagtygygtyggggygtagagtyggaygtttygaggagtttgygygtygygttattyggyggaagtygyggtttatgyggggttttttaggtttatttaaygtttygtaggygtggttggtaggaggggttyggtygtgtttagygtttttagaygtagttttttttgtygtagtygtyggtggtygtgggtygtygyggygttgagtattttayggggaagttgaggtygggayggtyggtgtagatttaggygtygtagtataagaggtagtygtttattatgagtagygyggtggtygtttagtygatgtatagygttgygtttagttygtatttttgygataygggtatagaygggtygtaaaattygyggaygataatgttggygaattagtagagtggtaygagygttagtagttygtaaaataggtagagtaygtttttygtgagggttataygygttttggtygggttyggggttaygtaggtggtgtattgygygttygttagggttaygaagagygtaaygaaygttagtagtayggygtttayggtgagygttygygtygtttgtatttyggtgtttagagttagtatygagtygtatattttgtattgtatgtgttyggtgttttgtattaygtaygatatttatagttttttttaggtggtttgygtygttaygatgttgtggtttaggaaggyggttatttgttatatgggtagttygtaygttaggattagatttttttagtttattaggtatagtattaggtttaggatttttaaygttgyggattttatggttagaggygagaygygtattygaaggttygtagaatttttaaggtygtgttgygyggygttttgggygggttttggtgtttttgygttygygttttyggtttttggttttagttygtttgtttygygggtttgtygtattttttgggtttgttagtttttgtyggggggtattttttttgaaggttygggggyggattttgtttttygggttyggtttttyggttygaagtagttaattygtgygygggttatygtgtygtagttaattatagagtttttggtagttgaagttagggaaataayggtttttgaggggtagttgagggygygggatygtttttygttyggtagtygtttttagttttattygtygttgttttagtygyggtygagygtattttgggttggtttagggygygttttttgggtygtttttttgygygtttyggtttygttattttagaaggygttyg

SEQ ID NO: 6301 - DNA, 1361 bp, Artificial Sequence
  Description of Artificial Sequence: Synthetic polynucleotide
gygttttygattttygtygttgggatttttygtygtagtttttgttttagtttgtgttgygggtggggtygggttgagtagttyggygttttttatygygttttttatygtatygttttygatttaatttygttttygggygtttattggtttgtagtattttttttttagtttgtgaagtgagtagggggaggyggtggtyggtygtttttttttagygtttagtttggtttygyggyggaggyggygtttttttygtaggayggagttaagttggattgtygygtygygyggggygggtaaagggggygttgygttyggtttygggtagggagtgayggyggyggyggyggtttygggygagygtggttttygygtgygtataygtataygtygtygygtagggatatayggatttyggtygttagtyggttatataggygyggagattyggttyggygygygtttttyggygtataygttttttattttygygtygygygggtygyggatttgtaggttgygygttttttgyggagtttgtttyggttttayggataggtttygtagtgagtaggtaagggtygtttygtygyggttgtttttttaygtttyggtygttttttttttttttagaattttygtttagtygggatttyggatttttttttttggtttggyggttttygttagtygygatttttatygayggagagygggygagggtyggygttaggtaagttttttagatttgaaatgaagttttttttygtygttgygttttttttgygygttaggttgatattttttaatttaagtgtttggygttgygttyggggyggtygatygtygtagattgtyggggtgggggtygatttagttattttaygttttttttgatgyggagaagggagattaggggggtaggtaagttatgyggtyggagggattyggagggatatgtttttttatttttaggtggayggaygtatttaygyggatygggaaggtagggttggagggtttttyggggttaggtatygtaattygtayggggtttgaggggtgggtaagtaatgtgttaggtgggggttggggtaggggttagtgtagaatgtttttttgtggtgatatattygggattgtttaaaagagtgtygttttygtttttygtggygyggaggggttggggttggggatgttagggttttagtggtttttagaagaaaygttttgyggggtttgtggggaaaygtatyggtttttttaggttgaagtgggttygttgagatttttgtttgtygttttagaggtagaagtttttgyggyggttgyggggggyggaggttatattttyggyg

SEQ ID NO: 6302 - DNA, 1175 bp, Artificial Sequence
  Description of Artificial Sequence: Synthetic polynucleotide
aygttgtttggtyggagygttttataattyggttaatggggagggagtygttygttaagygtttgttaggtttygattaaygggatgggtttttttygttagagtatattgttttaatttaggagyggttgtaggatttgagttaatgagaygtaattttygttagtygygyggtgttyggttaataggaggtygttygtgttyggtagygtgggaggtgtggggtggygggyggygttgygaagttgagggagttgygygyggaygagttatagtttgttatagggtgggtgygttygttttgtttagttygttygtygtttttyggttttttttgygyggyggtttttggatgggggttttttttyggggggttttaggygygggtaagtyggtygtygtttttttaggtttyggggtttyggtygttgggggygygygggygggygaggttggyggtayggagygtttggttttttgtgggggygtyggtttttttttggggttttgygygtttagggttatttyggygyggtttaggttgygagttttgtygygtaygttagyggttaatatggaggtagtttyggygygtttygygggggatygtyggygttygtgggttttaagaggtyggggygyggygygygttygggttttgggyggygagggygtagygagggttgtygttttttygggtagtttyggggggygyggygttgggtygygggttygggggttgtygtgttygatygtatgygtygatttgtygttgggygttygtttttttttgttggggttgggygyggtttyggagtttggyggyggtggtgagggygtayggttagttgtagyggygttgtgtttgtygtggatttaggatattttaggtttggtggyggggttaggtggyggyggttttttgygttygggygatggygatagygataggtttttaatttygtttygggttygggtyggtygggtttygygtygggttaygygygygtatagagttttttygggtttttttaygttggaygtygatygttygttgtyggaggaygyggggaggggtatygttttttyggyggaggttggygtggttaagggtataggggayggygtyggygtttyggtagggatagtggggatttyggggtttyggtttttyg

SEQ ID NO: 6303 - DNA, 1087 bp, Artificial Sequence
  Description of Artificial Sequence: Synthetic polynucleotide
tyggtattygygtttttgtgtttttggtggtttyggygttttttyggagygygyggtatgtttgtttttataygtttagtatttttgtttttagagtaaatttattttttagggtataygtagaggggtagttaggtatygtttttattttgttttatttaggtygygygtatttyggaaatttggatttygygattagtttttttttgttttttttygaggattttagyggtagtgtgttttggatttatttgtagtttttaagtttttttatttttgygttttttttaggygtttttgagtttgtagagtttaygatttttaataggttgtttygaagtgtttttttttatatygttttaggaatgatttttttatattygtttttygtaaaaaaaagttggtttaagatttaggygttttaaggattagtttaggtttttattygaygygggttagggggtgttgttttggtagtttyggagtttyggtaaagagtaatttgtagggaggygttaygygyggtttttattattygttagagattyggtttatggggttaaayggaggggtttgtgtyggtygatattttaagttttgtygygtttttttygtygtttatygtatgggatyggyggaggagaaggygyggtygygggttttttgaggtagygtgtttygtttygggaggaaagtttgtgttatatagaggaggyggygyggggaggatttgggygtyggtgggtggaggygtgggyggtggygtygygtggtygtgtgtttgttttttyggygatyggtgygtttgtttttygtyggagttygyggtygtygygttttygttygttgygtttagygttyggygygtttyggttttagtttygaygygttttygtygtygtygtygygygttygtyggttatattttttttttttttgaatttatgtgtaaaatatgttaygttgtatttttagggaaagtttygyggtttttgatagtagtygttggagyggtgggttygtttagtttttttygygttttttyggagtttygttyggttatttttaygyggtygagttgtaagyg

SEQ ID NO: 6304 - DNA, 693 bp, Artificial Sequence
  Description of Artificial Sequence: Synthetic polynucleotide
tyggtagttaaygtttagttttygttttttttttttatttyggatttygtaatygygaggygagagagtagygtyggygaggtattggttgggttttgattgttaygttaattttttgttgttttttttagtttttagtygtttygtttttttttttttatttttagtttgggtttggaggygatttttttttattgattgagtygattgtatttttgggtaagyggygttttgttttttttttgtttttgtttgttttttttgtaaggttayggygtttggagtagggtttgtagyggtygtygtagtaaygygagttaagtygtgtttygtayggtygttyggggtygtattttygttyggtggyggygttygaagaygttagtygygttaygtattgtttgygtttygygttttagtygtygygtattaaygtygtygttttygtygggagttaagttygtygggtyggttyggttttaggtgggtagttyggtttgtagttggttggaggtggyggtygttgtagttttggtagygggtatatttttaagtataygtatttaaygttttttttttgagttaygaggatggagtagttatttyggttygggattggygtaaggtaaggtgtagtygtttgttgtttttygtagagygygggattatttttttgttygggtatttaggtyg

SEQ ID NO: 6305 - DNA, 5065 bp, Artificial Sequence; identical to SEQ ID NO: 6273
  Description of Artificial Sequence: Synthetic polynucleotide

SEQ ID NO: 6306 - DNA, 307 bp, Artificial Sequence
  Description of Artificial Sequence: Synthetic polynucleotide
gygygggggtyggattatgagtygttgagtygggtaaattttaggttatygagttagyggattttyggagygtagttttgygtygyggagtaggttttaattaggyggygaggyggttataygtatygagttagygattttygggygaygygyggggttagggagygttaygatggaggygttaatggttyggggygygtttaygggttttttgagggygttttgttttttgggttgtttgttgagttaygtygtygtygygtygtygtttattattaagtttttyggygatgtygtttttaaaayg

SEQ ID NO: 6307 - DNA, 1563 bp, Artificial Sequence
  Description of Artificial Sequence: Synthetic polynucleotide
tygggtttygaaaayggggggagggggaygaygttttagaggtttttgagtttttggtttttttygattttaagggtttttttttttyggtttttaggyggygayggygggtagygygaagtagtaggygtaggggygttgggatggggatgtttttgtaggtttaaggttttttttgggagtttaaataaagattayggtagygtygttttttttttygggaattygaygtygygyggttatagggggtttggaggggygggtagggtttygtagygtatttagtatagttygygyggyggagygggtgagaagtyggygggggygyggatygatyggggtgttttttaggtttygygtygyggttttygttygttttttygttygtttatygggtattttagtygygtagaaggyggaagttaygygygagggatygyggttygttygggattagttttaggttyggtatygtttygygggtygagygtttatattygttaaatttaygygggtaygttttygyggygtatygtttttagttyggttttygtttttgtagtygygggtaygyggaggggtttttggttgttygtatttgtattygygygtyggyggygtygaagtttygtttttygtttgygygtttgtttygttygtattttygyggtgagtyggyggygttttygtttttgagtttagggttagtttttttygtygtygyggttgttgygygygttttygtttagtttagtttagtttygagtaygattttagttttaygtaygattttagtttygygagtttygtatygattygttttygttttatttygttttygygggggyggygttttttttttttygyggttttygtttttttttttygttttttyggtygygttggggatttttagtygtygttygygattttttatygygaygttyggaggyggyggggtttttttgttygggyggygggtaygggggattattttttayggtgttatygtatttatttygygtttttttttygttttttggagtttatygggattaggtggyggygggtgtttttttgggggtgygyggttatgtaattggtggatttttttaaatygttttggaggggggagygyggygttgggggygggagagygtttttggttgtgagttgtttttgtygtttygtttygygtttttttgtygtttygtttygggtttttygygttttttttttyggttyggtygagygygttgtttygaygtygttatttagagtygggtygygtygggygtygagatgaaggtgttgggatatyggttggagttgtttataggtatygttygtttgtttygtagtyggtygttatttttygagttggagyggatttygggygyggyggtyggggattggggyggttygggtttgagtaggaaggggtgyggattttaattaagttttagttttgtgttatttgtttgtgtgyggagtttagtttygggagaggatttgaggttgtggygagtttttggygttggygttygggttgygggagtatyg

SEQ ID NO: 6308 - DNA, 512 bp, Artificial Sequence
  Description of Artificial Sequence: Synthetic polynucleotide
tyggtttaagttagygtatttygtygattttttgtttagtttaaatttygaggttgggtaaggtattggatttayggttggatygattyggggtagtttttgggtgaatagtagygtgttygtyggtagagaatygagattagygagtygattatgyggttgtatagattttaygygyggtygagygyggtggtttgtgggtttttgttgttttttttttagggttattatgaggttttygyggaggggtgatagggatygggtttagatttgttaaatgttgyggaggtagaatttgatagtgygggagggtaggygtttgggaggtaggagttggtggagatgatagygtggaattygtgagttttaygtaaygtttttttgtygtttagggtgggtttttagaagtatagaaatggtygggttgygggatattatagygaggaattagyggagtataggggttttaggagygtygggatatgttaggtygggtagatagtttygggtyg

SEQ ID NO: 6309 - DNA, 1070 bp, Artificial Sequence
  Description of Artificial Sequence: Synthetic polynucleotide
tygygagaagtataaaaggggaggggygggtygtgtagttaagaggayggttaaayggggaggttttttttttgttttygtagatgttggagtagygattggttygggagattygtgttttggagagaagtaaggagtagttgttttyggagagtgagtttttygygttaggtgggyggggggagggggatgtgttygggtttyggttttgtttttgaygttygtttatygatagggaggttggtgygygttaagttgygggaggtggagyggyggttgtattygtygtttgaggtygagggygttatggyggtgaatgaygggtgagaggggaagggaggagtgggygaggagggtaggggtagggyggaggggaattygtttaggtttttygtttygttttygattgtygttttttyggtttgtgtttttttyggygtygtygggttttygygtttyggtggtttttttttygttttttggattttygtttttttttttttgttttttyggtttttttttygtaggttgaaggyggagttggagatattyggggagtaggttyggagygttttygaggtyggggtyggygagggagaggtagggagttygaggaagggaggyggggygggtagggatygagttaggagagagygggygggggttttgggagyggttttygagagtggggtttgtggggagtagggyggtttyggggatagaggaagtygyggtggaggtttagggtagaygygggyggaygygaggagygtaggaatttggttygtagttttatttagttttyggtaggtyggatttgagttttttygygttygygaygaggaggatttygagtygtyggtggttgtttttgaygttttttaggttagtaggattygttygttttygattttttttygagattygttaagaaataaaggygatgattttygattatgttygygtttttygyggagtttgtgttatatygtggagyggggyggggygtgttgggatttygaggyggggtttttgtyggattttttttattagtygagtttygggygtyg

SEQ ID NO: 6310 - DNA, 766 bp, Artificial Sequence
  Description of Artificial Sequence: Synthetic polynucleotide
aygaattattatttaattygttggygtygttgttgttgttattggttaaggtygyggygatygaygtatagtagaggtagtatagttggagygtttgtaagagaaaaggtgatatygygygtgaggggygyggyggggttggygtygggygttttttgttattygttttyggagtttygttyggyggtatttgttttggttaygygttttagtttygttaggtttttyggygggttygaattygtagtygggaaggtataygygagtaggagggygtattttatggttaggtgyggaygyggyggttgygggtggttagaygyggtaggyggagygtaygggyggygygtatttttttygyggtttyggagttyggygttttaggtgyggttttaggtgagagtygtygtygtttatatygtagygggggygygttgggattttttttttttyggtygtttgygygtttttttttttttyggygygggtttgtygagttgtagtttgyggtattttagagggtayggggggttttttgggtygggattggagygtaaayggttgggagattgtyggtgtttgttygttygtttgtgygtttgtttgtgtyggtgtgagygtttgaggygatggggaagatagygttagttggtttttttagygygtyggagtygagygttygtttttttatygygyggtgattggygattagyggttttygggttygttygagttttygggttggtgtaagggygtgggattttyg

SEQ ID NO: 6311 - DNA, 363 bp, Artificial Sequence; identical to SEQ ID NO: 6084
  Description of Artificial Sequence: Synthetic polynucleotide

SEQ ID NO: 6312 - DNA, 2919 bp, Artificial Sequence
  Description of Artificial Sequence: Synthetic polynucleotide
tygagtyggattttygyggagtatttattagggtggttagttggaatygygtgttagatttatatgaaaaattygggagaggaygggttgtygttgttygagtygttttttyggaagtygttgtttattaatttttygtatttttttttgtaygygtttttttygygtattagtttggagattttttgtttgaggtggtygatttgttgtagtagttggttttttttygattttaggaygtgtttttgttgtatttttttgaagyggtaggattgggtatagtygyggttttttagggttygttttttttgttttagtyggattattttttttttgttgatttygygtagttgtyggtttagttygygtatagatatggttattagttgttygtyggagaagyggtygtygaagtgtaggtygtyggyggygtggtgygggtgtagggygtttttygttttygtygygttttygtygttttygtygtygtygtygtygtygtygtttttagygttggtygggttatygtygttygygtttttagygttatyggtygaggyggtygygttgttygyggygtygggygygtyggtygtygggtggtggtggtggtyggyggygtggtggtggtggtggtggtagtgygggttygygtygttttgygyggyggtygyggygattayggyggatattayggyggyggyggggtttattttttygtygttgtygtttaaggaggygtyggtatyggtttyggtygtygyggttagttgttgygtttygygygygtagttatygaagtygttttggagttggtggttgttgttgatgagygtttygatygygttttyggggttgaagtttagygtttyggggtttagttgttgygggtagtyggttatttagtagtagttttttaggtgygttttttgttygttgttygagttygggttgggygtygagaagttgggggaagggggtatygagttgtayggygtgtttatgggggtggaggatagygagttttyggygatgagayggtygtattggttgatgatgyggtyggtttttatyggttttttttttattttaaattttattagatygaagttattaatatattttatggttaggggattggtgggtaggtyggagttgtttattgttagttttgatgttatttttttgtygtygtygtygtygtygtygtygtttygttagatgggttgtaggagaggggttagygggttgtgttgggtggttagygggtgagttagtttgtygggttggggygtttttagtttgygyggyggtggttggttygaaattttygagygygtttatatatatattttttygttttgttygygtttttygygttygtttttttttttttttgtttaygttaatgtgttttttygttygtttyggtttttttttgttygttygtttttttgygygttgagtyggyggttttaggttygggaagatttttygygagttgyggtggyggyggtggtggttgyggyggygaagttggaggagttyggttyggtgygyggygtttttygttygtygtttygttgygygttttgtataaggaagggttygtttygtyggttygggttgtaggtagggygygygyggygttygttyggggttggaggygyggygggygtttgttygggyggygygggttttggtaygggggagttaatattttatgtttttygtttttttttttgtttggttttttttattatttttttttttttttttttttttttygygygttttttatttttgtgtaaagtgtaaggtagaggtgtagttygattggaggagagggaggggggagtttagtttttttttgtttttttttaaaaaagtaaaatagygaagttttggggaaagaygaggtagagagtaaaggggggagggggaggttaagtygataagtagttygagttatagttagaagatgaaaaaagattttaaagtttttgatttagtaagaagagtttaaagtaattgttgagttttatagtattygtgaygttaggtttaaatgagaaattgattggtatttygggttaatgggaggyggygagagyggtygygattagtataatagtatagaaataaggaaatttttyggagttgttaattagggtttaattagttgattgttagttgggaygggttggtttaattttttttgygtygttgtttattygggagggaaygaggttyggygtaaagtttggtgtaagaggggaaggagtttttttagaggggtttyggtaattygggyggatttgggagggyggtttgtttttttttggagygygagataggttttttattyggagttttagttygttgggggtttattyggttgggattggtttgattttttttttttgtttgttttttatttttaggattgtgaattygttttttagtttttttttttygtattaattttggtatttaggtgtttgtyggggattttttttttttgagtttggtygtgttyggygtttaaatttggttttaattttttgttygtttttygggygttygtgyggggaagggatygggaagggagggatgtagtggggtgttyggatyggggttgygggttgggygtygttyggttatgygtttgtttagaaggttgggtattygtggagagggaaagtttattttatttttttttttataaygaggtaaaataagttgtttagaggttattttttayggagatyggttgttygttggygtygygtgtttttggatagagygagygtttatgygagataatttyggggaagtttaaagttaggttagtygggtttagtttttyggtttttgattggtyggagtttggtttttgagatttatattgygygttyg

SEQ ID NO: 6313 - DNA, 2267 bp, Artificial Sequence
  Description of Artificial Sequence: Synthetic polynucleotide
tygaaaaatyggttttygttttttattttyggtygattygttygtygaggtggttgttttgggaattttttgtttttygtttaggagaggaaaygtatattygggtyggaygtatagaagtygtattttggttggggttataagtttgatagttatygataagtttttatttataggagtaygygaygtgttttttttttaagggaaaggtttttttttttgggttttggaatgggtttgaagttagtyggttttagtttatagggtgaatgaggggtgggtatagttyggtygyggttttagtatataygggyggaygtaggggygggggagygttagtttygtagtgtgttyggagtttagyggttttgagtygtygttattagtttggtygttttttgttttaygtaagtgaagttagtygtttagggttgygtttttagttatttgtttttttatagaggtttatattttttttttygttgtttttatagtttggttyggggtttgtttaatatagatggaygttttttaaaggttgtgygygttatygttgttattyggttgtgtygaggttygyggtygttaggattttagggatygtatgttaggtagggtttaggatttttagygyggattatttttagtttgyggggtagygtyggggattygggtaggagggagaggagtaggagggagttttggatttttttttttagatyggtygtygttatttttgttttttttagggtygttttyggtttttttattttygggttttygttaygygggtygyggggtttttgttaggaaaatygggyggttttaggggagttygygagatttttagygttygggygygtygtttttttygaagtttygtygtagttttygtaggttaggttttgtttayggggggttgygtttagttyggatgggtgggygttgggygggttggttttattttgtygtgggtattaattttgaaaayggttygtgygttyggygyggttgyggygtagattygggaayggtagtygygggyggagtyggggtagagyggyggyggygygyggggyggatayggtatttayggtyggggggttygggggattyggygggyggyggayggygtatattygygattyggttygggagtygttgttttttttagtttggttttygtttttaygatttaggggyggttgygygttgttttttggygtygtatygggtttaggygygyggyggggttggggygygyggggyggtygtttgggttatgtyggggattyggtttyggttatttygygygggaataaagygygtatttygttyggggyggttttyggttttygyggttygygtygggtttagtygtygygtttgtggttttaaygtygygygttygttygagagttttayggggtttygyggttttygtttygygygtttygttttygttttttgtttttygtygtygtygttgygttatttgtttttygttyggygtttatggygtttagtttygtttyggggygtyggtttggagaggggtttttygtygtygagagtygtttttaaygttttygttatyggggyggygttttaagaattggttgtgggggtyggggttgtgyggagygtygggagtagggagaggggagaggggygyggggagggggygaygggygygtygttttttgyggggggyggygyggggaggygtaggygggggygagygaagaggttgaggggtgygggygtygtggagggggygyggttttggggggyggttttygtttgygtttatttttttttttttygtaggtygygtatatttatttygtagtagtyggyggtygygggtttygtagttttagaatygyggtttttggyggtygygygggaggttgaaygggagttggggggtgtggggggggtggggaggtggggagttgggggggaggtygttttttyggtygtygttttygttttttgtttygygttygtttttagygyggygtttggttyggtttggggttattttygtgygtggtyggtaggggtygygtttttttygtttagtttttygggygggttygatgygaagttttygtttttygygggtttyggggttaggttatttgtatatattttgtatttatttgtatatygtgygttttatgtttatttgtagaaaygtttygagtygttgttttgtttttttygtattttttttgtyggtaggttttttttttygttyg

SEQ ID NO: 6314 - DNA, 265 bp, Artificial Sequence
  Description of Artificial Sequence: Synthetic polynucleotide
tygyggttygygtgggttttaggygygggatggyggygtttagtagygygggttygygtagggygygtagygttgggggtaatagygtggggttyggtyggtagtggggygygggttgygyggtaagtagtttttyggagtttagtattagttttagtattatgtagggtatttaygaggyggaggttagtaggygtygggttyggttaaagtygttygtagtttttagtattygygttttttgttttatyggtygtaggttgyg

SEQ ID NO: 6315 - DNA, 374 bp, Artificial Sequence
  Description of Artificial Sequence: Synthetic polynucleotide
tyggggagggtagtygttygtttttttyggygttgggagttttyggttggtattgygggaggagttttygggtgattygygggttttgaaatygtygttygggagttyggggtttgygttgygtttayggggygagygagggagaattgaygtttttygttyggattttttttttttttygagaattaggtaggtygygtttatttttaagttygattgttttygyggtaatatttgtgggaaatattayggtggattttgtgggtygttgagttttttgattttyggtttgttttattttgttttgttagtgggttttgygttygygttaataattygaatgggtaygtttttgygttttagaaygttgttyg

SEQ ID NO: 6316 - DNA, 1133 bp, Artificial Sequence
  Description of Artificial Sequence: Synthetic polynucleotide
tyggygygggtygttttygtttttagttttaatgttgttgygttttaggtygtttygtttttggtaggttttagtttttgatttagtttttygtttagtttttgagagtagttttttygygggattggtttgtgygygygygtttgyggtatygtyggattaggggtygttttygagyggggagtttaggaggayggttaggtggtttgaggtagaggygttagggaggatggagaagggatatttagggtttaggyggggtgggggtagggagggyggygggatagtaaggaagtgggtgtatttgggtgatttagttgygtatgagygggtaggggttyggggygygyggattttaggygttggattgyggygtggagtagygttggggaaatygygtygggtttagygaggattgttgggyggggygygygaggagygaagttggtygggggyggggtttgagtygtgtyggggyggggtttagattygggttggtygtggtgggyggggtttgagtygtgaaggggygggttttgtaggggyggggtttygaggggyggagtttgyggtgattagygagggggyggggtttagagttattaagaagygggatttagtgagggttaaaygtggggygtygggggygtggygyggggygtaggtgtaygtaggttggtygygggygygyggggttyggygggagtttyggggtggttttygygtggggtygggggygttygygygggyggggygaggtyggggagggtagttgttygtttttttyggtattgggagttttyggttggtattgygggaggagttttygggtgattygygggttttgaaatygtygttygggagttyggggtttgygyggygtttayggggygagygagggagaattgaygtttttygttyggattttttttttttttygagaattaggtaggtygygtttatttttaagttygattgttttygyggtaatatttgtgagaaatattayggtggattttgtgggtygttgagttttttgattttyggtttgttttattttgttttgttagtgggttttgygttygygttaataattygaatgggtaygtttttgagtttaagaaygttgttyg

SEQ ID NO: 6317 - DNA, 2358 bp, Artificial Sequence
  Description of Artificial Sequence: Synthetic polynucleotide
aygatatttyggtttgttgttatggaaataggggyggattaaggttggagygtggagygtagggattaggtttttyggttatttgagttttygttttagtygttttygtagggtyggggtagttagtygtaggygtygyggttttttagttttttggtygggttaggygygggggggatttyggyggggygttatagtttgttygggtttgggaggggagaggtagaygtagaggttggaatagttggtggyggggttygtgggttttyggygtgattatttgtttttttagggttygggggayggygtttygygtggtaattaygtgggggygyggygggattttttyggtgttygtattaattttgtygygtttygtatygggtygggttgttggggygtttagttayggtggtygygaagttagttgtttttaagttgagttgtgtatyggtygygtatattggyggtayggttttygygttttttygtttttagtataatgaaagtttgaggaattggatattaggygttggtygttttttatttttagtygttgggtgtttagagtttatttttagygattagagtagaattgtagagaagaygttygygttygggtttygtttggggagttagggygygyggggagygttygggtygygyggttattgatygttggttgtaygggggygtygtgyggattyggtttttataaagyggtagaagtaagggygtgtgttygygtagggaatggaggttgtaagtgtaaaattttattttagtaaagtaaaggttttaggaggtyggttttttttttattatyggtygtttattttggttttygattgattttttygggtyggatttttaggtttggttattygatttatggagaaaatttygtgttttataattggtygttgaygggagttgagttttagtagtagtttttyggygggtgygttyggtaaaatttattagttygtygggggttattttttagatygggagtttyggygtygggyggygttygggttygyggtttttttyggagygtatttaattttaatttgtttttgyggttttaatttatttttgygaagtatgttggttayggggtygtygtttygaggtyggtttaggygtattttttttyggggtttagatttaaatttttgggygttagttgtagttaattygagygygtygaggygggggtaagtyggggattygttygtgttyggtggttyggtttygtaggggtatggtgagttttagtttygygtygagggtatyggygttygtaagtaatygtggtgttgttyggtagtttygygygtttgtttagtttyggggygagyggtttgtttygyggagtyggyggtttgtttttgttattyggagtatttygtaggyggttttgaggggggaygtygttttttggtyggtyggtygtagttttttttttttygttttttyggattatygtygtygyggttgtagtaaaagggygttygtaygtatygtygagtttyggggaaagygttyggygygygtttgtaggatygagygatyggyggagyggggygttttttttttttttttyggtttttttttttttttttttttttttttttttttgttttttagttttttttttttygtttygtttttygttttygtttayggagygttttttatataaaatttatgaaagtgtttttagttygtagtgtygagygtygttttatttttaaggtagtagygtttagtygygyggygtygttttttaaggtgtttttattgygttygttttyggggaagatgttyggttygygttygtttaggtatttgtttttagtttttaagtyggttttyggattattttaygttttttttyggtttygtaggttttttggagttygaattygtagtttagttttygttygttygtttttygyggttggaggttatygggagaygyggttgggaygygaggatygtygtttagagtayggatygygagttygttttttgtttygttttttttttggttagygtttttttttttagtttygayggttttttttygtattgaatagttttagygaattyggttgtttygtatttygagttttaggatattgttttttygtggggagaggaggggagtaagtattyggaaagggttagttgtaaattttagggagaaggaaggattygtgygggttygggtgggtygttttygtttgggtggggtggyggyggggggtttttgattttttttggtttatatagatttygtyggggggttygyggaaaatggaggaggygtygtttggaaagygggtttyg

SEQ ID NO: 6318 - DNA, 1050 bp, Artificial Sequence
  Description of Artificial Sequence: Synthetic polynucleotide
gygygygtttygggagagttgtgtttttygygaaattygtgygttttagtttagggttttygggatyggtgttygttagtgggtataggaygtygggtgttygaagggttgtttggagatgtaattgattttggygggtattagaatgaygagtggtagtagtaggagyggggtgaygaataagattaygaaggatttgaatttggagatatagtttagygtygaggttatygygygggagggagattggygggygagaygagtgaggggtagttagaggygtygygggtttaagaaggggttatagttttyggggattggggagggggyggtgataatttygtttygtaygggggygttttttygyggttttggggyggggttatttttyggggtttgtgggaygygtttgtttttaattttgttattyggyggyggtgggaggygtttttggattttaaygtttygggttagttttttaggggtagtttgggttttagtatttygygttgtttaagttttttttgygttgtygaggtagaggtgygtttyggggttgttaagyggggygtgttttggttattggtgttgttygttttggygtaaggygttttttygygttygtatttgtttttttttgggttttgaagggtttyggatgaaattttttgtaggtttttgggttttttaggtttattttttygattttttttttttttttatttttttattttygttttttyggtgttttttygagaggtgtttttttaygtttygygtttttygtatygygggtttygtttttyggttttttttggttttttygttaygttygttttattttaggtgtaggatttttttttttygttygtatttttyggttyggagtttttgggygatygtatagggaagygaggttattgtttttttttgttttaggggttgtygygttttagtggaygttgtatttygtagaygttyggygggtagatgyggataygygttttggaggggttttatygagttttagtagtygtagttgttygttyg

SEQ ID NO: 6319 - DNA, 1731 bp, Artificial Sequence
  Description of Artificial Sequence: Synthetic polynucleotide
tygggttygtttygtttatyggtattaggygaggtttttgtygtagttgyggtygaagaagtggggttyggygtttayggygygtaygtyggggtgtaygygtaggaattttagtagygttygygtgtygtttttttttatttygatgatgatggtttgyggtagttgtttgttgttttygtttaggagtagygttagggttttyggyggggtttyggttayggtgttttyggtttyggagtygttyggattttttgataggttaggggatttttttttttaggtygttttttygtygtygtygyggggygygggyggtyggygttttygttattgyggtagttgtaggaggygttttttttgtgtygtygtyggttatatygttagttttttygggttttyggttaggaygtygttattaggggttttygttttttygtygtygtyggatagttttaygayggggtyggatagggtttggtagygttyggttaggtagtagaagaygtaaagggaygtgagtagggagtagagtattagtaagaattttyggaagatgttgygggatagyggttyggtygaggtggagagggtattggtygggttyggaggggttattttagtyggaggygaygtygggtaaygygtyggttatgttaggtttggatttygataggtgttagagtattttttyggygggttagygygttggayggaggttatatygtygtgygtttttgtggtygtgygaattgtttygggaggtagyggtyggggtttygyggggaaayggaatttygggggtttygygtaggatttttgtttttagtygagggagygggaaggggaaygygggttygtgtttaagaaattatygttttagattygtttaagttttgagtttggggtagttttggtttttyggtttttygtaagagtygtyggaatyggggttttggtagyggtgtygaaggygtgygttttagtttyggtttygagagatttttyggygyggattttygtttagygattttgtattattggttyggttttygtgagggtaygygyggttgtygggtttttgygtttygtgygttttagatagtggygagygatagtgatttttagtttyggttttttttggtttttttgttygtttgggygygtttttttygttygagtttaggtttttttagttaaggagygaggttttttygagtttttttgttygagygggagataggaggttygtgtagagtygtttattttttttygtagygtygggttgttttaaattgtttttggattttatttgtgagtygygtggttgggttgggttgggttgygygggatttgttagyggttttygttattttgttygtaggygtttatyggttgttttttgggtygtygttggtygtygttataygtgggaygtygagggtagtaaatttgttggtgaygttaaaggttygggtyggattagttttyggaygagygtagyggggygyggattagyggttaggyggggttagaygggyggggtgggatggagaaaaggtggygygggtttygtagtagtygtttaatggtattggagagggygggggyggtaggggygaygttttttttttagtgttttttattttttttygyggtttygtttttttttagtggattyggtgtttgyggyggtttyggggttgtttgagtgatagttaaggtyggtyg

SEQ ID NO: 6320 - DNA, 3535 bp, Artificial Sequence
  Description of Artificial Sequence: Synthetic polynucleotide
tygtttttttgggttygttttttgtttygaagttaatagtaatttttgatygttttatatygtttagaagtttttttatattttttygttttgggagygggttggttgttgagttttyggagaagygtttgtatttgtatggygttyggggtttttggtaggtagagtagttygttattttggaaggtygggatygtttattttatttyggtttatagttttttttttgygtagttygtttttgtagtttttgyggggaagtgtyggggttgttygaggtttagtttttaggattgtaaggaggtagtttyggygtgyggyggtgygtatagtttagagtggttagggygygagagtgtaaygtttttttggtttygagygygtygtygygtttygggagtagattttygtttagtagttatygtygtttygatttttygttttagttgtagtttttgtygggtaatatgttaagagtygtygtygttatagttgtygtygttatttggggaagagtagtagtagtagyggyggtygygggtataygggggtaataaatygagttattygggygtttagygtgtyggggaattttttttgygtttattgttyggygggatttaygttatgtgttgagttatgtttttggtygygttygygggtagygtatggggtagygtttgagtggyggtagattttgtttygatgttttyggtyggtttttatygtagtygtygtygttttygtygtyggtgaggaggaagttygygttgtttttygttatgttttgygtttggttttatatgtttttgtattygtgygtyggtttttgygtygtygygtyggggttgttgtttttgggttttgggtttygygtygtataygattygttagttttggttatagtttyggaygggaygttttttaggttgtygtttygggygtygttagttattttattggttttaggtaaggagatggtygagggygttgygagttyggaggagtagagtttygaggtgtyggattttttaagttttatttttagtttttttagtgggtttgggagtaagtagttgtygtaggttattattatyggygtgaagaagggyggtaygygggygttgttggagtttttgygygtgtatttygaygtgygygtygtgggygtygagttttattttttygatygtagttaygataagggtttygtttggtatyggtgagtttttttgttaggggtagggtttttatygtygatttagattttgagttaagggagatatggygtatgatagggaattggtagggttatagtttyggattattyggggtagggtagggaaattayggtagattgygtagygtattttgttygggtgyggtgagggttgygtttygtttggttttygttataatttatagaaagttttygyggagtattggtgtttttgaatttattaggygatttygtygtaaagaagaagggtagygattgagatygtttttagtaaagygagttattttttaattatgggggtattygattygaatygtattttatgattygttttaaatttttttttttyggagttygagaygttgggaatgttttgagtttttttggtyggttttygtttttaaggaatttttagagtagtttttgttttttagatggggagagggggtgggggtygyggygtttyggygaggtygtagagtttgttaattttttgttatagttygtttggttatyggaattttaagggtgttagattygtttygttygygagtygtttgggttygggagggtgagtygggygggtggttyggygttttygtttggygggygggyggygygyggagygtggagttgtgttggtttttgtygggtaaaggygygtattgtaatyggttggagyggygygaggttttgaaggygttygggttttygggtatygtygttygttttygtttttttgttttyggtgttgggatagggaaagtaaggaygygtgttttygyggggtttttataygttyggagtaaagaatattyggggtttattgattgagaaatgagggttgtttygaggtygyggttttyggaaattttgttttygagtygggttgygggttaggttttaaagggatagtggtttyggggttataattattatttttgtttattgtttttygtagttgttggtttttggggtgagttgttgggttgttygagtttygggtaaggygygagtgggtaggaggtttagatttyggttttygataattgttttygattaggggtttaggtaaygatttttatattttygttggggtttttattygtaattttagttagtaygatatttagatatttttttaggtttaattagttttatagaygtttaagatttgggaaaataaaagaggagaagataattgaatttttttttttgtgtttattttattgtygggatttgggtgggttggagaataaaagagggttgatttygyggattaaaayggttttttttttagtttygttttatttttttttttttgtttttaatggttttttattattgttaggagttgtttaagtttygaggtttagttaatygtgatagttattttttttatygttttygggttgtgatttattttygggatattggtggataagaatggggtttttggagttygaygtttggatttaygttttggttagtygygtgaattttggtgtttttatttgtgtagtgggaataatgtaggttttgggtagggatgggaagagtgaatgygttggtayggtaaggtgtttygtaggtaygtgagggtttttttaatygttagttattgttatygattgtattgttatgatttttattattattattttttttttttttgggatggtgattttagggttaggyggtaggttataattagygtttttttaggtggaattygttagagtttygaggtagtttaggattttttgagattagatatatttgggtygggttgggaggaattggtaggaaaaggattgaatttttaatgttaggyggttttgaagtatttggggtaagttatggaaatttttataggaaggtttaygtagttttttaggyggttgttttttatttgttaygttttttttgattgattaaaaaaygttgaatgaagaaygaagtygygtggaaattttygtygygygtttgtagyggatagygtagttygggaggttyggttgtygatttgygttygggggttgygttgygagyggttaygtatggyggttggattygggyggtygtaagggtttggttgggtygygggaggygggaggtttttygttttttygagttatttttttgaattgataagtaggattttygggtttagggggtatagggttyggggyggtgattyggyggatygggttgtyggaggagtttattgtaaatgtygtaattggttttaaatattgygtttttggattgtattagtagtttttggygyggtyg

SEQ ID NO: 6321 - DNA, 2896 bp, Artificial Sequence
  Description of Artificial Sequence: Synthetic polynucleotide
gygtgggyggtgagyggtygggagaggggygggttagttgagygtttaattatagtttyggggttyggygttygttagttgtatttagaattttttttatygtggttttgttttgtggygtttaattaygtgtttttagggttttggagyggttgttgggattgtagygaagaggggttygygttattttygttaggttttaygygtyggttttgagtgygtttttttyggtygtygggaaatttagaggygyggtttggttttaaggttttyggtttygtttttttttgtttyggtttagttttyggttgttttygggtygygatttattttttttggyggtttttgtygtatgtttttgtgttgygttagaattatygagttttagttttygttgttttttyggttagtaggygttttttttagttggggagggttttttaaattttgtgtttttaggatygyggggtyggtaagyggtaggatttttaagttgygtttttgatgyggttaggggaggygygygatgaaggtttttttttttttygttttttttttaygttttatygttattataygtygygttgygtygygatttyggygttgtttgttggygttttaagyggtttttttgtygyggtgygattttygaygttaggaggattaatttttattygttaggttttagattttaygtagatttagttatataygtaatygtttgtagatatttattatagttttttaagttaatttaaagtttygtataggygtattgtttttatatgygtagttttayggttttatatatttattagtttattygtaaataggtttatatggttatataattgttttttggatatttagttttaygtaggtataattttatatatatataatygtatataggygtaattttatttaygtagtattttayggagttatataatttttttataaataatygtatagatatagttttaygtagygttatattatttagttaaattgagatttagaaatatatttattagtttgtatttagatttttttttttaagtttygtgatatttattygtaggatagattagaaatatatagttatattgatatatatayggatttaaaygtatagttaagattttattygtaggttygtaagttattggaaaaatattaaagygttttttttttttttttttttatttttgatatatataygtttgygygygygygtatttttatatttatatttttygtttttaagygygtyggagtttygtagygggtgatttygaggtttygyggtgagagttaagggagygttttttyggygtttttttttttygtttttttttygagtttatttttygttttttygttygttttttttttttttgtttttttttttttttttttttttttgagtttggggygygggttgygygtagttaagtttttttatygygygttttttttygygygygtttygygttagtatygygtttatygagtggatgyggttayggggtygtttttaattattttttgattttyggyggtttgtgaataatggttattgagggygttygtaggggttgttaagaaggaaaygyggggygygagaggygyggygygygygggagygygagggaaaggagygagtttggggtygttgtaagyggttggygagagaaaggattygtgygagygtttatatttgttttttttaaggattttatttggttatygygttttggaagaggygagagggagagygtgygygagaggagagagayggygggggaaagggagayggygagaygygtagygtyggygttygggagatttaggaggagttygtaggtattgttggyggyggagttttgtgttttyggygggttgttgtgggygttagggtttttygagttttyggttygtygtygygygtagatttgttyggagttyggggttgtaggttggggtygtygttygtygyggatatttttttygyggygttaggattttggttggagttgyggatttgtatgtttgggggttttttaygttggttgagggaatyggttttagaagaaggaattttttttttttttttttttttttttttttttggtygtttttggttatagtttggttgtgttggggatttttttttttttttttttttataaagtattggtgagyggttttgaygaatgtggtattggyggaaggtatggggttgagatggyggggttggtggttayggatggggaggygagagatgttagagaaggaaggagttttgtttaagttygtaatttgygtttygaagttggtyggatyggggagggygattygygygttygattttgtttygggtaatygatgggaaatttttygagagygyggtttttttggggattyggygtttttgaygtttttaggygttttttygggtygttgyggttttttttygtygttygttagygtttaaggtygygttttttttattttygtttttttttttttttyggyggttttyggatttggatagagttgtaggagtggttttaaatattttttttggagatttttttttatttttygtaygagagtttgtttagtggtttttttgttttgygttttagttttaygygyggtygagtggttaggttgataatgaaatttygtatttttgtyggggggagtggggtggggaggaggttttttttggggttgttgattttgggtttygggtagggggagggggtttttgggggaggggtttgttttggttagagaygtygatttgggatggygtyggggtagggagggggttggggggtgggygyggygaaggyggtaggtttgggttygyggtygggggtyg

SEQ ID NO: 6322 - DNA, 2567 bp, Artificial Sequence
  Description of Artificial Sequence: Synthetic polynucleotide
gcgttgggcgatgagggatcgttgggtaattgggggtataggatcgggtttcgttgggttcggggtagaagcgtcgaagtttcgattcggaacgcggtgattttattaacgtagaagttcgcgtagtcgagtagaggagtttttcgtaggcgattttcggatagacgtttttgcgcggttcgcgtggtttagtttcgttttaggaaatttttcgcgtagttttcgttttatgcgtttttatttagttttttttcggggtcgttttttttttaaagtagtttttcgggtttattgggcgttttcgtaatcgggtcggaatttcgaacggtttcgcgtgttattcggttattttggtaatattattcggcggcgttcggcggtttaattttagtttgcggtttttttcgagtttttcgtaaggtggggatcgggacgcgatcggggatggggaagggggttgtaggaggtttcgtttgcgttgtcgtttttgttgggtatagcgttttttattattcgcggcgatttcggttttcgtaaggtggggcggcgagtaggagtcggggttaggttaggggttcgagttttcgttcgaggggcggggaaggcgggtgacgtgagtcgggtcgggcgggcggagttgggatcggtttcgggaggcgggggcgagcgcgcggagaggtagacgcgaggagggaggcggttgagtagcgcgggcggttttgcggcgggcgcggtgggcgcgggcggcggggtttcgggattttcgcgcgtttttttcgcgcggcgtcgtcgtcgcgcgtttttacgtttcgcgttttacggcgttttcgtttcgcgcgtttttcgtgttcgttttttgttagttttcgggtcgcggtcgtttgtagagcgagcgtttagacggagttttcgggtaatttgagtggcgtcgatcggcggcggagtttttggtagagtttttcgattcggtagcgcggaggggattcgcgttcgttcgcgtcgcgttattttaaattttaagtagcgtcgttttatcggcgcggagtttcggttggaggtaagagtcgcgcgtcgggagatacgtatcgtgagcggtagcgtcgtcggttttttttttcgtcgtttcggagggcgaagtcgcggttttttagttttttgttgcgtcgcgatagcgtcggaatacgtttcgtttcgttgtcgttttcgttgtgtcgtcggcggagggggtcgcgagtttcgcgtttcggtcggaggatgtgcgttttcgcgggtcgtttagtttgagttatgcgttttaacggcggcggcgcgtcggtcggtatggagtttcgcgcggtcgcgttttgattcgttgtgcgtttcgcggtcggcgggcggcgggaggcggcggatcgagagtcggagatcggcgtcgcgggacggaagcgagcgggcgcgggcgtcgcgtagatggtttgggcgagttaggtttgaggtttcgtttttcgaaacgtgattatgtggatttaatagtttttaggatttaggtgagcgattcggtcggcgtcgggtgcgtgtgggcgcgtgggtgttaggttgggcggaagcggcgtttttttttatgttgtaaattaagggattttttttcgtttttcgtaagcgggtaacggggtgtatcggtagtcggaaaggggcgttcgttcggagtttggagtagtatcgcggttttggcggggagcggtcgggtttttagggtttcgcgcgttcggggtcggggtagcggcgttcgttttagtaattcgggaagtggggtcggttaggcgcgttcgtagttttaggagttagtagcgtagtgttttggtcggttgtttcggcgcgtttttttttcggggttcggggcgaggcgtcggtcgttgggcgcggcgggcgcgggggtcggggttgtcggggaaagttaaagtttcgggtttttagcgagagtttcgtaggcggagttggaggaaattatagttaaatagttatttcgttttttttttttttttttcggggtttcggggttgagtaggggttttttaggtttttagttgtcgatttagttgtttgcgggtgattttcgggttcgacgggcgtttatagttggcgggtagttggggcgggagagttggggtttttggggagtttcggcggttatttcgttgtaaatatatacgtatatacgttcgtcggcgcgttcggggtttgtttgtgtttgggattttagggttagatggaagagggggttcgagtttagagttcgtggtgggggtgtttagaaagatttttttcggtaaattttgttagttcgtcggggttttcgggtttttttggtttttgtttggggtggtttagggtttattagagtatagttgtcgtttttgttgggtaggttgtttttgagttttcgtttttttgtcggggtatttatcgagttcgtgtatttgggtttcgggttggaatcgcgagcggggaggatagaggtggaggcggagagtagcgtgcggttttcgagtttgtttattgggatgtattgcgttttcgcgttggggacg

SEQ ID NO: 6323 - DNA, 573 bp, Artificial Sequence
  Description of Artificial Sequence: Synthetic polynucleotide
gcgtttaagaagtcggggttttttttggttacgcgttttcgggggcgttcgcgttttttaggttttggttgtttgggcgtcgattttcgggacgcgtcggtcgatagtaggggaggcggtagtagggatcgtagtagttttcgttttcgtacggttcgtcgggtcgcggtgagtaaggcgggtaggcgcggcgggaggcgttcgacgtttatttcgggtttggcgttttttttcggttattacgcggcgtcgtttttcgggattttttagttttcggagtttcgcgcgtttagagtcgttcggagcgcgggcggggttagtttgggtagtcgcgggtcgttgttgcgtcggaagttttcgtcgttagggagttttttgggcgttaggttttgggtttttgggcgaagtcgacgttagaatatgtttggtttcgtatttagtttatcgtatttttagcgcgcgtgggtggggggcgtcggttgaggtggggagggtatagtttagttttaggttatagtgtttcgggcggggtagcgcggtgcggggtgaacgttatcggttcggcggatagcg

SEQ ID NO: 6324 - DNA, 383 bp, Artificial Sequence
  Description of Artificial Sequence: Synthetic polynucleotide
tcggtttttatagcggtttcgggttttcggatggcgtgacggtttgtggggtttgcggggtgcgttgttttcggatttgcggggggaggcggttgagttggcggcgttcgcgggtttagtggtgagtgcggcgtttttacgtttagttcgacgttttcggagcggtcgtcgcgtaggggtgggcgcgggtttttaggagggagggcggttgtgaacgcgttttgtttttcgcgttttcgtagttttttgcgtagttgatgatttttataattagtttcgttagttttattttttgtggatatttgggtaaggtcgagtcggacgttgttacgttcgtcgttacggtgggtgtttgatttcgtttttgtaggagtcgacgggcg

SEQ ID NO: 6325 - DNA, 853 bp, Artificial Sequence
  Description of Artificial Sequence: Synthetic polynucleotide
tcgttttaggggtatttcgtaggcgagatttttgtagattttagttaggaaacgttagtgaacggtagcgtagggaacggggcggggtcgttggtttcgtttatcgtcgcggtgttgggggttgggggtggttttcgggattggtgtggagtttgggtttgatttattgatttggttgagtggggagattggagggtcgtattcggagttgggttcggggacgttcgttggtgggaagggtgtgcgcgcgtcggaggtcgcggttgattttgtttcggcgttgttaggtacggtattagttcggatagtattattttgtatcggtagagtatcggtacggtgtttatcgtggatttggtttcgcgttacgagtgtgtcgcggtggtgttgtattcgtcgtttatttcgggtatgcgcgtcgttttttttgatattaagacgatttattgtttcgacgttttttttaagtgagcggtttgggcggggacggaggcggggcggggacggaggcggggcggggttcgggtcgggcgttaagttttattcgttttacgtttttttcgtagtatcgagaaggtgttttagattacgtcgttcgtgtttattatttacggtacggaggacgaggtgatcgatttttcgtacgggttggcgttttacgagcgttgttttaaggcggtggagtcgttgtgggtggagggcgtcgggtataacgatatcgagttttatagttagtatttggagcgtttgcgtcgttttattttttaggagttgtttagttagcgcgtttagcggcggttttaatcggtcggattttagtaataaggcggttttcggattttatttcgcgtcg

SEQ ID NO: 6326 - DNA, 1062 bp, Artificial Sequence
  Description of Artificial Sequence: Synthetic polynucleotide
tcgggatgaatgtagttacggaacgcgttaatgtaggaggtttttaggatattttgagcgttcgggagacgttaggcgcggtagcgggtacggatagcggaaaggggcgcgatttcgcggaatttttcggtagggtagggtttttgggtggtttcgggtgtttagaggaaggggtgggttcggggacgcggagggaaattggggacgcggagggaaattgaggtcgcggaggacgcggtcgttggtagttcgttgcgtttgtcggtttcgcgtgggtcgttttattcgggaggacgcgggttttttttgtttgtagcgttttcgtcgtcgtcgttttcgtcgttttttttttttttttttattttcgtcgcggttttcgtttttttttttttcgttttttattgtttttttttttttttttttttatttttttttttttttttttttttttttttttttttttggagcggttggggttgcggcgtcgttgttgatacggatcggtcgcggtcgttatcgggcggaggttgcgcggcgtagatttagacgggcggtttcggagggcgcgcggcgatggcggcggcgggtaggcggcgggcgcggcgggcgaggggttcgggttgagttgcgggtcggttcggatggcgggcggcgcgggttggtcgggcgttttcgcggttttgttgcgtttcgtgcgtcgtttgcgcgaggtgttcgaggtgtgcggtcgcgatttcgacggttttttgcgcgtggagcgcgtcgcggcgttcggattgcgtttcggttagggcgaggaggtaagttggttcgattttagtttcggttcggggattttagtttagtttcgtcgttttttttttagttttttcgtcgggttattcgcgtggttcgaggcggtggttttttttttaatttttttttttcgtcggagtttaggatttcggtttttttcgggtatttttggtttagtcgggttttcgtttttcgtttttcggcgttcgtgtttcgagcgttacgcgttacgtttagggtggtttttgcgtttatttttttttttcg

SEQ ID NO: 6327 - DNA, 918 bp, Artificial Sequence
  Description of Artificial Sequence: Synthetic polynucleotide
tcgtcgtttttatagcgcgtttttaatatcgttgtttttgtttcgcgttttagagcgtttttagtttttttttttattttttttatgagtggagtcgggtttggggcgttttaggcggtgacgatttgtagaagtttttgagaatgtaagattttttggagttttcggttcgttagggtcgggtttagttaggacgtttcgtttagatttttttttagtttggggtgggtttaggttcgtttgtttttattgttttgtgttttaggagttttcgttcggagtttagattcggtgttcgaagatgagagtgtcgttttttttcgtcgggtgagaagttagtttacgtttcgtcggttaggtacggtgtttttcggggcgttttacgggaatttttgtgtttttatcggcgttttcggcggcggggtagttttggcgtttttttttcgtttttggtttaggttcggttcgcgggtgtagttttttttagggttttttttttttttcgggtcgcgcgttcgtttcgtatcgcggcggtttttcggtagtgtttgtttttattggacgtatagtgatcgtgacgggtacggggcgcgagtttttattattataatgggtgtgtatggcgcggggcggggggcgttgtcggtttcgagcgagggaggggagaggagggggtgcgttcgtgttttgttcgtttcgagttttcgagttcgcgttttattatcgtagcgagtcgtttttttgggtcgtttttttgttttttttttttattcgttttttttgtttcggttgttcggagatatgtttggtggcgatcggggatttagagttcggtagtcgtttttgtttttgtttttgcgatttttgttttttttttttgttttttcgcgtagcgtttttcgtcgcggaaatttcgcg

SEQ ID NO: 6328 - DNA, 865 bp, Artificial Sequence
  Description of Artificial Sequence: Synthetic polynucleotide
acgtgcgcgttcgtcggagattagggatgaggttattaaatgattgtttcggttaatttttatttcgtttttattcgtatcgttttttttttaattgatttaattttttaattttagtttttcgtttttggtatcggtttttttttaagtttttagattttaattttggttttcgattcgtttcgttatagtttgggaagcgggagaagtagcgcgcgtttttttgcggatttttttttagggaagattgtggtgttagttgtttagggggattagggggttatcgggatttagcgtaatttttgtttcgttttttaattttcggaagcgttaatagtacggtttttacgtaatgtcgggtttttaagtatttttaattcgtatagttttcggggaggtcgcgtagatatcggggttttttatagtttattattttggtgtttgaagttattttggagtttttatcgtaggggcggggattagtgttaatgggtagcggggtttggtttttttaattagtattttagaaagagggtttaggggcgggggcgggtggatagggagggaacgggtttgggtgaaaggggtttgtggagtttaaatttagtgaatagggttttaagtgtcgtgttaggacgaaaagaaggcggaggttttgggataggagttggttcgggggtcgggggacgtttatttgcgtttcgggaagtttttagtttcgggcggttttagcgtagtcgggcgtttagcgtttattgtttgttaatcgttagttcggtttttaaagcggtaaggttttttcgcgagggggcggaggttcggaggagaggggaggtgaggagaacgcggaggtcggtataattcg

SEQ ID NO: 6329 - DNA, 408 bp, Artificial Sequence
  Description of Artificial Sequence: Synthetic polynucleotide
gcgttcggttgttaggtaattcggttttcggttttttacggcggttttttcggtgtgttttattaagagcgatagggttggtgattcgaggggcgcgtgcgcggtcgttagtttgggatttgtacggatttttttttttttagtacgttcgttcgggggttttttttttgttacgtcgttggggttcgttcgttatttatagttttcgtagagtttttcgggtatatcgcggttggtcgttcggggttaaggatggggcgggagcgtttatttattttcgcgtcggtcggggtatttaagaggcgcgttcgtagttatacggcgtttcgtttttcgtttcgaaaaagtttttgtttttttggcgcggtgtggcgttttcgttagtttagtcggatttttttcgtttcg

SEQ ID NO: 6330 - DNA, 2245 bp, Artificial Sequence
  Description of Artificial Sequence: Synthetic polynucleotide
acggtttcggggtttggcggggaggtttatcgttgtttagagggttcggtcggtcgggagggggcgttgtgttttttttacgttttgttcgcgggtttttagtagcgttcgtcgcgttgtaacgtaatgcgcgttcggtttttttttgggtagcgtttagtgttcgtttgttttgtagggtatcgtcgttttttttttattttggggtttttaggtttaaagggtttttagatttagttttttgtttgaattaaagtggttaggtatttagtttgtaagatgaataaatgaaggaaagaaggaacgaatgaataagggtttattttgtagagcgttcgcgttttagcgcgtattaggtatattagtgttaaaggtgttgggggtcgggtttagcgttcggcgcggttggaatgggggcggcgaggagttttttttagttagtcgtagggcgggaattgtttaaacgtaggtcgtagttttattgggtttcgcggcggtttcgtttagtagggatcgttttgttttttagtttttaatagtttcgtttttataaatttatttgagtattttggtttaagttattttagatttttgggattttttaggtttcgatttcggtcgggcgggaggttgattttttatcgcggttttttttttttattttcggttttttttcgggttgcggcggtcgttattgttgttagcgcgtttcgaggattgtcgtaaatttcgggcgtagggaaaggggattttggcggcgggatatagagagcgggtcgggggaaggggagggaacggaggaggcgaggaggagttgggagggagtcgaggggcgaggcgcggaggagggatcgaaggggagcggaggggagagggagggggaggaaggggaggggacgagttgggcgagggggcggggagtcgaggcgaggagcggcgcggatcgtgggggaggtggcgggggcgaggtcggtaagaggcggtcgcgggtcgggttgcgtcgggaaacggcggttagattttttcgggaaggggcgagcgagagtcgggtcgggtcgggtcgggtcgcggggtcgggaagcgtcgagtcgggtatttttttattaggtagcgatcgaggagttcggtcgtttatttcgtgtcgttcgagttcgtagtcgttcgtcggtttttttgggatgttcgtaggattcgggtatttaggacggtagtcgagcgagttcgaggatgggagggtattcgtagtttcgtttcgttaaggtaatagttcgtcggttatttttcgagcgttggcgttttcggtttttggcggacgcgggacggggttgggttgtgggtgtgatgggggcgggggcgttgggagagtcgtgtttaggtcggggaaggttgggtttcggggtagtttaattttttggatttttggagttagggttgggtaggtagggggagatttaggtgagaaaagaaatcgtggcgaagtcgtcgggatgttggcggaggagggggttcgtttattcgggtagtcggtttcgcgttaagaatcgttttaggttttcgggtagacgtttaggggaggggaggttttattttttacgttttttttgtagatttcggtttcgggattggagattttgaagcggggtttttatttcgttttagcgtttttaaatagtttttcgatttcgtacgttttcgttttagttttgggagcgcgttttgttttttttttttcgcggcgagttgcgagttcggagagatgaatgtcgttcgcgtttgcgagtttttgattaatatcgtagtttcgggggaggagacggtgtttttggcggtagtttttgtttttcgatcgcggttgggagcgcgacgttcgtttttcgagtttgggtattcgcgattttcgcgttgcgcggtcgattttgcgacgcggatcgggcgttggagtttaggaaagtagttagatcgtacgtttagcgtttgttcgttgaagttcgtgggcggtgggggcggttcgcgggttgtgtgagttagggaagggtcgggaggtcggtagttcggttcgtcgttcgtgttaggcgttatttgtagttttaagcgttttttagagcgttttggttttgtagggtataggcgcgttcgttgtagtcggtcggagaggcgggtgggtttttgcgttgttgtcgggatatttcgtttcgcgttagtttgggtatcgttttattcggggttcgggatttcgtagggttcg

SEQ ID NO: 6331 - DNA, 2972 bp, Artificial Sequence
  Description of Artificial Sequence: Synthetic polynucleotide
gcgggtcgtagtcggagaggaataggaatcgtagtggggacgttttggttttcgggtttatagtattcgggacggacgcgtagtagcgcgggtcgggaattgggtattagggcgggatgggtgagaggttttaagggataaggtagggagaagcgtagcggggtgcggggaatcgtacgttttttttttgtttttgttttttatttcgaggcggtagggcgggcgggcgcggtttcgggggtgggcgggttgggcggggcggaggcggggtcgtagtattggttttatttagtttttttcgttcgtagttagagcgagtcgagtcgcggttagtttcggcgggtagggggggcgttggagcgtagcgtagcgtagttttattagttcgtaaagcggatcgagttggaagtcgagcgttgtcgcgggaggcgggcgatgggggtaggtgttatcggtcgcgttatggacgggtcgcgtttgttgttgttgttgtttttgggggtgagtgttagtcggagggggttcgttttttttttcgggattagaatttcgagaagagtcgggcgtcgttattaaggaaatagaatagagtattggggttttagatattgagggtgggtggtgggaaaggatttttgatgtcgggattacgaaggagggtttagggttttcggagcgtagaggcgattttttagggtggagatgagggtaagatcggagtacggatgtcggtttttaggtatcgtagggggcggtgggggagttgggaggggttttttaagagggggtatggggtttttcgatgtttaggtttttcggaagaggatattcgaatgtcgggatttcgaagggattttttttttagtatttcggtttttggagagtcgtgggatagaattaaggcgagagaaggagggggaattggacggggattagagatgagaggggcgagttgggttggggcggggagttcgggacgacgggatggaataatggaggaggtcggagggattggaggtagaggggattcggtaaggataatggggatcggttagataatgggggggaggggcgtcggagggagaggttggggagcgggagagaggttgagaagtgggttagggagggtagaagaggggcgacggcgagggcggtagagagatggaagtagaaggaaaggagatagagcggggcgcggattttgaagtggtcggggtttcgtttgttcgttgagggatagtgagacgagaagagagagtagaggtttggatatttttagcgtttgttttcgcgtttttgttcgcggttttttttagtttcggaattggggttgcggatttaaggttgggaggggagtgtttatttcgtcggggcgaattcgttttcggggtttttttacggtcggcgggttttttcgacgcgcgtgtttttacggtttgaagtagcgtagcggatcgcgagggacggagcgggtgtgtttttattcgggttggcggtggttacgtttcggggtgtagagcgtcggggcgtattaggcggggattttttttggtcgcgcgtagttttggttacgtaggcgggaggcggtaggtagggggcgttgcggggcgaggtaagtgtagttcgtcgttgtttgtttgcgagtttggggttgcgcgtcgttttttatttagttgcgcgattcgagcgtcgcgtttatcgcgtttcgtgggttttcgcgtttcgaagggtcgggattcggtttgagttttttttggttttcggtgtaagtcgttgggtatttaacgagacgggggcgttcggacgtttcggattttgtagcgcggtatttcgggttatcgattcggtaaaggtcggcgggtttttcgggtggttcgacgagattgttagatgtggtttgttttatggttatgaatcgaatgttttggaaggtttggtaacggaggaggcgtttttatttttttcgttagtattttttattagagtattgcgttttaaatttcggttttatagatacggagattgaggttttgagagtttaaacgatttggttaagattttatagtaagttgggttagagtcgtggttagatttttcgatttgatttttagttcggtatttttttatttttttagggggtagtcgttgttttagttcggggttacggttgcgttttttagtagggcggggggggttgatattgtttttagagttcgtcggcggtagagtttgcgggtgaggtgggtagagattttgttcgggtgcgggttttagttcgaaagtttagttttagttttttggagttgttaggatttgtggttgcgttcggggatttgggagcgatcgcgggtacgtttgttgattaacgtcgttggttagagacgttgtttagacgcgggtgggcgagcgtagattaggagagcggggaggagggatcggattttagaggggtaacgatttgggtttcgggtttgggtaagagcgagggttttcgcgcgaagatttaaggaaggaggggagttgggcgtggaggatttgggcgtttgggaaggtgtatttcgataggaatttgtcgtttgtagtttttgcggttttcgttttcgtttcggcgcgcggttgttcggtttgggatggttgtgcgcggttcgagtttttttttgggtcgcggtgagagagagagggttgaaattagagcgcgtttcggcgggtcggttggcgggtcgcgtcggtaatggaggtattttgttatttagacgtttgtaattagagtcgtcgggttggttaatgcgtttaatagggatggaacgagggtagtaaatgggcgtgcgtgagcggtcgggttgagttgggtggatggtggatggggaggtagtttcgcgggggacgggtttttatcgtattgttttagtttagtttggtttaagcgtttcgttttttttttgggggatcgcgtggggaggcgggaataatcg

SEQ ID NO: 6332 - DNA, 1026 bp, Artificial Sequence
  Description of Artificial Sequence: Synthetic polynucleotide
gcgggcgagtggagtgttttttagatttcgcggattcgacgggagggattttgtaatgtttaattagaatcggttgttatggcgatagtttttaggtagcgtgggttgagtttttcgtaggaataaagggtgggtcgtcgttggattttgcgcgcgttcgttattaattttttttttagattcgagaggggcggcgcgtttcgttttcgggtcgcgtacgtcggtgttcggcggcgcgtacgtttgcgggagttttttttaggtaatttagtgttgatcgttcgtgtcggtgcggtcgttaatcgtttttgtcggagttttaggtttaaaagtagttttttattttttttgggttttttttaatttttttttcggtttgttttggggtatgagtagcgatggtcggttgtatttttgaggagaaaatttatcggcgttttttggagttatttttgggcgagtttcgcggatcgtgcggcggcggcgagtcggagtcggaattcgaattcgaattcgaattcgaattcgagttcgagttcgagttcgaatttgaattggtagaagttgaggcggtcgaggtttcggtagaggaattcggggaggaggcggttacggtagtcgcgatggaggagggggattaggagtaagattcggagttcgaggaggaggcggcggttgagggtgaggaggaggaggagggcgcggcgacggcggcggtagtttcggggtattcggtcgtgtcgtcgtcgtcgttttagttgtcgtttttgttttcgttttcgcgatcgttgttagagcgtattattcgcgaggaggtggagggcgaaagtttggatttgtgtttgtagtagttttataaatagttaagtagttgggtttggttggtggtgggttcgcggtttttatcgcgtcggtttcggacgcggttttttcggttttttaaattgtttttttttttgtttttttttttcgtattcgcgtttgtcgtcgttgaaagcgttttcgttgttcggattcgggcggtcg

SEQ ID NO: 6333 - DNA, 10207 bp, Artificial Sequence
  Description of Artificial Sequence: Synthetic polynucleotide
gcggaggcggtatagttggagttcggattgtggtacgtcgttatcgtgttgtttcggggaatttcgattcgttttttgcgaaagcgttttcgaacgcgaatttagagtttgtgaacgcgtcggtaagttttttatttttttatcgtcgttcgtcgtaggtgggttcgttttaggggttttttttgcgttttatttcgttttttaagttatttagtcgatcgtttcgtttacgttttcgtgattttagatatttataattacgatttcgtttttatgtatatttaacgtacgacggtgtatagacgtgtatttgatttttgcggattaggtgttttaagcgtatagcggttattcgcggaatcgcggttcggggttagtgagtcgtttgtagtttttcgggttaggggattttttagaatttcgggaaagttattcgaagtttattcgggatgcggttttggttttcggtcgcgtgatttcgtttttaggtgtagaacgacgtttttttagggtttatagttgttaggttgggttttgttttcgtatttttcgggaagattagggacggggttatataggtcgtggttgcggagacgttttttcgggttatttcgcgattaggagggagtcgagtcgttcgtttttttcgcgtttttcgttttattttagttagttggttttattttgcgcgggataattgggacgggagggaggcgacgggagggcggcggttttagagagattgcgcgtttgttagcggtaatttgtttaagtggacgggacgggtcgggtcgttgcgggttggggttatcgaggtcgcggtttttattttaattagatttgggatcgcgggggagttcggttcggtcgttaaatcgggttggttggcgttagggtttcgggaggtgcggttcggcggggaagtcgtgatgggaagcgattttgtttagggagtgttttttattattatattttttacgtttaggtagtgatcgacggtttggcggtatttttatagcgggtttatagtacggggttatatacgttttttgagtttagtttgggtatattcgtttgttatcgagggtttaagttagtttgtagttcgcgtttcgttattcggacgtaagttcgtcgttcgttttgttacgcggtcgtatagttcgagttttttgttgtttattgttcgcggggttacgtaatttcggttttgtatatagaggaggaagcggcggggattttttgttatttggaggtttaattcggggaaggttttagtagtgttttttaattttgcgagaggtgacggggtcggaggacggaagggtagttacgttaggtttaggatcgcggttttattcggtttaggtcgttttcgttttcgttttattttattgttgcgggaagcgcggggcgtatagatcgcgcgttattagtttaagttcgttcgacgttttggtcggagatcgtttgcgagagggaggggcggtcgagcgcgcgtttttcgtttgtttgcgggatttggtcgatgcgaagtgataggggtcggagttttgttgtggagtttcggtcgtttggcgttagtcgttttcgttcgcgttttttttttttagtttcgggcggttcgcgaggcgtttttcggggttttttaaaggaatacgtatattcggttttcggggtttcgttaggggagggggtttttgggaagggggagggggtcggtttaggtgggggaggggtttagcggaggttttacggcgtcgttttagggttttttaggtttttttagcgttagttttcggtgagtttcgggtatttttagttggagagtttggttgggggtcgttatagattttttagagcggttgtagtaggattttagggtgatcgcgggatcgcggggcggggcgagtggtgggattttggttcggatagagtttcggaaagttagagggaaggtcggtgttattgtaggtggggtcgtcgtttttagatgtagtcgttgtattgtcgtcgttaggtttttcggttaaataatttaggtttgagtgttttaaattttttaggtttcggatttttggattagttatggatggattaatgaaatggattaatgtttaaaacgtatatatttagatgtatatatatttttataaggataaaagtatgtgtttatatatatatatatatatatatatatatatacgcgcgcgcgcgcgcgcgcgattttgcgaatgtatttacggatttttaggtcggtatttgggttttcggttaaggaaagttgttttggttattatttggttattttatcggttgcgtaaacgtgtttataacgggttttttttcgagaggttatatttcgtttaaggtggagttagtaggtatttgtttgtggaaaattgtagtggattttgtttcgtttgcgtagattgcgtagttcggagttaaagattcgttttggttagagaggaggtattaagagaggtgcgatttagttaagaacgaggtcgtggagaaaattttgtgggggcggcgtttatatatgcggtgatgaggagttgtgagggttttggggtcggtttcgaaaagtagggataacggtcgtagaggttatattgttttcgtcggtttcgaattcgtattgttaggagagattcggtttttaaacgttgtttttaacgtttaataacgaagtgttttgcgatcggtgtgcgtagtgggcgggcgtttgtatgggttaatgttggatgtacgcgtttattacgcggttgtacgggtgggaatgttattcgtggttagtgtatgttttgtttttttttttagaaaacgatttttaggaattagtttgagtgttcgcgttcgagttcgattggaagtaggtgcgtggtcgttttatttttttcgtgtatattttgagttatagttttcgttgcgtatagagggtattatacggggttcgatatatatatatatatatatatatatatatatatatatatatatattattattttatgggggggaaattgaggttgtcggaagatagaaaacgaagattgattatagaagagggggttttaattataggtgttcgtagatattttaatttttttacgcgttatttagtattttttaatttaggagacgtgcgttttcgagagatgagaagaaattaaaaaagtggttggtagggcgaagagaggaagtcggtatttcggaagaaggagattttcgttttcggtatcggatagggcgaaaattcgttgggtcgcgggtggagaattcggggttcgttcgcgcggtgtcgttttgtgtttagcgaaaggtgcgtttatttttttggtttcgaggattcgtttttttcggtcgttggaaagtttagggcggggttcgggtttgcggagaattttaggtttttttcgagtttttcggtgaaggcgggcgcgggtagggggttttcgcgtttttttagcgtaaggtcgcgtttcgttttcgttcgcgtcggttttagtagggttcggttatggttttatttattagttttcgttatttgggattcgttttcggatttcggtcgttcgagtttttcgattcgttcgtttatcggtttcgttttttagtgtttgttgttttttttcggggcgtagggatttttaggcggcgttacgattcggagttgggtcggaggttaggttggggttcgggttagagcggtcgggtttttgggcgcgggagaaggagggcgtttttttttcgttcggggtcgtgttaatgttttgtatttggggtcggcgtgcggttgcgggtttttttttaaggtttcgggattcgggtttttttcgttttaggttttttcggcgggttaggtcggtttttcgcgttttttagttcggcgtaggtagtcgtaggcgcgggcgggcggtgggggtcggggtaggaggaggggtttcggggttcggcggttcgttattggttaatattttattttgttgatatgtttttttattgttgaggttttcgatatttttttttaggttttttttttcggtcggagtttggtttgagttgttaaaatttcgttttcggagatttataattggtttaaaaagcgtaaaattagtaattaaggggggtttggttcgttagcgtaggggattcgagttgggtaggatatgtgagatagttatagttttttagagattacgataagatttaattagtcgcgcgtggttttcggcgtcggagcgggttagtttagttcggtttagttcggtttcgcgtagagttttcgtcgttttcgcgtatagagtcgggtgttttttgcggtgcgtcggacgggaagtttcgaggagtagttgttgcgttcgttattcgggtcgttcgtttatcgcgcgcgtcgtcgttcgggtcgggggttcgagtcgcgcgttttcggtttcggtttcggttttcgggcgtttgggtcggatgtttcgatgagagagtcggcgttggcggttagcgttatggtttattattcgttttacgcgttacggttcgtcgatttttttatgttcgtttttttggcggcggcgtagtttttttttttttcggtattcgcgttgtcgttcggcgcgttggttaagtcgttgttcgattcgggtttggcgggggcggcggtcgcggcggcggcggcggtagtagcggtcgaggcggggttgtacgtttcggtattgggttcgtattcgttcgtcgcgtatttgcgtttttttaagagtttggagttcgaggacgaggtggaggacgattttaaggtgacgttggaggttaaggagttgtgggattagttttataagttaggtacggagatggttattattaagttcgggaggtagggttgtcggtcggttggaaggcgcgcgggcgggcgggcgggttggggtacgggattgtacggattagagtagagttggggattttcggttttcggttttcggttttaggttttggttttgacgttacgtttcgtttttacggataattaagttgatttttttcgtttggtatcggagcgatttttttttaaaataaaaacgttaaaatttttcgaatgaaataaaacgaaaatatattgttaaagaatagttttaatcgttttgagttttagcgtagaggaggtttcgcggtttggttttggcggtttttttcgtttcgcgttttcgtttttttgcgttcgggttcgttttcgagttcgggggaaatttagttttttttagattttgtttcgatttcgaagtttttagtgggatttgggtttagttaattttacgttggttgttcggtttttggtagcgagtttcgggttagtcgagtttttcgttttatcgggttgggagttttttttttatcgcgggtattcgagttttggacgtattcgtcgttttaggttttaaagtttgaagaaagttatagtttcggtttttttatttttcgatttagttatcgagaatttaggtttcgggtttatttttttttttcgaattgtacggttaggatgttttattaggttttgtagtttagtttttaatataaatattttttagatttatttttgggagttttcgttttaagtgggtattttttttgaacgaatttcggggagattaaggagaagcgagaatatttttagagggtttagattttttttttgggtattagtttttattttagattagggagaaagagggtttttagatttgagtataaggtttaaaggaggttgtttaggagagggtttgataggtagaaatgggattttttgggagtaataattataggtggggtcgttcgggtagtgatgagagggtagagtagtcgattataggggaaatagttaggcggtagcggtgtgcgtaacgaggagggataaataaaggaggagtggggttttggaatttagaatagtcggttttaatgggattttttttttttttttttttttaggcggatgttttttttttttaaggtgcgagttagcggtttggataagaaggttaagtatattttgttgatggatattgtagtcgttgacgattgtcgttataagttttataattcgcgttggatggtggcgggtaaggtcgattttgagatgtttaaacgtatgtatatttatttagatagtttagttacgggggagtagtggatggttaagtttgtggttttttataagttgaagttgattaataatatttttgataagtacggtttcgtgagtgttggggtagggtggggacggtgtaggagtttgttgatttagtattgtagttgagtaggagagtagggcggtaggattttttagggggaagcgttgggtaaatttttagagtgtttttgttcgggttattgttttgtggtttacgtgggttgggtttgggtttgggttttagcgtttttttttgtaagtttgggaaatggtggggttagtggttggtagtttataattttagttttttaggtcgtggagggttttttgtatcgttaatagggaggtaggtgttgttaggattgggtttgtagtgttggattacggaggttattttgtttttggtttgtaggtgtcgagtttggaagatttgtttatgattttaatttgtttattatttttttgttaagattcgcgtttttggtttttttttaagattaggggatttaaaagttaaattattttttttatttatttttttagtttttttaagatttttttttttttttataggtagatgtttaattaggaggagagggtttgggggttttttttatttatgtttgagtaaggttttagcgaacgggggtggtgttttatagggtaaaaggaattgtttattttgaggtagggtagttggtgagttttcgaaggttggaattttttttttgtggggttagggggtttattagtgttagaaaggaagagagtgttaagagtggaattgtagggttttgttttgttttattttgtttgggttttttttgtggggaggggttgttttttggttggtttttttgttttgttttttgttttgttttgtttttgttttgttttatttttgtttttaattgggaaattttttttaatggtaagagaaaaagaagttgtgaaaagagaaaagcgagaggaaaagtagaagaaaaagaaataagggtgagaaaagagtagagataggagaaaatggggaagaggaagaatcgatagagagagagagagagagagagagagagagagagagagagaaagtggagaggaagaggttaggtatttaaagaatagaaaagttcgggtcggggttggtggttgtcggttgatttttatttttttcgtagattattttaaattttatgtataagtattagtcgcgtttttatatagtgcgagttaacgatattttgaagttgttttatagtatttttcgtatttacgtgttttcggagatcgattttatcgtcgttattgtttattagaatgataaggtgcgcgcggcgggcggtgggttaagtttttgtattgacgttttttaatacgtgtaggtttaatcgttcgtttatcgtttttcgaagttttttgtacgggattcgcgtttttgcggttcgttttcgagtatcgagtttcgtatttatacgcgtagtatttacggaagtttttaaggcgtttttttaattttatcgcgcgtatatataggtttttttggggcgagcgaatagttgggtcgtcgttttgatggagatgtttatttaataattagttgagatttcgggttcgcgttgatatttttatattttattcgtttattttttggtttaggaatgagaatgtaagtgaagagagggcgttcgaggtaatttgtttaggttttatcgatgtttagaattcggggtttagtttttattttttcggggggagttagagggtgggataggtgatatagttttttaaagtatttttggttattgttttgggttagtttaggttttagattttttgggaggcgtttagagaattattttttaattaaagggttttttttgtttgcggtttttttatttttgttttagtggggtagagtattatttttttaggtttgtgtttttgtgcgttattgtcgagtgaaagagagggtacgagtgttcgtgtcggtcgttgtggttttgtgaattaaggtgtacgttgggttgtgcgtgtttcgtttggggtgtgttggatatttgtggaggtatgtgaattcgtttggtttcgtaggcgtttgttatgtttgtgtatatttgcgtgtgtgcgagttcgtgagtgtgatttggttttgtgtgtatttgtagttttgcgtgtgaattgtagtttttgttcgcgtttgttcgggtgcggagtcgtttaatttgcgtaagttcgcgggcgggtgtgtatgtttgggttggtttcgatattgtggtattgttttaggtttgtgtggggttgtttaggtttgtttagggataatttttcgaatgaagtttttggaggatagatttcgtcgtttttcgcgaggtttttttatcggttttagttcggggcgttttattttaggcgggtgggtattaagtggacgtttttcgggttttttttttgcggttagtattcgttgatttcggggtgttatcgattacgttggaagagttacggtttgatttagcgtcgtttttttggttttcgtagattatatagttgaagatcgataataattcgtttgttaagggttttcgggatatcgggaacggtcggcgggagaaaaggtgagaggtcgaggatagtagttttgtggcgggtgttcgcgggagtagcgagtaggagggatggagggatgggtttttcgttgatttggtttattcgtttatttttaggaagtagttgacgttgtcgtttttacgtttgtacgaggagtattgtaaattcgagcgcgatggcgcggagttagacgtttcgtcgtgcgatttttttttcgcgcgggaattatttattttttcgggcgtagcgtttagttcgttgcgtttgtatcgggttcgaggtgagggtcggatcggaggagggatagggaggtggcggcggggggtttttaggtcgttgggttggttttttgttgagttattcgttaatttgaaaggttaggaaggaaacgtcggcgagtgtttgggatggggttttcgtttcgggatttttttacgagggcggttttcggtagttagaagattcggtcggatttcgagtttggttttttgggcgtcgtgtaattttatagttgtagggttttttttttagggttgggttttttttattgtaaatttggggttttggattaggtgatttgtagttgttttttgttcgattttagtagttttttcgatttggttttttcgagagtagtttttttcgagtgtttttgattttgttcgtcggttttcgtttaggtttttgtaattcgcgcgtttttttttcgtagttgaggagaagtcgtgcgtcgcggatagcgattcggagtttgagcggttgagcgaggagcgtgcgggggcgtcgttaggtcgtagttcggttttagatagcgttagttttattcgtttgatcgaattcgagcgcgttcgggagcggcgtagtttcgagaggggtaaggagtcggtcgagagcggcggggacggttcgttcggtttgaggagtttggagaaggagcgcgtcgaagttcggaggaaggacgaggggcgtaaggaggcggtcgagggtaaggagtagggtttggcgtcgttggtggtgtagatagatagtgcgttttttttgggcgtcggatatttgttcggtttggttttttttagttatttgtacgggtagtagttttttgggtcgttgggagtcggttagtcgttttttttgtattttggatagtttattatgggttttggcgtttttttcgttatgggtatgggttatttattggtttcggtggtaggcggcggtaacggcggaggtggcgggtttgggatcgtcgcggggttggacgtaggcgggttgggtttcgcggttagcgtagtaagtatcgtcgcgtttttttcgttttattttttttagtatatgttggtattttaggtaaggtttgtgatttcgcggtagcgttagcgagggagaaggtttagggagttggcggcgaggttagcg

SEQ ID NO: 6334 - DNA, 2392 bp, Artificial Sequence
  Description of Artificial Sequence: Synthetic polynucleotide
tcggattttttgttttttcggtgagtcgttttttttttgtcgtcgggttttttttttttttttttgtttagttaaaattcgaatttaggcgttaggggagaggatcgtcgttttagtttgttttattgttgggggtacggagtttttgtttttttaaggttacggttttcgttttcgcggatttcgttcggattttttttggttatcgggacgtttcgttttttttttttcgtagtaattttttatattcgggttgtgaagttcggggtatttttaggtcggcgataaataatttatagggaacgtggtattaggtttttttcgcgggaggagggggcgcgagtagcgagagttatcgttattcgcggtttaaggatattcgcgatgcggcggcggcggcggcggcggcggtttcgggcggggattcgcgttacgttttttggcggttaagttgagtattacgtattcggcgtttttcgttttacgttgtttttcgtcggcgttcgcggtttcggggtttttatttttatttttttaagttgggtcgtgatttcgagtttcgtagtggggggattaagttagtttggtaggcggttttagtattattttaggttcgttcgggggttttgggcgaatttaggtgtttcggatttgtttatttgtttttggtacgtttttatttttcgggagtttagaaataggtttaaagttattagtatcgttaagatttggacgggttttgaaatatagttagcggaatggtattttttttaaataagtgttttttttcgatttttttgtggttcggggttagggattgaattaagataacgttattattcgagggttgggggatcgagttagaagtttttttggacgattagggttgggaaatcgagtggacgaatggggtgggtattagggtttggcgggaattttcgttttgtttatttagtagttttttgtagggtcgcgggacgtatttgggggtttaggttgtcgggtgtttttgtttcgcgtgttttcgttttgttcgcgtaggtaggaaataggagattcggggtttttttttttcgtcgtcggggattttgggcgaagtttttagagatcggcgtaggcggttggtgcgtagttagggtttagcgttaggttttgttcgtttagtgttttttttgtttatttttttttttgcgttttggaagttcgggagtcgggtacgggttagtatttgtaagatgttattattttggaagtttatttcgatttttttaggtcgtaggaaggagagagttaggttggggtaaaggagatggggtagagttggaaggggaagaagcgggattcgcggcgggggaaggggtttgggcgtcgaggcgagtgcgtagtaggtgtttagtagatttagggaaattggggtattgggttggggagtcgtatagtttttttttattttttcgatttttttttaatttttcgttttggtggattttagtttcggtttttattttcggttttgtttttcgtttttcgtttcggcggtttttagtagtaatagtttgggttcgcggtagtttagatttttttggtttcgcggtgttgtcgcgttaagcgaaggaggaggagggttcggcgattttggggacgaacgttttggacgtttcgttcgcgtttttttttcgcgttcgtcgcgcgtttgtttgttcggtttttttttcgtttttttttcggtcgttcgggttaaaatttaaggttaggtttttgagggttcgggttttttagtcgttttttttttgagtttcgagagttttgcgtgggtttaatttttcgggtgtttcgtttttgttttcgtcgtttttgttcgcgcgtcgcgggaatttagttttaagttggcggcgaagttggtgtttttcgttcgtcgttcgttatttatcgaggggaaggggcgttgcgttcgcgacgagagttcgcgtcggtcgtttttttcgcggtgtttgttttagagtttcggtttcggagggttggcgcgtttagttttagtttcgcgggcgtcggagttcgggcgcggtggggcgggggcgggggcgggtggcgcggtttggttcgttggtttcgattcgtttttgcgtttcgcgattttttcgaggttcgtacggcgttcggtttcgtttcgggttgggttgcgtatcgcgttttttgtttttagagttcgtagtcgattgtgcgggagtttttatcgtcgttcgcgagggttcgtttcgtcggggttcgttattttcgtttcggttcggttcggttcgttgtttttcgaggtttttttcgtcgtattttcgggtttttttttttttttcggaatcgcgtttttagatttgatattcggggtaagtgcgtttcg

SEQ ID NO: 6335 - DNA, 564 bp, Artificial Sequence
  Description of Artificial Sequence: Synthetic polynucleotide
tcgattttttttcgtggtcgttagggtaggggtgggaggaatttggaagttacgtgcgatgttcggagttgcgttttttgttttggggcgtgggttcgcgagcgtcgcgtagtttttcggatcgttttgagttgttgcgttcggcgttgtttttttttttttagtttcgcgtttttttttcgcgattttttttttgttttttcggttttggaagcgttttaagatggggtgggggtatggagggagagaggggaggagggagttgttcgggggtagtgtcgttaggaagtgggacggggattttggcgtttttttaggttgttgcgcgcgggttggggatcgtgtatcgttttgcgcgttagacgatgtattttttggaacggtagttgaggtaatgcggggtgtgaagtggcggcgggtagaggggttcgtaggggttgggattcgcgtgtttttttttgtttcggtgcggagtacgatgtgttcgggcgggggcgaggacgttcgggaggggttgggttgcgtacgttcgcggggtcgtcgtagatgggcggtttggaggcg

SEQ ID NO: 6336 - DNA, 3277 bp, Artificial Sequence
  Description of Artificial Sequence: Synthetic polynucleotide
gcggttgtattgttgcggggtgtaagggcgggggaaattatatcgttaggcgaggcgcggggatcgtgttggaaggttcgcggcgcggttttttttgggcgattgcgggggcggtttggtagggagttggggcgagtggtcgtcgcggggtttcgtaggcgcggggaggtatcggtcgggtattcgcgcggttgaggcgagggcgggggatgtttggtcgggtagggaacggggtgggggagggtagaggggcgagcgagtcggagggggaatcggagtcgagggcgcgcgcggatttcgaggttttttaggcgggttttgagcgattgtaaagtttgttcgagttggttgagcgtttcggcggtcggtgttcgggataggtcgtttatggtgtttttgttcgagtcgggttgtttgcggtcgtcgttcgttcgggtttcgtcggtttcggggtttagcgtgttttggttttcgtagcggtttagtttggcggttagttcgcggatggtttttttttggtttaggatggtttttttttgttgtagtatcgtttcgcggagttgtagtacgttgtttcggagtttttcggcgtcgtcggcggttacggacgcggcgtatatgtcggcgtttacgggtatcgaggtgtagatgaagcgcgtcggttcgaaattttgggtttcggcgtttaggaggtagagggcgagtagcgtataggtgcgcgcggcgcggtcggtcggtatggttgcgggtatcgggcgtttcgggttcggttcggttcggttggggttcggtttcggttgggattcggttcgggttgtggtttcgcgagcggttcgcgttttgggcgtcgcgtttttcggtcgcgcggtttatatcgtcgcgttattaggtttttattgtcgtttgcgttgcggagttcgcgttttttatgtcgtcgcgggaggggtttcgagtcgtcgacgttagcgggggaggaatttcgttttaattgttcgcggttcgggttcgcggcgcggcgggggttttacgagcgcgttatcggggttgttttcgttcgcgtttttttcgtttttttgggagttgtcgcggtttttttttttttcgttttcgtttgggtcggcgttgttgtttcgaaggtttcgagagtttagggggaaggaagtcgggtttcggtttcggattcgaggatggattatttgcgtggtgttttcgaattttcgacggggttttaggcgggcgggaaattatcgcgttcgggagatagaattcggttcggtttttttggttgtattgaatatttttgggtcggggtcgtttggagtcgggttgggtgtttaaggatttaggtcgttaatattcgagtgttcggtggttaacggttcggagtggggtttcgcggcgttattaagtttagagcgggggttatcgggtcgtttcgcgttttttagatgttcgtgtgttattgagaagtcgtcgggtagtttgggtatagggattttttacgggtcggggttttcggcgtttttttttttttagttttcgggttttgtggattcggtttcgttttcgggggattgttagtttttatttcgtgcgggcggggcgttggggatttttcggaggtagatttagttgatcgagttttttttgttcgcggcgtcggttcgatcgcgggtaggcggcgtcgtcggggttggacgttcgtagcggcgtttcggaagggggtttcgcgggagtagtcgttcgcgtttttagtagtttttttttgttaggcgtcgcgcgcgttcggtattttcgggtgtttatttgtgcgtggggggttgtttttcgtttgtttagtcgcgtttattttttaggtttaaaggttagtaggaagggtttcggaggtggttgggggcgtttatttgagaagtttcgttttcgtttagatattttattcggtattcgcgtattcgcgtttttatttggatcgcggggttcggttttcgagatcgcggttcgggtttcggcgtcgggttgggggtttaggattagggttggcgtagtcgtttcgtttcgtttcgtttcggggttattagagcggttaaagtttcggaaattttttcgtttacgttttcgtggtatagagaaggaaattgaggtttcgagattgcggggtcgggttatagtcgtggtttttcgattttttttcgtcgttttcggtttttttggtttttgcgttttgtagtttttttttgcgcgtagtcgggggttgggggtttttagttagtagggatttacgggtagtttcgggtgtcgggatcgggcgttcgtttttcgggcgggagtagaggtcggttcgatggagatttttttgagaaatggcggtttttattcgttttttagttttcgagcgttcgtcgtttgcgtttagtattttagtttttaagtttttttgagtcggggttgcgttttcgttgtttttttcggtcgtcgttttttggcgttagagggatttcgcggttcgtacgggtttgttttcggtttcgttcggagggtgtgcgggttttcgtttcgttggtttcgtttgtttattacggcgcgtttaaatttacgcggttcgcggttttttgcgtgttttgtcgatttcgggtcgtaggaggggttagtttcgtcggtttttacgcggggtttgcgtcggtagcgttacgggttggaacgcgtttcgggagaaattattcgcgcggggtcgcggcgttttttgttttaattttcgtagggagtcgttaggcgggtgtttttttggttttagcgttttggtttcgtcgttttttcgtacgcgtttagtggggaggtcgcgttcgttaggtttggagtcggatcgtgtttagtcgagagcgcgcgggcgcgggagaggagttttgttttgtttagggtaggttgtttagacggggcgggaatttttagtttggtttcgcgtttttatttttagtagtcgtggagtttttttagtcgtttaaggttagggattttgtttggttttttttttagggtagtagattttagcggtttggtatttcggtatagaggagcgtgtttttttttcgtagaggaagggagtggacggcgttagaaagggaggggagtttggggcggtgtttggggttagcgggatttttgggtattgtggggttttaggagaggagattttcgggtttagtttgtaattgttgtgtaggaggcgttgggcgggatatttgtaggcgttgtatatatacgcgagggttattatgtcgcg

SEQ ID NO: 6337 - DNA, 5692 bp, Artificial Sequence
  Description of Artificial Sequence: Synthetic polynucleotide
gcgcgttttcgtagttcgtcggttacgtatcgtacgtacgcgtttttttcgcgcggggtggcggtcggcgggagttacgtggagtagtcgcggtgttttcggttacgtttggttttcgatgtcgcgaagggggttttggggtaggtttcgtttttcgaagttgtcgttgcggtttttgttagtcgggagacgacgaggggaaggggtgggtcgcgttgggtttttcgtttattcgtttttttttagttttgcgggggttaaattcgtttttaataaatttcgcgaaaaagtcgagggggggacgcgtcgttgttggagaataggttagaagtgatagtagaatgggtcgttgagattttcgttttcgtttcggtttttcgtcggtttggcgggcggcgacgtggggaggggtcgtttagaagtcggggtcgttcgggtcggggaattttttcgcgtcgacgtttattttttacgggtcgtattcgtcgaggggtcgaaaggggttttagtggaggacgcggtgggagttgggtttcgttttagttgtcgacgtcggcggtgttcgggttttcgggagcgtagtttttggtataaagtagcgtcgaagattttgtcgggtgtttcgtcgcggttgtcgttgtgttcgcgtagggtcggttcgtgaatgcgtgcgggggttttcgagggcgttttttttattttgcgcgttcgggggagttgttcggtcgtcgtcggtaggtagaggtttcgggttttatgggtgttttcgagatttcggatcgtgcgttgagaatgtcgacgttttaaacgagttagtagagcgggtcggagttttggtcgggaatcggcgtcgcgtgcgtattggtcggcgaggtttttggttcgtcggggaaggagtttagagcgtttgttttttcggtagaaattaatatatataaataattattcgtattttttatattgggggattgggagtaaggagtaaggataggggaggggataggatttaattcgttggttttttattttaaaaattatatattttatgttacgatcgtttttcgttaagattataaatatttaatttggtttggcgtaataaaattagtcggagtttttttaaacggagttatttcggtgaattaagttgtgaaatttaatttattatatttataaaggagaatgtttttattgtaaatttaggttataaagaaattatatttgggtcgtcggtttttttttcggatttattatttgaaggtttattaaattattttaaaatgttgggttattttttttatattttatggtaataaaaattaaacgtggtaatattttttttaatagtaggaaaggttaaaaataatcgttataataaggggatataatttttaaaagatatttttttttatttcgggatgtttttttcgcgtttggaagcgttttttttatttttttaattaattcgagtttttaaaatatttaaacgcgttacgattttttttaggttttttttcgttttacgaggcgtttgaggcgtagttttcggatggatcgtacgtggggtcgtagattttgggcgttcggacgttagtcggaggcgcggggatttcgtggtttcgttgcgaatttgcgttttatcgcggttcgtatatttgggtcgagtcggggtcgtttcgggagtttttcgttggtttttgggcgttttattcggtttagtaatgttcgggttagataaaggagtcgttagggaggggttaattcgttttttattttttttcgttttttttttcgttttttttttaggcggcgcggaggagagaagatgcggtttttaataatgtgtttggtttaatttgcggggtgtgggtatttgttgcgtttttttgggtgagggttgggtttttttttttttatttttttttatttttgtgtatgatattttggttggggtttggggcgttttgcgttggttagaagttagggttattagggatttttcgttttcgttttcgaagaggggatttgcgcggacggcgaggaggatcgatgcgtttttgagtttttagggaaacgaggtcgcggttgttgttacgtcgcgaggaagatttatgaggcgcgggtcgagtatggttcggttcggcggaggtcgttcgcgtatttaggttaatttttgatttttatttgattatttttttttttttgttatttttaagtcggcgttcggaaaggcgaataaagggaggaggatgggggatgggggcgttaagcggtggcgagggttcggttcggtaatttttttttttagtgggggtttttgggcgttttaggttcgcgtttaatgcggggtttaggagggcgtagtttgaaaggtgatcgggttggggttgtcggagattcgttttgcggggtggtttttttagtcgttaggtttacgataggatttttagggaggggtttttgtaaatgtttttgggcgaagagaggacggaaagaatatttttttttaaattgtaattaagggtgtgcggggcgggggtgtttggggggtgttgcggtaggtcgggttcgtttaatcggaggtagtagtttagttttgggtcgataaggtcgagggaaacgggatttttttgtttttcgtacggaaaagatttatttaagcgggtaagagggaagcgaagtttgtattttttatgttgaaaaaaaaatttaaaatggaaaattattttattggttattatttataagtaaattaaaaatagggataattagagtgtggggatttggagggattataaatttgcggcgttttttttattggaattaggagtttttatggtttgttgttttattttgagagaaatgagatttttggttttggtgtaggcgggtgtgcgtttcgagcgtttttcggcgggggggaggggggagtaggaggggcgaggagatttgcgtagttagggagtcgcgaatttcgagtttcggttttcgaaggcggtaggagaaatcgcgcgttgtgtttcgatttttttcgttttggttaatcgcgatttgggacgagttggaggagtttttttcgggtttcggacgttcgcgtcgaaaatcgggttatgggtattaaattcgattttaggcggttatttattttgtttttatttaaattttgatgagttatttgggagtgcgcggggattgggaagtgagggatttttataatatttttttttcgatttcggttttcgagtttattatttattttgtttttttcgttttcgttttttgttttaaattggggaggggggaggggggagagaaaaggatataaaattatcgttttttcgttaaatttttaaatttttaatttttcgtaaaatggtttggaatttattttattttataggggttttattttttatcgggtggaggttagttttttaattttttatataagtaggatttttttttatttttgaaagtttttaaatttagttattttaaatgtaaatatcgtgtgaaattttattaattaggtaagaaagtagggagagttttgatttagttgtttttaattttgggaggagaaagagaaagtgagttttttttttattaagtattttaaaataatagcgttttttttttttagttcgttttaatcgtagttttgtttttgttgaaagatttttgttttttttaggaaggggggcggggaggataggtttatatttcgaagagttttgtttttaaaattgttcgaagatttttttgtttgacgtgtatatgggggaggggaaggagttcgtttaggttattcggttttttcggatttcgtttaggttattcggttttttcggatttcgtttaggttattcggttttttcggatttcgtttaggttattcggttttttcggatttcgtagaatatttttaaagtttatgggcgttttttaatcgtgtaagttcggggtttcgggggttaggaggggttgttttaagataagggaagttgttcgttagattggggttaatatcgggtttttttaatttaagtttttttcgaaaataatttttttaaaattgagtatttttattagaaaaaattcgtattttttaggaggacggggtgggagagtttcggggaataaagttcggtttttttagttttgaggtcgaggtagggcgtatttttttttgggcgaatttaatcggagttgtagaagagataagtatttttaaattggtattcgtttcgagtttaaggtgagggtggagaagggtttttggtggaagttgtaggaatattttgggtcggggtttatttcgcgttcggcggtttttcgaatttcgtagaaagatacgtttgtagcgaaaggtttttatatattagtcgggattttattcgttttttatcgagagtgcgttttgggagcgcgggaaataaggaaaacgtacgtatttggcggcgtttcgagggcggtttcgcgggtttttcgttggcgaaggtttttagaagttatttttcgttcggttgttcgttttacggttagttttttttttttcggcgacgtatttcgtcgagttagtttataggaagcgttaggagtcggagatttggttcgttttttcgggcgttgcgttcgttttcgatcgttagggttcgcgtttttttttcggttacggtttattagagggatttcgcggcgggttttggttcgggcgcgtttttttgcgttcgagtttttaggttttcggtcgagttgcggagacggacgcggagttttcggggaagacgaggcggcggcggtcgtcgttcgggtaggagtttcggggcgggaggggtgtagggcggaggagcgggcgggattttagcgtttcgcgtttcgcggtcgtcgtttttcggggcgtttagttttatttacgtggaatcgtttcgttttcgtcgtttcgtttttacgagggaaggtattcgagtttcgtcgtatattcgcgtttttcggtttcgggttcgaaatatcgcgttttttttttagcgtcgtgtttttcgtttttttagcgcgcggttttcgttcgattcgcgcgttcgttcgattcgtttttaatttcgtttaattatcgtttttcgcggttgttttttttgtttgagttttcggcgtaggttaatggaattacgcggaggcgcgggcggtttggttaatggaaggtttagggggcgtggttggcgggaggggttgcgggcggtcgggttttatgcgttgagattcgagattgcgtcgtcggcgggtgcgtttaggtcgtttagttagagtcggtaggatttcgtcgtcgggttgtgggtttttgatttttttttcgttgtcgggagaagcgtttgagtggggagggaggtgggaggaggtggtttcgcgtcgggggtgcggggagcgggacggcggtttggatggatacggttagtttcgggtcggagagggttcggtttagagtagtttgggttttgtttagagttttattgtgtacgttttcgcgaggatttgcggagagacgtgtaggcgacgtaggtttcgggaaggaaggagggtatttgggttcggacgagcgataacgttgtgttttgtgatttcgtataaacggattttggagtttagggaaagcgttttaggtttttagttcgggtagggttcgtgggattggcgttcg

SEQ ID NO: 6338 - DNA, 7937 bp, Artificial Sequence
  Description of Artificial Sequence: Synthetic polynucleotide
gcgtcgtttgcgaggggcgttttgcgtggattcggggtttcggggcgcgtttatttattcgagttaggagagattgggttttacggtgttagtttcgcgttcgggttcgcgcgtcgtttttagttcgcgttttttttattttcggagggtttcgcgggttttcggcgacgggtttttgtttagggttcgggaattttttttttttttttttttttaagcgttattttttcggagtcgggtcggtcgttttcggtgtacgcgggaagcgggtagttttcgtttgtattcgcggggtcgggattcggaggtattcgttttttcgatatattcgttggggtcgttgttcgttgttttagtttttcgaggttacggtaagagttcgggggtcggcgttatatatttttagtcggcgatcgcgtttagggatttaatttaatcgtttttagtttaatgaatagtcgcgcgttaatcggattttcgcgcgtttcggggatttacgtttttcggttttttttttcgtgtttcgcggttcgttagacgtcgttttcgaaggcgtcggtttggggtttggttaggggttcggtcgcggggggtttcggtcgtcggagtcgggagacgtcggagacgggagtcgggttcgcgcgatcgttattttcgagttagtcggggtgggtttcgcgttttgttttgcgttttcggttcggttcgcggagcgtcggtgtttatttgcgagtttcgggtttttcggagttttttttcgggtcgagtcgttcgaagcgggcgtcggcgtaggtttcgatttaggtaggcgggaaatttcggagttttcgttcgcggttcgtagttttttattttaggtcggcgtggtttgcgggggggaaggtcggtcggggtcggtcgttcgttttttttttttttttagatttttttgattcgcgggtttttcgtcgtatttcggttttcgggttgtttcggtcggttcgcggggattttggaaacggtttttagtttatttttttttattaagcggttttgggtcgttttgaaatcgcggagttagtaattgttttttttaggaggtttagtgcggattggataatagttaattagcgttttgtttatattcggtgatggatagtttattggcggagtgttaattaattttagcggtttcgcgggagcgggagtgggggcggggaaatagagagataataggttttgagtttaattttttcgtgtttttgtcggaatgagacggtggagaatttcgaatgcgtgtgaatttgttagttggtttttagtttaaatattttttttttttttagagggggaggtagagatttatatggagaaagaggagtaaaaataaatgtatttatcgttattaagatattatttcgattttttgagaataaatagtatttgggtgggaaattaaattttaatagaaatatttgtttgcggaatattttagaagtggtttgtatttgattacgataaaaattgtttagtggtttgttttagttggagtgaggatttagtagataggtagatagggagtagtattgagaaatattatatatggtttattatattatattcgttttttttattattaaattgaaaatattttttaaatttaggtgtagatgaagaaagggtaatttttgtttttttaataaatttttgatttttattttagtagttgttttgttgtaaagtgtggtagagggagataaaattgagagttagtaatgtagacggttggagatttagaatttattttttagggtttgatttttaggttatggggaggagagagtcggacgggttatttaaagtttttgttgtttaagtagcgggcgtgcgtgcgtgtattcgcgagttcgggttcgggtaggtagtagttttagagcggtagatgggttaggtaatttggggaggtttttgggtttggaggtttggtttatttgttatttgttagatagattttagggagaaaaagtagttatttttaaggggtggtggtgtttttttttttggttttttgtgcggtagaagttaaacgttagatttgttggattaaatatatatgtgtgtgtgtgtgtttgtgtttgtgtttacgttttttttttcgtcgggatacgcgtattcgttcgttttagttttttttttcgttttgcgttattatatttttatttagtagtaatgatttgcgtagaggagttgcgtagtcgtcgggtttgaattaggcgttatcgggtttggtagtagtttcgttgttttttgattggtagttttttggttcggcgttagtttattgggaggtttgtttacgtcgaatgagtggtacgagttttcggtcgtggagggttgcgcggttaattagcgcgttggttgtttcgggttgagtggtacgagtttattagtatgtagggttcgtggttcgtcgcgttaggttgtaggtttgagagtcgttttggatgggttcgttagagtcgttgttgtggaagcggtgtatttatagtgtaatagttagtatattgaaaatattaataggaatataaaataaagttatatttattgatttaattgtattgtatttagttgtatttaggaaatagtttttagtaagtaattgaaattgtttttattttttttttgtttttgtatttttattattattttattttttattttggttttggggttttatattttttttagtaaaagaaatttaggattgtgatgttaagaagtatatatttttttttttaataaaattcgttaaaatgttgaggttttttttttttttaaaaaatatggattatgagcgatttttttttttttgaaaaattttatcgatcggtttaaaattattttcgtaatgtatttttgttttgttttgagcgtttgttgtttcgatcgatatttagtattaaaaataaatattcgaagataggatagggatcgttaggttgcgtttggcgcgagtcgcgcgggtggtatcgggcggatagtaggcgaagttcgggcgtcgttagcgtgcgtttagttttgggtgatttacgaacgaattttaatattcgtttttttattttgttttttttttcggaatagttttgggttggttttgttcggtcggttcgcggcgaggggaattggtcgggtcgtggtatttacggtcgttgttttgaggggtttttcgggtcgaagttaggggtcggggaggggaatggttatggcgagtttttcgggttttcgtttttaatttagaatttttttttttcggagaagtgggggtggaggagggggatcgagtaaggtcggcgtagcggggcgtttttatcgcgcgcgttcgggacggcgcgcggggttcgggttacggttcgtgtggcggggttcgcgggttggtttttttcgggcgcgggggttaggcgcgattttagtttttatgatttttttagggagcgggtgcggttgtttcgtagggagcgggttttgcggcgacggtcgagttattcgcgttttaaggcgcgtttggttttagttcggtttgtaggttttatcgcgttcgcgttttcggagacgacgtcggagggaggtagacgggttagagttttggttttcggtaggcgggcgaggagagagcgggtttttagatgtaaaagtaggaaataaagtaaatttgtagaagttttagattttggagcgcgttagttacgtttggggtcgcggtaagagggatcggcggttttagggttacgttttgttttttcgggagggagttttgtgtttttaggtttagtttttttcgaaatgttttcgttagcgatttttcgttcgttcggggttttttgttcgtcgttatttttcgttttatttttttttttattttagttcgatttggcgttgcggcgtcgttttcgcggtttttcggcgcggttttttttggagttgggttgggagtgggtttcgggtttcggtattcggcgggtggcggcgtcgtcgttgcgggattgtgggatttttagttcgggtcgtgtggtcgttttttttcgttttattttttggtcgttttaggttttttaggttttcgaagttcggcgcgggtagacgcggaggcgcggcgcggttttttttcgggaggagagaatataaagaaaagttttttttaattcggttagagtcgtggcggcgtaggtaggcgatagtaatttattttttgtttgtttaaaaagtcgagtaggttggtgagaaaggaataatcgggtttgcgattcgttcgtagggggtgggagattaaaattgttgtttcgtagtcgagttcgcgtttcgagaatcgtcggtagttcgcgtttttttaattttgaaattttttattggagagaaaaaaaaaaaaaaaaataattataaaataaaagtatagtatatacgattttttggaggtcgttaggaagtttggtattttcgcgtgcgtagttttcggttttttttcggttttcggcgtttttgaagttgtaggtttttgatttttttttttttttttttttttttttgtttcgttcggcgtttttcggggttcgggaggcgtcggtcggggttgggggtttttacgtttttagtttagttcgggtagttttttttttgatttttgcgttcgtagttttttcgttagagtatttttcgggttttggcggtcgggcgttcgttttgtaggtcgggatcggggtttgggagtcgagttatttgttagattcggggagagagttggcgatttttagagggaagggagttttaaacgtttttgtatgtagttgttagataaagagaattttttgtgtagatttatttatttataatgtaaaagtttttcgaataaatattaaaaaagtttattagttgagtaaatatgtatttatttaatatattatgttttcggttatagattaaattaaatataaaatagtttgtaaataagacgttttagaattcggattataaaatatcgtaatttaaaaaggtatttagtagatggaaaatattttaatcgttttgttgttatggtggaatggttataaaaatataaggtttttcgtaaagtttttaattaggaatattaagtttatttattttttttttgttggaggtgataaatattaaaataatacgtatttagaagatgaggagtaatatgtgaagtgcgtttagggagcgttttcggagggacgtttgggagtacggtggtgtacgtagtttttattattggtttcgatttttcgtatttagagtttaaaattgtttttaatttcgtttgagtggatgtttcgcgttgggtgggggtggaagaaaatggaggtgagggttattttaggtggtcgaggttcgggtagggtttgttggtagaaggttgtgttgggtcgggtttatttttttcggttagagggtcgagttgggcgtcgtagatttcgcgtatttaggtcgttcggtattgttcggagcggagatcggtttttgttcgcggttttcggtaggcgttgaaggaagaaattttagggtcgatttgggtcgttgagagagagtattttgattttgaaagtattttttttatatatatttttaagtttttaattcgtagaggaagattttgggcgaatttgattggggggcggggtgattgttatagttttaataggaagttttcggtttcgggatagtaggtcgggtattgcggcgtggcggtttaggtgatgtcggtggcggttgcgggttttcggggttttgaggagtcggtttggggttttagcgcgatgttggggataggagttggtttcgttggggttggggaggggggattacggtggatttagaagaatgggtcgaaagatgtatgagggggatgggagtggggagaaaaggaaggttattaaaaaaaaaaaaaatttttgagttataattaataaaattattcgtttaattagtatggttattcggttaagcggaatgtagtaaaagttggatttcggtatgaggtggggagagggggagagttagtgtggattttaggttttttttttcgagatatttttgggtagcgggggaggggagagggtgtgcgtgtgagtgtgtgtgtgtgtgtgtgtgtgtgcgagtgtgcgtgatggtttcgtagatttgggtttttattatttagtagagttagtagttttttcgtcgcggcgttttagttgtagggattcgcggggacgagaacgggaggcggcgagtagtgcggttgggttttttcggttgtttcgggttaagcgtggtcgggacggtgcgtgcgcgcgcggggtttcgggtgttgggttgcgcgcgcgtgcggcggggagatatcgagcgtttcggtttcgttattcggtttggtcgtcgttcgttcgggtcggcgggggtggggggtggggggagtgggtgagcgggcggggcggggattttcgggcgagtcgagttttttagttattcgtgttttttttgtttttgtttttatagattatggattcgtatagcggtcgttggttcggtgcgcggtcgttcgtcgagaagtttagttttttcgcgtgttgatcggtttcgtcgttattatcgtttgtgatttcggacgtcgtcgtttttgcgtcgttcgcgcgtcgagtcgttttcgggtttcggtcgcgttgtttcgaggaagcggcggcggatcggggtcggggttcggtatggatggtcgcgattttgcgtcgtcgtcgtatttgttgtcggagcgcgggagtttgggttatcgtagcgtcgttgtcgtcgcgcgtttcgtttcggttgggttcgtcgcgtagtttttcgtatatttttagtcgggaaagtatttttcgtcgtcgttgtttatggtttcgtatataggttagtgttcggtcggggcgggcgcgggacgggagcgttcgagagcggaatagggcgtttattttttcgttttcgggagtagagaagttttggttttatttttcggtttcggtcgcggtggttgtttgggcgttgagcggggtcgcgcgtttcgttagttttttaagttgcgtcgtcgcggtttagagaggtttttttttggttattttttttcgggggtttcggaggggtagtttcggagtcggttgaaattaaagttttttcgcgtttcgttattttttttcgtttttttttgtagatttaaattttacggaaattttttttttgtattttgtatttatttttttaagacgtttcggggttgggataacgaggcgttttttgcggaaataaaacggttgttgtggcggggggaggggattagggtacgtcgcggtttcgcggattagagtggtgtgtgcgtcgggcgagcgttaatagggattgttggtgtaagacgagtaaattttgtttttatataaagttttaaagtgttagggcgagaatgggtttgtagggatgtatttgttttaacgagtgtttttggtatttcgttaaagtcggataaagcgtggttagagtgcggtttagttttttagtttgcggttcggggaggagggtagcgcgggcgcgggttgggggtggcgcggggcggcgtttaggatttcggtgtaggcgagagtgcggcggatttgttttaagaggagagcgaggcggatttgttttaagaggagagcgtggggcgtcgtgttgggtttcgtagggacggattttttcgggcggttttttttgattttttgttcgagaggattagtttttggtagagcgggtttaggtttttagggtagtttttttttcggtggttttgatatgagtgtcgagggaggttagggtaggggtagttattacgtttgaagttttagaggttattaggcggcgcgggtagattcgggggaagcgcgtagggttgcgttagggattcgtcg

SEQ ID NO: 6339 - DNA, 1408 bp, Artificial Sequence
  Description of Artificial Sequence: Synthetic polynucleotide
tcgaggtttttcgacgtggatatttaacgtttttggaaagggagtgaattggtaggatattatcgtttcggttagtttcgcgggagttgttttttagaaaaaaaattttttagagttaaaagttattttttaagcgttttggggtttttcgggcgtttttttcggacggtaattttagaagttaaagcgattgtatcgttaggtttgtggcggttggaagcggggtgatcgcggttagatggtatttcgtatttacgtagggttgtgttattttagtatagaattagtaatttttatacgaagttttgtgtaaatattacgcgggtttatttttgaacgattttttgatgttttcgttgcggttatttattttatatataaattaggatttcgttgataaattttcgtgtttttattaaatagaaggttgttttgtagtttttttcgtgtttttttttaaagtacgataatatttgatatttttataaatcggtttgtagaggatatcgcgtagggggcgattaattagttgaggtgtgttattttaaaatattagtgggtatattttaaggcgggtacgtggaagggacgcggaatcgagggtaattattttttagtcggtgaatttgatggagaaagatgttaaatgtatttttcgagttagttgaatttttcgggtatttaattattgttagatgtggcgagggcgtacggagaatatttttagtttcggagaaaatattcggtcgttagcgcggggatcgttcgggtcgggaaacggttagaggcgggaggagagaggattgggcgagcgtggggagcgttgcggcgtggaaaagcgatcgggagggatggcgatgtttttatttttttcggtaggtttttttaattaaaaagttggaaacgggaattcgtaaataacgatttagggttttaaattatttgtaaagacgcgatggggaggggaatatttgcgcgttttaaaattttaatttcgaggtttttagtcgcgtttgattcgggagtcgggtgcgtttttagtgttcgcgtacgaattcggcgttttggtagtttcgatttttcgggttcgtagtttaagggaaggttcgcgcgggaggtattttcgtggtttttcgcgcgtttcgaagttcgtttttttcgtttagagtttcgcggagttgtcgtcgttttattttttatggtgatcgtggggacgtatcgtcggtcggggagtttcgcgcgagcgtcgcgtagtcgaggaagtcgtttcgagcggttgtttatcgtacgtttatggtagtcgcgtcgcgcgtcggtcgtttgcgttttcgttttttttcgtcgtcgtcggttcgcgtttttcgcgttttcggtttcgcgttttgttgtttcggggttgtcgcgcgcg

SEQ ID NO: 6340 - DNA, 208 bp, Artificial Sequence
  Description of Artificial Sequence: Synthetic polynucleotide
gcgggcgtgggggggaaggggaagaagttcggcgagattagaggggaaattcgaaaaagtaagtttttgcggtagtagttaggaaatattcgttaggaattggttgcgattttaattttagcggttcgaagttttagtttttttatttttatcgcggtagagtcgttttcgtagatatttttcgaggagaatcgcggtttcgagggcg

SEQ ID NO: 6341 - DNA, 805 bp, Artificial Sequence
  Description of Artificial Sequence: Synthetic polynucleotide
tcgttttttgtttttcgtattttttcgggggaggggtcggttcgcgttcgtttttagttcgaggggtaatttaaaatatggcgtttcgggcgggggatttgtgtaaattggcggagaagggacgcggggatcgagtcgttttttcggttagggattttagggaggtttttaggtcggaggtcggggtttaggttttgcgcgtcggtttagttattattgcgtcgtggcgggcggagcgggcggggggcgcggcgcgtaggttcggttcggtgggggtttcggcgagcgggagggcggttggggatttcggtcgcgtcgggcgcggggttcgggattcgggagatcgcgcggcgtcgaagttacgcgttagttttattgtttcgcgcgtttcgttttaggtttcgggtttttttttcgtatttcgtaaagtcgagattttttcgtagttttttatttcgagaggcggaaaagttatttgggattagtagggagttcgggcgcgtcgcggcgtggggattaggttcgggcgcgcgttttcggcggcggtgcgtaggagattcgggcgtggggaggaagtcgtagtttagggttgttcgtcgttgtttttttcgttttttgttgtaggagatatcgaggtttcgcggagttgcggcgggggtttacgtttagagatcgtgcgaggaaagttaatttcgttttgtttgtttttttagtcgcgggggagggggttatcgtagtattttaggatagttatatgggtatagtttttttcgttttggcgtagggttaggtttcgcggacgacg

SEQ ID NO: 6342 - DNA, 2462 bp, Artificial Sequence
  Description of Artificial Sequence: Synthetic polynucleotide
tcgcggtttagttttaatttatcgtattttagagggaattacgagggagttgcggattggcgggggcgggggtttgtaattaatattaggtgtttgtgagagagttttaagggcgggggtagtattttttggttgggttgggttcgtttggtttcgtttcgttttcgggatttttggcgtttagcgtcgttttttcgttattgcgttattcgttagagttcggcgttttttttttttttgttttgtggacgtcgtttttcgttttcgggaggatttcgtttttagtattttaggtttttttggcgtaaaggtcgttagttcgagcgagtttaggcggcggttttatttttgtagagggaaagcgaaagacgcggtcggcgggtcgagggggcggtcgaacgcgtcgcgtggttgttgttttcgaattcgtagcggcggcgttagggcggttatcgagttttgcggatttcggtttaatttttagcgttattcgggtgtttcgagttcgtcgtagttttcggcgcgttttttagtcgcggtacgtagtttttgacgcgttcggggcgttttttcgtagtattagttaggttattttatttttcgcgtcgcgttttttcgttagtcgtcggttaggagtttttcggtttttgagtaggacgcgttaaagggagttgggaggtttagtagtttttagcgtcgttttttcgggtgacgtgacgttttttttggagcgcgggttcgttttcgttaagtttttatcgtaggtttttatagtcgagttacgggaagatgtaacgtcgggcgaggggcgtttttcggattttgaaaaatagttttattcgtttcgggaacgtttcgattttttattcgtattttttggttagatgattttaattttgggatttcgcgttggtcgtgggggtatcgggagttggagttggaggagaggagtcggtagcgcggagttgtcggggtgtagttgcgcgtagttggcggcgaggggaggcggtttttgcggtttcgtcgggttgggggaattggtttttgcgtttttgtttttcggaggatcgtattcgtttatttttatatattatatatatatatatatatatatatatatatatattgtcgttagcgttttttacgttataagtcggaatgcggaggttagagttattgtttatttgaaagtaggaaagtaggggttgaaacgttgagatggaggcggaggttttggttttatttgcgaggttcgtattttttcggaaggtttttttttttttcgcgtttttttagggcgagtaaggtttagtttttgagatttcgttttttgggttagcggttcgagttgtaggggggcggggacggattcggagggagtattagagagagagttcgcgtttatttttgtttttttcgtaaagaattggttagttttattcgcgtttagtttataattaggttgtcgggatcggggagttagattttaggtcgttttaatttcggcgagggcggggaggggagtgatagtagtaattagcgcgcgttggtaaaagtatagagtttcggaataggttaaacggtcggcgcggaggggtggaggtaagagggggcggaggaggagttgttcgagcggagagggatgacgttttttagggttttgggtttcgaggaatcgaagattggtgcgttcgtcgggtttcgcgtattagttttggggttcgtagaggcgtcgcgttcggttttcgcggtagttttaatatagcgcgtaggcggtcgatttcggttagtttaaatcgggcgtaagttttttgttttttttaaagtatttttttgttcgtttttagtttttaggtgttcgtttgagagtttttgtcgttttcgggcggattcggttaggtagttttcggtcgggttagtttcgtttttttttcgtttttttttttatcgatttcgagttaagggtaggcggttcgtattcgcgtttttgtttacggggttaggcggcgttttcggtttacgttcggttgttaagaagagaaaggcgtttatttgagttatcgaagtttttttttggggtttttttcggagtttgttcgtagttcgtaggtataattttttttggagaaaaaaagtagcgtaagggtagagagaggtagggttgtttataggttttttcgtaggggttttttttttcgaatttttcggggtttagtttcgggttcggcggcgggaaagagtttttggaggttggaaggggtcgttagattcgggtttttttcgtagttgcggtggcggtatttttaagttgttatttgtagcgcgtttcgggcgtttgtgatagttcgcgtcgtttagttttcgcgggttcgtttttttcgttcgttcgttggttgcgttcggtgttcgggcggttttcgcgttttgtttcgttttgagttcgttttttagtcgcgcgttcg

SEQ ID NO: 6343 - DNA, 990 bp, Artificial Sequence
  Description of Artificial Sequence: Synthetic polynucleotide
acgtggtgtgtgtgtgcgcgcgcgagtgtgtgagcgttaggggtcgttcgttcgtcgcggtttttcgtgggttggtcgggttaatgagcgcgcggttgtaggggcggcgggcggggagggggcgtcgagttttgcggatggaggcgcgggtagcgcggcgcgtttatttcgcgcgggcgttgttggcggggggcggcgtagttattggattcggatcggggtcgcgattcggggtggcgggtggcgtgggcggcgttcggggttgggatgcgtcgggggtttagtggcggcggcggcgttggcggtggcgtcggcggttgtagggggacgagttagcgtcgcggcgttgggagttagttgagttcggtcggcgagcggaggcggtagcgtaggtagagcggcggcggtagcgggagttcgagcgttgcgcgtttattatggtcgtttagggagagttcggttatttggcggcgtagtcggatttcggttttaatagcgagcgtagtatcgattttttagtgttcggtttcgaggacgatttggtcgtcggggcgattttgtatagttcggagtggagcgaggagcgttttcgcgtggataggaagaaatttgaggttatgttataaggtaggtatttttcgtgttttcggatttttcgattgagtttttaattttttttcggatatttttatcgcgcgtttcggcgttcgttattttagtttacggtcggtcggtttagttttaggttcgttttttcgcggagtcggaggatatttagggattggagatttcgcgggattttttatttttttacgttttttagatttttaggcgttgggggttttgtgcgaatttgattggttttagaaaagtcgaaggtcgagtttgtattggcgcgtttaagttgcgttttggattttggagatgttaattttagttcggatatttgggttgtgttattcggattattcgggtcgtatagagtatgcg

SEQ ID NO: 6344 - DNA, 2274 bp, Artificial Sequence
  Description of Artificial Sequence: Synthetic polynucleotide
tcgtttttcgtgtattgtttgcggttcgtttcgggtttatacgggatatcgaggtatgatgaggacgtagaatagtagaagcgcgttttgtttttcgggcgttagtgttcggggttagcggcgtgtattcggcgggttcggtcgggagcgggttggcgatcgcggggttcggcgttttcggttttcgcgttatttttcggcgttcgttaatttcgtttcgttcgcggcgtagagaagttcgtagtttttcggagttttagcgattttttggttcgtttttttcgtagtcgtcgagtagcgtaggttcggcgatttcgggtgtagttggttttgtgcggtgatatcgtcgttcggcgttaggttcgaagtcgtttggtcgcgttcgcggggtcgtaggtcgttggtttcgttcggtcgcgtttataaattattcgcggttcgtgattcgggataaatttttggcggcggcgtagttttttttatagttattttttttagagttagttattaaaatagaagacgcggtcggggcgaggaggtgggcggggggagttcggtggtcgttttttttcgcgcggttgacgttcgtttcggcggcggtagtggttgtggtcgcggggtcgtttttagtcgagttttcggaggcgttcgggcgcgggtcggcggggtacgggcgtttacgttttttagcgggtcgcggcggcgtcgggcggtcgtgacgtgagcgttttttttagtcggtttgcggggtatcgttagttagtcggggagtaagagtttcgcgcgtagtcggcgcgggttcggttatcggcgcgtcgtcgttcggggttgggtttggggttgtttgtggagaggcggcgggcggaacgcgcgcggttacggttacggttatcgttacggttacggttggtagttcgggtttcgggtttcgggtaggggaaggggagaggcggcgagtttagtaatcggaatcgagggaagattttggtttcgcgggttcgtttttcgttttttttgttagcggcgttagacgtcgagtggggttagggataggggaggaggatttaggattttgtgttcgcgtttttggagtcgttggagttcggatttttgtaattgttggtattttgggggtttggtttagcgttttgttgtttattcgttttttttcgttgtttcggaattaaagttttcggtttttttcgttttcgcgcgtttatttatcgtcgtcggggagcggttcggttcgtatttagtattatgaggggatttgggatttgtttggcgattttggtcggatttttgttaattgcggcgggcgagacgtttttaggtaagcgggatcgtttttgtcgttttcgaggcgcgcgggtcggcgcgggacgttcgggacgtcgatagttttttggtggtagagttttaaggttggcgtcggggtcgggcggggggcgcggcgggtcggatatcgtttttgtttgtgagtcgggcgttgggcgaggggtcgtggggttggtaggtatttagttttcgggcgggcggagcggacggatttcgagggcgagttttttagtcgggattgttagttcggtcgtcgttttttcgcggtttgggttagtgtttaaggttgggcggtttgtatttttgagtttttggtcggttgtaaaaggaatagtagaaaattttgtttgaagtttttagttgtagtcgtcgggtcgtttggcgtaggcgttgcgcggttttcgtcgatttcgagtagcggtcgggtttaggtcgttggtgttcggttgcgttcgtagcgatcgtcgggaattggcggtcgtttcggcggcggcgatttttcggtgttttgttttttttgtcgttttttgttcggcgcggttggcgatttcgggaggttttcgcggtcgtgtagcgtttgcggagaggttggggggagtttttcgtcggttttagcggtagggtttggcggtcgcggagggaagcgggtaggtttttaggttttggttacggttttgcgtttcgttgggttttttttttttattttcgtttttttagcggagcgtcgcggttagttgtaatttgtttatttagttcggttgttcgggggttttaggtgggaaggagaggtattggcggtgtgcgagtaagcgtgtgagtgtgtgcgcgtgtgtgtttgtacgcgcgcgcgggggcgttttaagtttagaggaattttttacggagaggatttgtggatcggagtcgggggttcggcgtgggggcgaattcggtacg

SEQ ID NO: 6345 - DNA, 882 bp, Artificial Sequence
  Description of Artificial Sequence: Synthetic polynucleotide
gcgaagtgattttttacgtttggataaagcgttcgaaagtttaggttcgcgggttagttttagtcgttgggtttgataggggttagggaggcgggtcggttttatagttaagttatagttttagggtttggtcgtatttgagtagcgcggtttcgggttgttgttggcgttgtaggtttcgcgtttgattttttagtttgcgtagcgggtattcggtcgggaagaatttttttagtaggcggtttagtattacgtttacgcgttcgcgttcgcgttcgcgttcgtggtcgcgcgggttttagttttacgtagcgtttatagatcgtgagttcgtagggtagtgttatcggtttgtgtagtagtttcgggtagttaagtaggtcgcggggcgcgtcgggcgttagggtcggttttttttagttttgagttcgtcgttcggttttttcgttaatagtggtcgttcgcgtaggtcgggatatattaggtcgttcgttagtttttttagttttttcggtcgtagcgtttttagtttttcggttatacggaacgcgtttagggttatcgggaggcggtcggcgcgggttagagcgttttttagttttaggtatcggtcgcggtcgggttgcgttagtcgggttagtatggagcggaagagttcgattgttttttggtattcgttcgcgcggaaggtttcgtcgtttttttttaagcgttgggcgattggtttttcgtagtagtagttcgttattggggcggcggcgggatcggtttagtgttgattttcgcggggttgagatcgtgcgggtttggagcgaaggcgcggagtaggggcgatgagttgttgttgggaattggtcggcgggagcgcggttatagttttcg

SEQ ID NO: 6346 - DNA, 4359 bp, Artificial Sequence
  Description of Artificial Sequence: Synthetic polynucleotide
tcgtgttttacggaaattattattatcgtatttataggtttcgaggggcggatataaagttttttgggggaagtggggtcgtagatttttttcgattcgaatatagattcgtatagggcgcgtttgggcgtagtttcggattttacgtcgggttcgatttggttgtttttggggaggatgtaagtgttttttagcgagggcggttgggggcggtggtggtgggagggatgggtgggggggtggtgggagtggtgtcgtgtcgtttcgtttagagtttcggcgtagtagttttgcggggcgggcgagtttagtttggtgttaatgttcgcgatgttgttgagcgtggcgatggagacggcgtcgatgtagtggttggtgtaggttttggagagtttggtcgttttggagagtatttgtattcgagtgtttagtaagtttttgtcgatggttttgttttcgtattaggttatatcgttttcgttgtagtggtttcggggtcgttggaagaacgttttgtagagagggttgcgtttcgataggtatttgacgaagttggcgtaggggtagaattcggtgttcgttttatatatgcggggtaagtttttttcgtcgttgttttcggcgcgttttttgttttacgacgacgagcgcgatttgtggtagggttcgagggatttgaagtagacgaatttgcgatcgttttcgtttatggttagtttaaaagagtttttttttaatttacgttggttttcgcggtcgcgggtatagaagtatatgtacgtttcgaattagattttgttgagtagttcgaagggcgtgttggtgttgaagacgttggaggtgtatagtttgcgtaggtcggcgcgcgtgatggtttgtttttgtattatcggttcggcgttttgtttttcgagtttgcggatgatcgcggttagcgttaggttggcgttgcgtagttcggggtttttggtgaggtcgagcgtgcggtagtacgggggtttattgaggtagcggttgagggagttgcggatgttgatgagcgacgatttgttgtagagttggtcgtttttggagcgggtttcggtatagaaggagcgtagtacgcggtatagcgtttttttgtttatggtttcgaagttcgggttttgcgttttttcgtttaggtattttcggaagatgcgtacggcgtagcgggtggttagtcgggtgttttcgtttagtcgggttcgttcggggcgttgtagtacgtcggggtttagttcggagtcgttttcgggcggtttatcgcgggttcggggcgttagtagtcgcggcggcgtttcgggttttagcgcggcgttttggtttatattgattatatggatcggttcgggttttagttttttttcggtcgagttttcgggttttaggggttcgttttagtttagttttattttttttttttttttttttttttcgtttttttttagttttttattttcgttttttttttttttttcgtttttcgttatttgtattttttggatttcgtttttttttttttttttttttttttttttgttcgcgttgtagtagtgcggacggttgtggcggcggtcgcggtttttcgcgtcgcgttcgttttcgtttcgttttttattgttttcggcggcggcggcggtagcgttggcgttgtcgttcgcgttggtgttatagttttcgttgttaggtattttcgttatattgtcgtttttttgttagttttcgggtagggcgtatgcgttatattggatcgtagcgttgagagtttttgtgtttaatgatttttagttatcgggaggtaaagtcgggtttttaaaggagtcgcgttttaattgttattttcgagcgtagtttcggaggggtagcggcgcgtaggggatggaggggaggggggagggggggataagttagatcggagagatagggtaaaggacggaggttgattagatttttttttttttttattcggtttttatttttaagaaaattttgaaggaaaaaaaaaaggaaagggagggagagttgtcggtgggggcgaaatatttttaatttattttttggcggagaattgcgcgggttcgggcgggagagagggagggtcggcgagagggcgggacggtttcgtttttttaagtaatgttcgaggagtagtgttttttttattgtttttttattgtttttcggagtcggggggtcggggcggcggttgcgtcgggcgggtcgcgggtgttgtcgcgggaaattcgtgtttggggtcgttcggagcggagcggagtaggtaggttaatgagtagggtggaggaggtacggcgaggtttcgtattttttcggcgttcgcggttagggcgtagcgggcgaggtttgggagcgggatggggttggcggcggcggcggtttttttatttatttgttggcggcgaggcgcgggggtttggggttagtcgcgcggtttttaatttttttttcgatttttgtaaaggagcgaaatacgttttacgttagttatatttttttcgatttttttaatagttatatttaagttgttattaaagatttggggcgtttttcgtaggtttggggtaagttcgcgtcggtttagttagtttcgggaaggagcgaggtagagaagattgggaggggtcggtgggaggggagacgagggaagaggcgtttgggattttaggggttatagggatttttttttattcgtttagggcgtcgttttttttgtttttgagtaaagtgatataattttttcgggcgaggcgttttattaagttggagttgaagtttttttaaggtttatcgggtaggcggaaaaagcgaatttgtgtttcggtcgattttgtcgtagttataattcggtaattcggattcggagcgtatttttatttaaagtttgttaatcgttattcgttcgtttttcgggttgcgttgttttaggcgcgcgggggcgggtatttcggaaattggaaaagtagttaaagagttcgtcgggtttcgtttttttataggagatattgttttatttttagttaaacgttcgttttcggcgcgtttaggtttcgggcgcgtttttgcgtcgtcgtttttcgttttttcggtttaggggtagttttttagagtcgtcggggatttcggttgtttttttaggaggtatagtttaggttattttcggagttcgtgttgtattttaatttttattttttttcgtagttcgtgtgtattttggcgcgcgggttagttgcgagtttttggggtgaggggatacgagggagttaggtttttagtagtgcgtttcggtgttaggtcgttttgttgggaggtagtttcgtttgtttttcgggtgcgttttcgaatttatttttaagttcgaattttcggtagttaggttgtgagagttatgttaattgtttgttttttttttttttggtttttttgttttgtttttaagggaagtattttacgtattaattgaaatttatttattaatttgtattttttttttttaagaaagaatgaaagattaggttttagggtagtgtgggtttttgagtgggagttgacgatgtttttttttgtagcgaacgttgttggtttttcgcgtgtttgttcggttttggacgttattcgagtttcggggaaatcgcgttaggtgtgaaataagttagagtaagtttttgtttcgcgggtcgttttcggttttttagggaaatataagatatatagatatatatatatatatatatatatatatatatatatatattacgtttttattcgttcggtttttcgcggagaatcgttcgggaatcgttttcgaggtgcggcgcgggaggtggtcggttttgtttataatgtattgttcgtcgtattcgttttggatacgtgtagaaaggcgtgttcgttttttcgaggttgcggtgagtagttaagttagttgtatattgggatttttatatacgagttggtatatattagttatatacggttaattttagagggttggttttttgttttgggacgtttttaggttttcgggtcgcggtgcggagaatttaggtgggtgttcggtaagttatttattaggggttgttttttcgcgattttcgttataagcgtagggattcgggggtcgcgttggtttcgggttgcgtttttggtttggtaggggattaggtttacgttgtagtttgggagcggagtcgttttttaggtttttttatttttgcgggcggcggggtttattttttttttattagtttttttttttattgggcgagttgttttgaattgttcgtagtttgtcggaggcggtgtgttgggttggacgtttcg

SEQ ID NO: 6347 - DNA, 2762 bp, Artificial Sequence
  Description of Artificial Sequence: Synthetic polynucleotide
acgattcgggaggagagcgtggagtcgggtagggataggcgtgtcgtattatggcgtattatggatagggtttcgcgcggcggcggtttacgatcgtttaggggttgcgggagaaagcgcgagagattgcggaggttagtttcgtttagtttttgttttcgttttagtagtatttatttttcggcgggtcggagcgcgttaggttttgattcgtgaagattacggagcggggtaatttatattatttgtttttattttcggagtaggtattttcgagttgcgttcgtatttttcggggttgttagttggtagtagagtatttttttttttgtttcgagggcgataggtagggggatttttcgtggatttttttgtttcgcggcgagggtgggtacgtttttttttcgtaattttcgagggattttacggtaggcggagatcgatttgggattagggtattgtattcgtttagttagagggtttcggtcgaggttgtgtgaagtggtttttaggtttgggttggttggtcgggaggagtttgggggtattttcgggttggaggcggcggaaagttgggttgttttcgggttgggaattcgtagcgtgtagtggcgagggaatttgcgttcggattggagtaggtgttttttgtcgcggaggagttttttagtagagattaaatgaaaaggttcgttggttttttttcgagggtatgaaaagtacggaaggttttaggtaaaggcgttttcggggcgtatatagggtataggtagtcggatagagaaaggagtagtcgcgtaacggaatttttcgttcgggggagatattaggcgtgagaggttagattcgttttataggtaggcgttgatcggtagagattttttcgggtaagagggttagattttttttttaggtgggacgaatatagaatattgtgagggtaagagaagaagaaaaggaggtaattttagattgggataaagataataggatagtagagtttttgagtatcgggaggcgtacgggtgtagggtggggtaaggtggaggtaagtttcgtaattaagatattagagtgagaatttttattgtaaattcgcgatttatttttgtagaaataaataaaaaaattggagtaaagtattatgcgaggggcgaaaggtatagaaaattgtaaaatttgggagttattttgttttatttttttgttgtttggggatatttttcgcgagtttgttcggtttcgaagaaggagtagaggggattcgtaatttagtttttagagtttcgttaggaaaggcgcgagagatttattggtttcggtaattttgtttcggcgttcggacggagttcgatgtttgcgtagttatcggttgcgcggcgcggcgcggcgcggcgtggtattttttttttcgggtgcgtagttcggtttcgtagcggcgcggggaataaagggattcggcgtcgttcgttttatttcgttcgtggttcggttcgcggggatcgtcgcgtatttgaagtagggtcgttagtagcggtagtagggttcgtagcgttttcgttattcggtatatggaggcggagaggggtcgagcgaagagtcggaggaggcggcggcggcggcggcggcggcggaggaggaggaggtagcggtagtattaatagcggcgcggagaaacggttttaggtagtttttattttttttttttttttttttttttttattttttttttcgttgtttttcgtttttcgttaatggagagcgagttgatgataaatagcgggtcgcggagttcgcgggattcgtattaggagtaataaaatagatttagagattaaggagttggggagggggcgggggaatagggagggagagcgtgtgagcgtttgcgagtgtgtggaggcggttgttgtggtagcgtaggcggttcggtttcggttcggagcgtagcggaagtcgcgagggatgtagcggcggggattttggtcggtggaggatgtggaggtggaagtggagcggatggcgttttttaagagtttcgttacgcgaggtttcgggttcgtggttttgtttttttcgggttttcgttttagggtcgttcggcgcgacgaagacgtcggggatagcgtcgcggggagggcgtttcgggtcgtgcgtgttgtatttataaagagtagtagtttcgttatttcgcgttttcgttgcgtgggggtcgaggggcgtttttcggttttttttttcggtttttcggcgagttggagattgtttttcggtttcggtcgtaagggggtgaggcgaggggtcggcgcggtttttttcgtcgcggtttcgtttcgcgtagttgttgtcgtagtcgtttttgttgttcgcgtatcggtattcgttcgtcggttttcgttttgcgtcgtttattcgcgcgcgtcgtttttcgtcgtcgatcgcgtatttcgttcggttttcgttgcgcgatttgggcgagtcgtcgtcgtttttttcgcgttcgttttacgcgttgtttggttgcgcggttcgttttttttttttatttttttcgtcgtcgtcgtcgttttcgttttcgtttttttttttcgttgagttttttcgttcgcgtcgtggttaatcggaggttattaagttgcggttgtagtcggtcggattcgcggtagtcgttcgttttcgtttcgtcgaagcgtttcgtattttgttgtagttcgcggggggtcgtcggagggaagtttagagtgcgtcgagtatcgtttcg

SEQ ID NO: 6348 - DNA, 338 bp, Artificial Sequence
  Description of Artificial Sequence: Synthetic polynucleotide
tcgcgggagtcgcgtaggcgggcggttagggggagtgggcgtcgttcggtagcgtttcgcgtcgaggtataagcgttcgcgtcgaggtataagcgttttcgatttatcggtttcgcgcgttttttcgcgcgtttttcggattcgcgtttgtttattttttcggttttgttgcggtcgaggttttaagtcggttatttcgtgtttaggtaatcgcgggggcggcggcggcggcgtgaggagcgggcggttgttgtttcggggttttttggttcgagtttttagttttcgattttcggcgtttcggcgttcgattagcgttttaggtcgttttcgtttcg

SEQ ID NO: 6349 - DNA, 1435 bp, Artificial Sequence
  Description of Artificial Sequence: Synthetic polynucleotide
tcgcggtaacgatttttgggagtgatcgaggtattcgggttgtttcgtgtttttcgggtagcgatttaacgataaaatttgatagtgttttggggaaaattttatatttatcgttagcgttatattcgggttttatgttaataaggagatattgtagattatcgattagattcgtttgtttttagagcgtgcggtcgggtttttagtttggtttttaggcgcggtggcggcggtgggatacgcgttaggcgtttagagaaggatatgggataatggtttagttcgaggacgttagacgtcgtcgttcgattcggggaaggaagtttttgtagtcggttcgggaattcgaggcggggagggaggttagttttggaggtgcgttgtcgttttaaaataaaggattataaagattgtatagtggggaaaacgcgtttggttaatgcgagtggggacgatttggggagggggttgaggaaggtagggggtatacgagttaacggcggtttacggttttttttttttttcgtttttttttttttttttttttcgtcgggttgtttcggtagataaataatagaggaaggcgagttatttatcgtggttttgataggtacgtagagtatttgtttggcgtcgtcgtttttttcgcggatttcgttcggttggtttagttggaagtttttcgatttgatttagaatttaaatttggcgttgttcgtggagttcgattcggagttattgaggagttggacgattcgttcgtattttttacgggttatcgttttggttttgtttgagttttcgtaagttttgaggtattagttttggaattggcggtatatgtcgcgttcgttttttatgtttttcgcgttcggtcgttggtcggatgtttttagcgtatttcgtatttgtttattttaggtttatgaaaaatgtagtttcggttacgttgtagggatgcgaggtttcggtcgtagcgggagtttgttttgggtgggggaagggatgggaagaggggaggagggttcggttgggtattagtaattaatgtttcgtgttattaagtttggtttattcgtaattgtaacggttgtttcggacgttttttttgtttttttagcggtcggtttttttaatattttgtgattaggattattttaatattattttggtttagaggagttgggtttttaataattaaaattttattttttggtttattaaaaattttaatattgaattggggtggtttttagacgtttcgttttcgggttgcgttcggggttgggtaggtggagcgtagcgtcgttttttcgcgcgcgttttagaagtttttttagttattggtttcgtggtttaggagtgagggttgcgtttttttcgaaagtagtcgttcgtttagcgtttttgagtttcgaagggtatacgggtttcg

SEQ ID NO: 6350 - DNA, 510 bp, Artificial Sequence
  Description of Artificial Sequence: Synthetic polynucleotide
tcgaggcgcgatagtttattaaagacgagggttggttttttaaataaatcgcggtgattttatttgcggcgtttttttttacgtcggttttttttttttttattagagcggttcgcgtcgattcgatgggcggattcgatcgcgtacgcggttcgcgggttcggcggaggtagttttcgtttcggggattcgggacgcgtcgttttttcgttttaggttgttcgcgtaggaattttacggttacggttaagtggggtttttgtttcggatttcgttgggttcggacggtcgagagtttagggatttgggggggcgcgcgggttttcgagtttaggcggggcggcgggcgttttgtcgtttttttttcgcgcgtcgcgtcgtcgttcggtttttcgaagtcgttttttgtcggcgcgtcggtcgtttgcgttacggcgggcgttatttatttcgggtagagttttttgttcgtgtagcgcgttttgggtttttagcgttgatttacgttcg

SEQ ID NO: 6351 - DNA, 2722 bp, Artificial Sequence
  Description of Artificial Sequence: Synthetic polynucleotide
acggcgatggatagtattttcggttttcggtcggttaggagttcgcgagttcgttcgtttagcgttttgggttcgatcggtgtagttttttttatttttattttttaggtcgttgtatttaaaaatttaagtttcgttttttcgattttttttttttttttttttatcggcgttcgttgttttttttatggtatcgtttttattagtatttcgtttaaaatttagttttgttttagcgaatagttttttacgtattttagttttggttttcgttgttcgagcgtttttttttatcgcgttcgttcgaggttttttttcgtttagttcgtcgttcgttagtcgtcggtcggtcggtcggttcgttagttcgtttttgtttttcggtaaagttgggagggaaaggtgtatttatttttgtgtatgtttgtgaatttgttttttagaatcgtaagttcgtagattttgttaaatttttcgaagaggggtttgaggttttttttatttaggttgcgggggatttgtttaatgaatagtttgatggtatcgtggttttttatgggaatggtcgacgggtttttcgggttgtggtttaattcgtttatgtgttcggtattgttcgggttgttgtcgagttcgttggtattgaggtttgcgttgttagtttgttcgtttgttaacgtggttatttttatatatatagagaaaattttttttttttttattttttttcgtttatattttttcgtttttttttttcgttcgttcgcgtttatatacgtatacgtatatatatattcgggttttttttttttcggtttttttatatttcgtttttcgttcgttttttgttttttttttttttttttttttttcgttcgttcgcgttcgcgttttttttttgttttttttttttttttttttttttttttttttttttttttttttttttttttttttttttttttttttttttttttttttttttttttggtttgatttgatttttttttttttttttttttttttttttttttttttttttttttatattgaatagataggatttttgtttttttcgtttaaataggttggatcggtttaagtttttagttagattaggggtgggggtggcgagtgtgcgcgcgcggaggagggcgcggggggtcgggaatgggcgcgttgtgggggttcgcgttacggcgggcggcggtcgggggtagggcggcgtggggcggcggttatcgcgtttttttcgtcggcggtttcgcgtcgtggcgatggtatagttcgagacggttttcggttataaatagcgttaggcgtatggtttttcgggaggcgttgagatttcgggttcggcggtcgcggggagcgggtgttcgtgaggagtcgggtagtcggttttttttttttgttttttgggggttttttttgtaatagtagtaggtgtaattttttgtattttaaaaatagtgatttttattttcgtgtgggtatgtaggggggttttatttattaagttatgttttattagggcgttaggcgggcgaagtaaaggtagggatggcgggcggggcggcggcggaggtggaatgggcgttttttttttttatttggttttatttatttatttagattagaaaagcgagtcggtttggagggagttcgttcggggattcgagcgcgtatttattagtgtcgagagaaaaaaagttatataaatatatattatgtggataaatttatagataagagttttttcgcgcgcgttttttttttgtttttttgtgtgtgtttttttttgttttttttttttttttgtatttttaatttgttagagtagttttatatttttttttcgttcggtatttatcgttatttaagttatttgttaggatggggttgggagttgtcgggtcgcgtcggggggtagagggacggggagtagagattcggggttcgattttcgttttaattcgttttcgaaggcggaaggtgggggttttcgtttcgggcggtttttttcgtttcggagagcgcggttggtttttcggtggttggcgggaggaaggtaggagtcgggcgtttttgttcgttcgttcgtcggagggggaggaaggcgttgggcgcggtggtcggtgagttagcgcgggggatggtttgatttgttttcgtttgttttacgggtttaaatagaatatatttttttaattattattaaaagaataaagtttttgaatcgttatttgggttgtcgtcggatcgagattcgcgcggcgtgcgttgttttcgcgggtttcgttttcggtatttatagttttcgaggtgcgaggttgagtcgtttttgtcgtggggatcgggggtcgagtcgttcggttcggatttcgtcggatttttcgttaggtttattggggttggtatttcggttgcgcgggaaagggagtggtaggcgcggagtcgggagtagggttcgagcggtttcgtttgtaggggtgaatattggtggtgaatttggttggggtagtagatttttacgttaatgatatttatttgtatttcgtttttttttatgtttgtttttttagggtagttttttcgttttagaagtttggtaaattgaaataacgcgttcgttttttcgcgggttgcggggttggggagttggggcggcggggttgagcggttggtttaattttcgtcggttttcggttagttattttcg

SEQ ID NO: 6352 - DNA, 1133 bp, Artificial Sequence
  Description of Artificial Sequence: Synthetic polynucleotide
acgacgcggtgcgttaggtagagagtttggggagtgtgcgtgttttatttgtgtttgtatcgtgtgttttttttgtgtgtttttgagaatgcgtttttggtacgcgttttgcgttaataaggcgtttggtgtgtgtatgtttgtgtgatagtgtttgggttttgtttgcggttgtttgttcgtattttagttttttttgtgttcgtagttaggttttatacgtgcgttagttttcgagcgtacgttttcgagtgattcgtgcgcggtgtgtagggattttagggtcgtgtgtattaagggcgttcgtgttcgtttttttgtattaaggaacgtatttttatatgtttgagtgtacgtttttttttatgtgtgtacgtttcgtgtttacgtcgtttatgtttgtgtaggggcgttttacgcgcgtttttttcggttcgcgggcggttagggattcgcgttgggttttacgtttttcgtggggttgatttttttttcgcgtttcgtagcgggtcgtagcgattggtcgtcggtttttttttagtcgttattttttttttttttcgttattcgcgcgttcgcggttttcgttgtttttcgcggtttcggcgaggtcgcgtcgcgttgcgtttcgtttttattggttgcgcgcgtttttgtgtggcggtagttgcggttttagcgtttttgaatgtcgagaggggtcgggaagggagtttttttatgggttatttgttttttcgttagtcgtcgttttatcgtcgttcgcgtttcgcgtttcgtttttcgtttcggcggttttcgtagtttcgtcgtcgttcgcgttcgcgttttggagtcgcgttataaagggttcgcgcgtagtcgtcgtcgtcgtcgtcgtgcgaggagttaggatggttttggtttacgtcggttatttcgtgtttttagtgtttggttttgtgcgaaatagaggtatcgtttttttttttcggggtttgtttcggagcgtggatcgtcgtaggtatcggggcgggggcgggcgtcgcgggcggtcgggggtttagggtatattcgcgaggacgtagggcgagcggtggtttttttttattttattttagggggattttcgagggtgggggcggtcgttttcg

SEQ ID NO: 6353 - DNA, 2401 bp, Artificial Sequence
  Description of Artificial Sequence: Synthetic polynucleotide
tcgaaggtgtcgttagttttagtgtcggtgggcgtttgtattaggaatagttaaagtcgacgatatttagttatttcgagcgttagggaagacgtttcgcgtaaaatcgcggttttaggcggattttcgttttagtttcgcgttgttggtggtattttcggggatttaaagtgggtggtttgggggtaaaggaatagaggtcgaagaatttggggtatgttttattagagtatttaagggacggagtgggaggttatattagatatgcgatttcgatatattttaaaagtggtagtttcgtgggttatttttaatagtgggatggatttttttaatttttttcgtttttcgaagtttttttgttatttcgggttatgtttttttttcgggatttttttgtgtaaaattatttttttttttgtttaaaggattttttttttttttttgattttacgaatttatttttttaataggtttttaaagtatgggcggatgtgttttttttcgtttatcgttaggagtcgagtttcggtaggtgagcggtgtaaaatacgtatttagttgtttttagtttttttcgttttcgttgagttggttgtttttatttcgtattacggtattcgagtttgtgagttttcgatttcggttttagtcgtagtcgttaataattttataataaataagaggataggattgagcgttcgcgtttcggagcgtattggttgggggtaattttttattttcggcgcgtcgttcgttgtttcgattcgagagtatcgggagagtcgagggaagggaaggcggcgaggggaaggtaggcggggatggagggaggtacggcgcggcgcggagcgaggaggtgggttgtaggggacgtcgagaagcggtggggttggcgtagagggcgggcgttcggggcgcgcgttattttcgttttgttttcgtagtggtagtatacggtttataggtatttgagcgttcgttagagtaagatgatgaagaggttttcgaagaaagttattatggaggaggttaggaaagtttattatatgcgttggtttcggttgtcgtacggtatttttatggttatcgggatgatgagcgtatttattttgggttcgtggattgaggacgaggaggaagaggaggaggaagaagaagaagaggaagaggaggaggaggaggaggaggacgcgtttaggttgagatggttcgcgtggatattgttatttattttaagattgttgttttcgtcgtcgtcgtcgtcgtcgttgttgtcgtcgtcgtcgtcgttattatttgttatagttagtaacgggtagtcggcgtaggggttcgggggagtttttttcgtcgttagcgttattttaaatatttattaatagttatattgttgttattgttgtcgtcgtcgtcgtcgtcgtggagcgcgggaggggggcggggaggcgtttgggttcggggcgttgtgcgcgatttggcggggtgcgtcgagatatatatagcgagtcgtcgtcgttcgttcgggggggagggggatggagtgcgcgggtagtttttttttttcggttcgcgtttcgttcgtttcgggttgcgttggtttcgagcgtcgagagttagggggcgtcgcgggtcgttcgcgttcggggtttgcgtcgttttcgggttcgtttcggtttcgcgcgcggtttcgggtgttttcggcgtcgcgtcgttcgtcgtgcgttacgggtgtgcgttgcgttcggtcggtgattttttttttcgagcgtttttcgcgcggttaacgagtcgtttttcgtttattaggtggtaattcgttaataatggataatcggtttttttcgttcgggcgtttttgcgttagtttttttttttcggttgcgttcggtttcggttcgtcgcgttagtgcgcgttcggtcgcggtaggtttatcgcgttcggtcgtcggttcgtggtcgtttgttagtttatgttttcgggattttttagttttgtcgttacgtcgttgagtttttcggttttcgttcgttttttttttttgtcgttttcgattttttttcgttttcgttttcgtcgtttaagttttttcggcgcgcgtttcgcgtttttcgtagtcgttagtagtagtagttgtagtaattggagcgggcgcggatttaggacgatttaggcgggaggggaggaggttcgtcgcgttggttcgtttgggtttcgggttgggtaggggtgggtagggtttttcggtagcggttcggtaagcgtttttgatttttagggcgtaaggtagagcgtttttagtttaggcgcggggttaggcgtttttttttaaggtgttgcgtttttagtcgagagcggtggggtatattgggaggacggcggggcgtttcggttaggtcg

SEQ ID NO: 6354 - DNA, 769 bp, Artificial Sequence
  Description of Artificial Sequence: Synthetic polynucleotide
tcgggaacgaacgtgcgtggggtagtttaaatttttgagtttagatttcgtttttcgcggttagatggtgcggtcggtggggttcgagggatgcgtatagttgtgtttgagaggtgttgttttttcgttatcgaagtcgttgggaaattttgttgtattgagatattttaatgtcggatgttttaattttgcgggtaaaaaaaaaaaaaaagtttgaattaggtattgggtttttgttacggtgaattttattcgcgtttcgcgtcgtttttttatttatttaggcgaggtggtttggatttgtatttcgttgaagaagttttttatgcgatattttcgttagtatttcgcgcggatttggttgggcggcggcggggagttagtttgttatcgtacggcggtcgggatcgtagtttttgggtgcgtagtgcgtttttcgttgcgtttttttagagcgcgggtttcgtgtttgtgttcggcgcgacgcgatttttttgttagtcgggtttcgcgtgtttttcgcgtttttcgtagttttcgcgtagttcgtagcgttttttagtttcgtttcgcggtcgcgggaattcggcgtttgtagtttcgttcggaatcgatcgttaggcgttgttgtcgtcggttacgtaacgcggggtttttgtttggtattagttttaggtgttttgtttcgggtcgtgttgtcgcgcgatattggggatttaataggtcgtcggttatttagttggtttcgtagtttttttgcggtttagcg

SEQ ID NO: 6355 - DNA, 1169 bp, Artificial Sequence
  Description of Artificial Sequence: Synthetic polynucleotide
tcgtgtttttttcgagtggatttggtttcggttttaaatttagtcgagggtcggttcgtttttggggattcgcggatgtcgcgagggggcgtcgcgttattgaaggttgggacgggggcggtgcgcggggcggcgtcggagttcgggatgtcggttttagagacgtcgcgtttcgtttcgaggaggtcgtcggtcgggtaagcggagttcggagttcgcggagtttggatcgtaggtaaagttgagcgcgtcgtggggtcgggggtggggggttcgcggcgaaggagtcggggtcgtagtgggcggtggggcggggggcgcgggtttttgtttgatggtttcgcgcgtagtttttttttcgggtgcgcggtgcgcgcgggcgcgggagggtcgaaggggattttggaatttttttgttcgggttaagggggcgggggcggttcggggtcgggcggggttggtgtttttttttttcgtttagcgtttagagttcgggagtcgaggggggcgtcgggtcggaggcgttcgtcggtttggtcgcgtcgcgcgcgtggatggaggtttcggtcgcggatcgtttcgtttattcgcgttggttttgcgggagttcgggtgagtcgaaggcgaggaaggggcgcgggtttcgggaaaattcgattttttcggcgttcgtttcggttcggttgggggcgtattcggttcgcgcggagagcgggcggggtgtgggcgaatgttcggcgcgttgcgtttttttcggtttttttttttttcggagatgaacgttttattttcgttcggatatacggtcgtatttttattttgtttttttcgattagtcggggcgcggttcgaattgggggagagaagatttagttttcgtagtcgcgaattttgtaaattcggagtttatgcgtttcgtttttcggttcggggagtttttagttttgttcgtcgagcgtagttcgggttcggattgtggttattggggacgagaagggttttttttgcggggttttcgggttcggatggacggagggggcgttcggtaggtgaattgggttcgtttcgcgtttcgaacgtttttttaaatttataagtttcggagattttggggtattttgcgatttcggagtgatcggtggagttttcgttcgcgcgtttggttttcg

SEQ ID NO: 6356 - DNA, 6036 bp, Artificial Sequence
  Description of Artificial Sequence: Synthetic polynucleotide
tcgtatagtttgattatcgtgagtaacgcgtgcggtacgttttggaatttgtcggttcgtagcgttcgtgattaggagttgttgtgggatttgggcgtcgtgggtatgttgcgtaatttggtgtattttaagtataagatgatcgttatgggtagcgtcgtcgttttgcgtaatttgttggtttatcggttcgttaagtattaggcggtcgttatcgtcgtgtttttaggtagttgcgtgtttagtttgtacgtgcgtaagtagcgggcgttggaggtcgagttggacgtacggtatttcgcgtaggcgttggagtatttggagaagtagggttcgtcggtagtcgaggtcgttattaagaagtcgttgtcgtttttgcgatatttggacggtttggtttaagattatgttttcgattcgggttgttttgacgacgacgatgtatcgttatttttggttgcggtcgcggttatcggggagttagttagttttgtcgcgttgtttttttttttgggtagtttttttttgtaggggtaggcgttggttcgtatttcgtttattcgtcgaggcggtaaggaggtagagaaggatattagtggggaggtagtcgtggcggttaaggttaaggttaagttggcgtttgtagtggcgcgtatcgattagttggtggaggatattttcgttttgtatatttcgttcgacgatagttttagttttagttttggagattcgggataggaggcgttacgggagggtcgcgtttagttttgttcgttatgtcgcggttcggagggcgggcggcgagaggtaggaagtcgggcgtattcgttgttgcggtttaaggcggtttacgttagtttttttaacgatagttttaatagcggtagtgttagcgacgggtattgtttacgcgaatatatgttgttttgttcgttggtcgtattggtttcgcgtcgcgaggattttaggtgtgggtagtttcggtttagtcggtttgattttgatttgttcggttgttaggtcgagttttcggttcgcgaggttattttcgtcgacgttcgcgtgcgtattattaagttgtcgtttatttattagtacgtgttattgtttgagggtgttttaagggcgggtgtagagtttttcgcggggtttggaatttttttaggggttcggaagtaggtttggttgtcggtagattatttgagtaaggttttcgagaagttggcggttgtttcgttgtttgtggttagtaaggtattgtagaaattggcggcgtaagaggggttattttcgttgtttcgatgtagtttttttttttcgttgttttcggtcggtcgtttaggttttagcgagggtggtgatttggatgatagtgatttttttttggaggggttggaggaggtcggttttagcgaggttgagttggatagtacgtggcgggcgttcggggttatttcgttgttcgtagttatttcggtttttcggcgtaatcgaggtcggggtttgggggtggaagacgttacgtcgtttagttcgtcggagaattacgtgtaggagatatcgtttgtgttgagtcgttgtagttttgtgagttcgttgggtagtttcgagagttcgtttatcgttagttttatttttagtgaattttgtagcgggtagggtagcggtattattagttttagcgagttgttcgatagtttcggatagattatgttttttagtcggagtaagacgttatcgttggcgttcgcgttatagggttttttcgaggttatttagtttagtttgtagtgggagagttacgtgaagcgttttttggatatcgtcgattgtcgggagcgttgtcggttgttatttgagttggacgtaggtagcgtgcgttttatcgtggagaagttagacgagaatttttcgtgcgtttttagttttagcgcgttggttttgtacgagtattacgtgtagtaggacgtggagttgcggttgttgttttcggtttgtttcgagcgcggcgggggcgtcgggggcgtcggtttttattttgtagggtatcggcggcgggaggaggggtcggcgtttacgggttttcgttttcgcggcgtcgcggattaggagttggaattgttgcgggagtgtttgggagtcgtcgtgtttgttcggttgcgtaaggtggttttcgcgttggtgttaggtcgtcgcgtatttttcgtgttcgtttatatgttggtgttcgtttcggtttcggtttaggaggacgatttttgtattgatttcgcggagggtacgtcggttaatttttttagcgtcgtttcgtttagcgacgagacgttgtagggattttttagggattagttcgggggattagcgggtaggtaaagatttatcggtcgttttatttttgttagataggttatggggtatcggtataaggcgggaggcgtcggtcgtagcgcggagtagtttcggggcgcgggtaagaatagagtagggttggagttgtttttgggtcggttttcgagcgttttcgtagataaggacggtttaaagttcggtcggattcgcggggacggggcgttttagtcgttgtgttttacgacgtttattgaggaggtcgtgtattgtttttacggtaacgattcggacgaggagttttcggcggtcgcgtttacgttaatttatcggcgtatatcggttatttttcgcgtttttacgcgggagcgttcgtagggtcggaaggaggtttttgtttcgtttaaggttgtattagttgtttcgtcgttcgttcggatttagtttagttttattgttgacgagatttcgttttgttattttttgagttttttcgttagtttttttagcgagttcgagttttcggagtcgtcggtcgtttatttacgaggtcgggagttcgcggttattaaggattcgggtttaggaggcggacgcgatagttcgtttagttcgcgggtcgcggaggagtttttgtagcggtgtattagttcggttttgtttaggcgtcggtttttcgtgtttggtttgcggcgtcgtaagtttcgagttattcggttggatgagcggttcgtagaggggtttcgggaacgcggcgaggaggtagcgggttcggatcgggttttcgatttggatagcgtggagtggcgcgttatttaggagggcgttaatttaattgttacgtggttgtattaggtagtagttgttacgcgggaggtttcgttcgagttcgattttattttgtttttcgtattcgggttgttagtgggatttattttatagttttttaagtataggaagggacgataggcggagggagaaatgggtagtgttcggcggttagagaaaaggggcgtagttttagttaagattagcgggagttttcgtttttttgtaggtttcgagaagttacgtggtatatagaagattacgttcggggtgttagttgtgtttcggggacgaatagtgatttacgtttttagttcggtatttcgtgtttagtttaaagggattttcggttttcgcgttatatcgcggaaggtggcgtttttttgtttggtatagttcgcggttttagttaaagtttcgagtttcgggtagtagcggtcgcggagtttatatcggtttgttaagatttcggagttggcgacgttgagttagttttttagaagcgttatatcgttcgttcgtttcgttaagatttttttttttagttttttttagatttcgttcgttttttagtttttgtttagaaagcgtttttcggttatttaggttgttggggttttgttcggtttcggagttttttcggtgtttaaaacgtcggcgcgtatttttttggcgaagtagtataagacgtagagatcgttcgtgcggatttcgtttatgtagaggtcggttcggcgtgggtcgttatcgttggttcgggtagtttcggagtcgggttttaggggtcgggcggggatcgaggcgggttcgggggcgcgcgggggtcgtttgggtttggtgcgtgtggttttagttttttttagcggtagcgagtttttcgatcgttcgggttttcggcgatagttaatttttattaaggagtcgtcgggtttgcggcgtcgtcgtttcgagttgttttcggtcgagttcgcggtttttgttttttagggcgtttcgtttcgtcgcggtcggttcgcgttgttcgtcgtttttttttgtttttcgcgttgcgaagagtttcgagcggtatttcggtagggttcggtttcggttcggtagcggtttttcgcggttcgatttagttttggcgagcgttttgttcggtgtattattttcgagagttcgtttcgtttgtttgtgcgcgcgttcgtcgttcggtcggagattgttaagcgttacgcgtcgttgtcgtatattagcgtggttcgtaggttcgacggcgtcgttttcgcggtttttgttttagtcgacgtcgcgcgtcgtagtagcgacggggagtttcggtcgttttttagggtggtcgcgtcgggtacgatttggcggcgtattcgagatgaggacgtgttttatattttgcgtagtacgtttttcgttacggttttgttattgcggggttttacgttcgaggacgtttcggtcgggttttcgtcgcgtaagattagcgacgtcgtggtttagatcgaggaggtcgtcgtttttaagattaattttagtacgttttcgagtttggagattagggagtttttcggggttttcgtcggcggttagtttttttttttcggtagcgacgtggacggttttagtttcgttaaggtttttattttcgtatttttcgtgtacgagggtttgggggtcgtcgtggggggttttttcgttagtcggtacggtttttttagtcgttcggttcgagtatttttttttaattatgtgtttagttttatggtggtcgtagttattatcgattcggtcgcggagaaagtttcggttattgttttcgttatttttttggaatagtggtttaggtcggttttttggaacgttttttttcggttttgcggcgcggtttggttgttttatgggtttgcgttgtagacgttttttataggtcgttttagggtttttgtttattcgagttttattatttttagaattttcgtttagcgtacggcgatttcgcgttttatcggaagattttgtttttgtgtcgcggaggtttaggaggaaacggggcggtcgttaggttttaagtttcgatcgtggagcgttggtaagggcgttttggtttagttttgagcgcgcggttttttttttgtcggaagtcgttgtttgatttcgggcgagggaggcggtagttttcgggttcgggtttgggtttgggttcgttgtttcgtagggatagcgttggggaggtgacggcgttcgtcgtaggtggggcgaggttgggggagggcggcgtcgcggcgggtttgttagttgggggtttttgcggcgcgtaggggcgaagtttgtaattattgtagtcgtcggtaattcgttaatgagggttttgtagggattgtttttatttttagttttagttgtgggagtgcgggtgggggtgtggtcgagtttcggtaggaagtttcgtttagacggtgtttagggaattcggagtttaagcgtttcggcggagtttaaaagggtgggggtgggaggggtagaggttaacggatttttttgtttgtcgtattttttggcgggagacgggaaggtagcgggttgcgtacgatgggattttggtgtagacgtcgggtcggttgatatttggattttattttagaggagatgttggttattagttggggcgattttaagggtcgttggagttagtatcggttcggcgtagtcgcggcgggcgaggttaatggaaaggagattgaggggagtttcggtagtgagttcgaggttttgggatttggagttcgcgttggtttttttttagcggagtttgtacgttacggagattattatatgtgggcgtggttagtgtttaggatcgtatcg

SEQ ID NO: 6357 - DNA, 3400 bp, Artificial Sequence
  Description of Artificial Sequence: Synthetic polynucleotide
gcgtagaattagtggcgatgggaggaaggggatcggtagagcggggttgggtaagtttttatttagtcgggttgagttttggttttcgtagagtttttgtttttttcgagatattcgttatttggtgttagcggtggatcgttttgcgggggtttggcgcggtttcgggttggttttgattttgtagtttcgcggagagggtaggttcgcgtggagagggacggggagtcgggtcgattgttttcgggtttttagtttttgagttagtcgcgtgtttatttatcgtagattttcggttgagtatcgttcggttgtaggtattgttgttcggcgacgattatcgttgttttatacggatgatttcggttttgtttttgttgtcgcggttcgagttcgcgtcgttgtttgcgtacggttagttggatatcgtgtttttttcgtcgtttaggtgcgcgtaggtatcgggatacggggtaggagcgggcgggggcggcgtggtttcgtggtcgtttttaatttttttaattgcgggttttaggttattcgcggaattcgaggagtcgttatttagcgtagatttttttttggagacgtttacgcgtttggtgcgggcgttgcgggttttttcggttcgggttttcgcgtcgcgtttggttttggattcggacgcgttggtcggtttttcgtagggtttagttaatttgtcggatttcgcggcgttggagcgtttattcgacggcgaggagtcgttgttgttgttgttgaggtttattgcggttattatcggggattttgcgtttttgtacgattttacgtcggcgtcgtgggttacggttttggcgcgtcgcgtggttgttgaattgtaagcggcggttgtcgagttgcgaagtttttcgggtttgttttcggttatagtttcgttgttggcgcgtttgttcgcgttttgtttaggtggtttcggcggtttcggcgattttttgcgagcgttgttgtttttgaaggcgttgtagggtttgcgcgtggagtggcgcgggcgggattcgcgcgggtcgggtcgggtatagcgtagcgcgggggttatcgtcgtcgacgggtcgtgcgcgttgcgcgagtttagcgtagattttcgcgtcgagcgtttcgtatttattttcgagatttattaggttaataattgttagggcgtgtgcggttggttttagttcgatcgtaattcgcgttacggtaattacgtggtgttgttgttgaagatgtaggttcgtggggtcgttttggcgcgtttattttgttgcgtgtttatcgtttacgcgggtaagttgtttattagtttgtcggaggagcgtattagcgcgtattacgtgtttaatatggtggttatcgagtgtggttgtcggtgatttttgcgtcgcgcggatttttgtttcgagggttcggacgcgttttagttcgcgtttttttttatatttattcggattttaagtatcgttttaataaagattagtaagtaatcggttggggtgttcgtgcgtgttagggggttcgtgggattttttttgtcgttttttttcgcgtacggttcgggttcgttttgtagcgttcgttgttttttttttgtttgaagcgttttattatcgttttttaggtttcggatttggtgtcgggtttaggcgtaaaggagtaggtgattttgcggtcgtagtattcgttttatttcgttagagtcgcggggcgtttagaaggggtttttggatttcggcgcggggtcggtttagtttcgttttttgtttgcgcggagtttttggcgatttttaggtcgttgtttttcgtcgggacgtttcggggatatttaggtttgtttttttttgggttcggcgtttttggagtttcgtgtttacggtcggtggtttttttcgcgtgatttttagcgttggggtagggtttttcggggttttttggcggttcgtggtttttttttttttcgcggttttttttttttaggtttttttttttttcgcggttttttttttcgcggtttttttttttttcgaggtttttttttgggttttcggtttgcgagggttatacggttttttcggacggttttttcggtggtttcgtcgggttttttttcgtcgttttttgtagtttttcgattttcgggaattttgggtttgatttttgtttcggttcggggcgtaggcggcgttgatggaggcgtttgggtttcgaatttaggttgtaagatagagtggggttttggggtaagcgtttatttttttttcggttcgggttttttttttttttggggatgaaggttttaatgttcgcggttagtggaaggaagtttttattaggggcgacgatggttttttcggggttgagtttggcgggatttagggttcgggtatacgtgtttggagtgttgtttttttagggacggcgtttgtagcgatagggtcgggattcgagttagttgggtcgaggtacggtttatattgtttattttttttttatttttagagtttttttttttggatagttggagtggggttttttcggtacggttgagattaaggatgttttcgagtcgtgggaagggatttcgggatttcgttgtcgcggcgtttttttttcgaatttcgtttttttaattggttattttttttttcgattacgggttgtaggaggtttttagtaagggaggggtcgtaggagtgttttcggggggcgtttacgagttgagcggtttttagagagggcgtaggggaaaggcggtagaacgttacgaggtaggaggggttgtataaggtttattcggaagttagaatttattcgcggcgaggggaatgggtttcgtaaaaggtttatatcgggtgagaggggcgcgtaaggttcgttatttaaggggagatgtataaattaattttgggggcgtgtaagatttagttttggagaggaggtttttagattttattttggcggtatagcgtttttttttggaggaataggcgtataggtggattttagtttcgttttatttttggggagtttgcgtttatcgcggtatagttggaaagtcgagtttagtagcgttattagcgaggcgagtattaggtatttgttgagcgataggtttttttagggtagtttttcgtttagggtcgggggcggcggcggcggttgtaggggcggcgcggtttgcgtttttttgcgcgcggggacgtttcgagggtttgcgggggtaagtgcgcgttgcgttgtggttattggttttgtgtcgttttttttttcgggcgtaggggataagagataggtttgtgttttgaattcggttttttttgtttgtttgtgcggtttcgggcgtaggtgaatttagtttcgggtgtttcgtagttgtacg

SEQ ID NO: 6358 - DNA, 1143 bp, Artificial Sequence
  Description of Artificial Sequence: Synthetic polynucleotide
tcgatcgttagtggttgggaagtgggcggtgttggggggtgagtttcggtttttttaagatgcgttttttatgaaattttttagttttacgtgtatttatacgtatacggatgtatgtatacgtatagaaatatatagggttcggatatagttgcgcgtagataagtaaaggattacgtttacgtggaaataggtgtgcgtatacgttttcgcgtattcgcgcgtataagcgttttatatttgggaacgtgcgtatttgtttttcgttttcggtatatatatagtcgttttatattggaatatttgggcgttagcgtcgggttattcgggtacgtagggcgttacgtagggtcgcgtatacgtttttcggttatacgcgtatagttttttacgtggacgcgcgggtatatacgttcggggttcgtagtcgcgtatattcgtatttaggaaattttagttattattacgcggggttcgatcgtttttgagtatttttcgttttagtcgcgtattcgttgcgcgttcgggacgcgtatattcgcgtatatatcggttttttttgcgtacgtttcgggtttattttcgtttagagttttcggggtttttttttatttcggtttcggggtttttttacgttttttcgtcgacgtgtttatttgtttagggggcgttttcgagtcgcgtttcgcgttcgtttttaggagggttttcgcgagtcggttgtatatttcgaggcggtttcggttgtataatttggagcgagttgtttcgtttttttattttgggggcgaagaagggtcggggagtgggggaaagcgggaggcgtcgcggtttgggaggttttcgcgggttttagcgtcggtcgtattgcggtttttttcgcgcgtcgtcgtcgtcgtcggttttttttcgtttcgttttcgcggttttcggcgtttttcgcgcgtttcgggcggggtttcggggcgtacgcgggttttacgtttggttttgatttggttttgtcgggcgtgtattttttatttattttgggaagcggggtttttggagcgtggaacgggcgtcgttagtgcgcgcggcggggatcgggggtgagggagagtgagttgttcgttcggggagataagtaaggcgttaagttcg

SEQ ID NO: 6359 - DNA, 220 bp, Artificial Sequence
  Description of Artificial Sequence: Synthetic polynucleotide
acgtgtcggtgacgtttcgtggagttggcgagtttcgtttgtttcgcgattgagtttgcggtcgtttcgattttttagtagattttggcgtggggtatttgagattttcgttattgaaaaggcgttatagaaatgtaaggaattatgattttaataaaattgttttatttaggagcgagtttttgcgttgtttttgtcgtcggagttcgggtttgttacg

SEQ ID NO: 6360 - DNA, 1860 bp, Artificial Sequence
  Description of Artificial Sequence: Synthetic polynucleotide
tcgcgatgttagttacggttcgcggcggttacggagttattttagtatttcgcgatggatagtgattttcggcgtggcgcgagttttttgcggtttttacgcgggtttgggcggcgggtttttttacggtttcgtttagatattcggaggtatttgttaaagttgcggaggtggacgatcgggcgtttaagtacgaattttttcgtcgaggtacggttgtcgggtttcgttttgagggtttggggcggcgaggatcgtcggggaggagggcgcgcgagtcggaggttagagtcgggtcgggtagggcgcgtttaggagtaggggagacggcgattcgggtcgaggcgggacggggatacgttatttgttcgtggagcgcggggaaggggtgcgcggcggcggcggcggcggagtttggcgtagagggtagcggtagtagcgggagtatcggttcgttcggggtcggttagtcggggagatcggggagtagcggggtcgcgggcggcggggtcgaggcgagtagtatcgggggaattacgattttcgcgttgagtcggagtagttcggtcgagttcggtattatttagatttagggcggcggcggcggcggttttgcgtttatcggttagaggagaggttgtcgtcgtcggggttgttgttgttgtagttgtcgtcgtcgtcgttggaatttggcgttcgtttgtattttatattttcgcgttgacggcggcggcgggggcggcgggcgttcgagatgttgggtcggcggcggcgcggtttcggagcgaatttatttggtttcgcggcgcggtcgttcgtttcgtttttgtttcgcgcgggaagtttttttttttttcgttcgcgtcgtcgtcgttttcggattcggttttcgtttcggttttcgttcgttcgcgttttttttcgtcggatttcgtttcgttttcgcgtttttcggttttggtcggggtttttttttcgttgcgtttttggattcgggcggtcgcggaggacgtgggtgggagagggtcgagggcgcgttcggttgggttttcgtcgatgtcggttttttggtggtttttggttttttgggatttagcgtatcgcgagggaggtttcgggtttcgtatttaagggtaagcggaagtcgaggtggcggcgtcggagttaggtatgtttcgttgtttagcgcggggttgagggcgtagacggggatcgcgcgagtcgttttttatttggttttttcggagtttagggcgcggagggtattgggttgcggattcggcgtaggcggtttcggacgttgttaggcgcgggcggatttttgttgtataaatgggttaaataggttcgtaaggttttcgcgggttttttggttcggaagttgagtcgcgggtgtttggtttgaagtttcgcgttttatagtggttcgcgggtttcggcggtttttgttttacgttttttaaggtattaggtaggtggttttagggtttttgtttacgatattttttgggtggggtaggattatttttttgtgaattcgttttggatgtttttaggtatagtttgtattttttttttttttagtatacgcggtttttgacgttgtacgtcgagttttttgggatttaggacgaatcgggttttaaggattttcgtttcgttcggattatacgtaggtagcgtcggtcgagtcgagtttgggttcgtattggttacgcgtagttatcgttagacggcgttagttttttttcgttgtagattttgtttcggaggtcgttagttttttttttatttcgggtttatagttttagtgtagtttttggcgacgcgcgttgatagttgggtagagattttcgtgcg

SEQ ID NO: 6361 - DNA, 441 bp, Artificial Sequence
  Description of Artificial Sequence: Synthetic polynucleotide
gcggggttttaaacgttatttaatcggggatattgggcggggggtcgtttaattaggttcgtagttggagtagatagggcggttttcgggatttggcgcggtttttgtttttcgttgtcgtcgaagttttaattttcgtttgtttgttttgtgttttttgtacgtagaagtttagtttgtgtggttttgcgatttgcgggtattgggagatttatagttaagacgttagggttttttggaagtttagaaatggtgagagtgtcggttcgatatttcgagagagggaacggggttggttggaatcggtgggaagcggttgtggcgggatttaggttttttcgtagttagttttataatttgcgtttagagtttttgtttagttcggttttagttttttttagttatacgatggcggtcgcgttgatagtcggggtttcggcg

SEQ ID NO: 6362 - DNA, 5587 bp, Artificial Sequence
  Description of Artificial Sequence: Synthetic polynucleotide
gcggtgttttcgggaggttggtagtcggggaagtaggtacgtgaatttatcgggttgttttattttaatttgaggttagagttgaggcgtaggggtcggggtaggggtagaggtgtcgaaacgtattagttggggattttcgggggaaggagataggagagatttaaggcgagttttaggattcgtttttatgattatgattacgcgttgcgttcgaattatatgtttatttcgtatttgttttcggggattagatcgcgtttttttagatggttggggagggagtagatttcgggtgaaggttgggggaggtatcgggatgtcgagtacgttagagtaggcgggggatgggtttcggttttttgtcgtttcggtatttcgttttgtatcgggtaaagaaggggttacgatcggcgaagagcgcgtggagatatagggattcgcgatttaggggtaggaatttcgttttttttcggaaatttttcgggttttgagtcgtgttcggcgttttttattttattttattttcgtcgtttttgtcgttatttacggtcgttgcgggttggttagcgtgtgcgtttttcgcgtcgtaggtatttgttcgttgggcgttgtgcgtttatttttttttcgcgtattgtagattttcggcgttgtcgtcgttatttagcgtagttttcggttgggtatagcgtttcgtttttttcgcggtttcgggcgtttatttattcgttatggtttaggtttgggttaaatagcggggtagttggttgtttaaattggggtaaggagttgagggttgggagttgtagagaggatcgagggatatacggggagtagggatgagcggtcgtttcgagtcgtgtagattgggaagaagttagggagagtttgggtgggaggatttttaatttaagcgggtgcggggcggggttgtattttaattagaaagacggtggttttttcgagcgattttcgaggagagagggggagcgttttggggcgggggcggggcgggttgtggtaggagaggggagggcgggggcgatgtagcggtggaggcggtttggcgtttagttattgatcgttttttttttttttttttttttttttttttttcgttttttttcggtttcgggttcgttacgtcggattcgtttttttcgcgttgcgttgggtcggacgttaggtttgcgcgtcgcggttgagcgtttattcgttttgcggaaagagtcgcggaggaatcggcgggggcggttgcgggagtcgaaggaggtggtaatcgggagtagaattagaaggagatagggaggtagaagttcgcggtttcgtggtacgtattttttcggttagggatgggtttcggcgcggtttagtttttgttcggttcgtcgggtagagattgaatcgcggatttttatcgttttgtggacgatcggatagagagaggtattgatcgatcgttagtagtttttcggtgggatcgcgttttttgtatatttcgcgtagcgtttttcgtcggagtcgtatcgggtaagtcggcgagggagcggggttgattggcggtcgtcggcggttaggggagggggcgtcgcgcggggttatggtaggttcggaggcgttttagttcgagtcggagtcgattcgagtttacgcggtcgtcgttttttcgttttcgggttttcgtcgttatcgcgtttttcgcgggagatggaatagcggaatcggttcggtgttttcggatatttgtcgtttttgttgttgtatgttttgttgtttttcgtggtcgacggtgagcgcgggaattttgttgtcgttgtggattcgggggggtttttgttggggtcgttatcgagaagaagaagaaagagaacgaatcgggaagtttcgcggtttttagtaatttcgttgtgtagtttgggttcggaggggtagggagaggcgagcggcgaagggtcgtcgtagtagtagcgtcgcgttcgagtcgtttttagtttcgtcggggtttcggttgcggaaaggatgtttgcggggagcgggagtaggcgcgttttagttaggttttggcggtgcggttaggggcgggggagaagtacgagtcgtttttgtcgtttcgttttattcggagggaagtagtaggtagtcgatggtcggtttttgtttcggttttgtagtcgttttttcgaattttgttagttttttcggtcgtgcgttagggagtagttgcggggtggggggtataaggttagttagttagagatcgattgtttcgttttaggttgttttaggttttcgatttatagttggttacgtttttttttttttttttatttttagttgtatttatagaagtttttaaagatgtgatagtacgggagggagacgatatcgaaatgttttgcgcgtttcgggttagcggagttatttcgtattcgttggagatttagtggtggtattttaaggagttatttcgggagttgttgtacgagttggcgtttagcgtgtcgggcgttcggagtaaggtaattcgtcgtttacgcggtatcggcgcgcgttcggttcgcgttcggggcggcgaaggttaatttagggagggaagtagcgggttttattcgcgtagggcgtcgttttgtggcgtagtttattttttattttcgtattttaaagtatttttaaagttagtagtggttatttttaaatttgttaattattttgatagtatcgttgtttttattattttttagaattttatttacgtttagtttttaaagagttatattttagtttggtcgtttgttcgtgttcgttggttgcggttttttgatgggtgttgggtagtgaaggaagtttttttggttttattaggtttttttcgttttttgttattttgaggattttagggtttttacggttgcgttttagaggttattagaaaatcgagtatcggaaagtcggtaggatttttagtttttaggggtatagaggggttatttttttgtggtcgaaaataggtttacgttgtttgtttgttttaaaatttatatttttttatatattttagtgtgttcgcgtgtatatatatttatatatatatttatatttatatatatttatatttttttagggttttatttagagttatttttattgagtttttcgttgggtgttgtttagatatagcggttttttttttagttttttacggtttttagtgagttgggggaggattttgagttacgcggtagggtttaaggatgtttagagggaaggagaggggtttttttttttattttggtgtttatttagtttttttagtttagtcggtaggtgtgtattagggtagttattcgttggttaggtattatgttagttttaaagttcgtttttttttgggaaatttttggaaagtcggacgttttttgtgtttttaatttttatttttcgggcggtttcggttttagtttgtcggaggagggtgtttttgtttaaaggcggattcgagtttttttagttagaaggtcgcgagttttacgtttttttttttttttttgtattttaggtaataaataaggatgtaattaaaattagcgtaagtgtggagtttagcgcgggtcgcgggagattttttttggtcgtttcgggtttcgtagtttttttttttagtaagtcgcggcggtcgcgtatgtggggtcgcgtaagtagggtagcgatcgtagttttgtatcggtggttgttcggcgtgttcgggcgttatttgtcgtcggttgtagggtcgggtttttttttgtgtaaattaagggtttaaggtttgagttttttaattcggttcggcgttgatttgtaaaattttttttggtcggattgcgcgtttagggtttttcgcgtttgttagttttcgttttgcgggtattttttttagtatcgggagcgcgcggttgttcgttttcgtcgcgatcgtggcgttagtttttcgttttttttgtttcgttttgagtatttgttttgcgtttttcgttgtaattttttatttttcgtttggattgcgggtttgggtgcggggtgttgtaggtttgtaggggacggggtagggggtggttgtgttaggttgcgaggggttcgggttatggggttgttaattttgggaggagatgcgtttaagttttttatttggagcgtagaaaggtttggagatgacgaagttttttcgtgggttcggtttagaggtgagggttttttgggtgtttgttgagagtcgtagagtagtatttttcgaagtttttatcggggcgtaggggaggagtatttcgttggggggtttttggagatttcgcggaaaggcgggttggtagtaggtggttagggagttaggtagtagttttagcgttgtttgtttttttaagaaagtatagtgttagttgtaaagggcggggttcggtgatagggtggttttttttaggaagcgattcgggtaggtttttcgtgtttcgggaggtgaggagggtcggttggggcgggattgtcggttggagcgcgtcggggcgggaaagacgtggggaagttaaggaataaggaatttagtttggggttttttgaaggtgtaggagggaggaaggagaggtggattttgtttttttgaagcgttagttacgggaagataagtagtgttggtttgtatgggcggggtagatgtaaggtgggcgtttggttaacgtgatggggacgtggggatatagtttaaagagttggttgtttggcgtttacgtagagttggaagttttatgttattgggtagacgcgggtgaaagggaagtcggatcgtgatggtgggtaaattaggattcgggaagtgttggggtgcgcggatgagggggcgcgacggttagggtggttagaagagtaggtttgggagttgtttagttcggtttttaattttgtttttttgtagatcgtacgcgtttagggtaatgatattttatatcggtttcggttgtttgtcgtgcggttgtaggacgagggcgtgtacgagtgtcgcgtgtcggattatagcgacgacgatacgtaggagtataaggtttaggcgatgttgcgcgtgttttcgcgtttcgcgtcgtttaatatgtaggtcgtcgaggtcgtgttttatatttagagtagcggttcgcgtcgttacggtttagttagcgtcgttaacgttaataacgcgggcgtcgcgagtcgtattattttcgagttcggtcgcggcgataagagttcgtcgttcgggagttttttcgtcgttatcgatttcgtagttttcgaggtcgcggtagtttcggcggtttatacgtttattattatagtcgcggtagttgttgttgtttcgttagcgtcgtcgttatcgggataggcggttttgttgcgttagaggtacggttcgggtaagggatcgcggagagggggcgtacgcgcggggatggcgtagggttagggttgcgtcgggacgtttcggggggtttcggatttaggattcgttttttgggcgtatttgtatatgtatatttttttttagttaggtcgggagcgttttttttagggtttttttttcgcg

SEQ ID NO: 6363 - DNA, 3643 bp, Artificial Sequence
  Description of Artificial Sequence: Synthetic polynucleotide
acggggcgattttgaaaagaggttgatgaaaatcgagttcgttttgtttcggttgggttgggaatagttcgtagggttttgtcgagtgggcgagtgaggcgcgcgagtagggcgttcgtttttttttagtttcggaaaatgattaagttaatcgtgtgggtatgttttattatttattgaatataattttttataacgtttcgtttacgtgttcgagtttgtttttgacgttcgcgttttaatgtttaaggtaaggaaaataaaggtgggggggggattgcggggcgcggcgcggtgcggggggcgcggcgcgggggggcggcggcgggtgggggggtagtttcggcgttcgggaggtggtaaagtgagtttggatttttggcgcggttttttcgttttttttttttttttatttcggcgaggtttgtcgttcggttttttttcgttttatcgcgattaaaaaatacggtttaattaaatattcgtggttgtgacgttggcgagagaagttgttagcgggtggggggtggggggaaagaagaggaaaatcgagtcggcggttgcggtcgggtatcgtatggcgttagagaatttcggcggcgagcgggatttgcgtttgggtcgtcgttttttcgttcgcggtttcgggatcgttattttgaaaaggagtttcgaggtttggcgttcggcgcgcgatcgggatttcgcgtttagtttcggggattcggtcggcgttttttattcgcgagcggttcgcgagttatttttaggtttcgggaaatttttaagagggtttggggggtggggggagtaaaaaggggagggggtaggttggggtcgcggaaatttttgtttaagtgattttttttatttttttttttgtttgggacgggggttcgttttgcgttttttttttggttcgcgtttattgcggggtttcggttttttcgttcgtggagagagggtaatttgtaatttttttttttttttaattaaagttagttgatgtttataatgtgttaaatttgcgggcgtcgagagtcgttgagatttgttattttgtgattgtatcggttttttgtgtttcgggagtttggttaggttgaggtcggagagttggttttagggttgaggtgttagggttcgaattcgcgattttaggaaaggtcgtggcgtttgtaagcgtaggcggcgttcgtagtatttgttttagtcgggtttcggtttgggggtttagtcgggggttaaagaggaaataaataaataaataagtaataggttatggagggaaaagagtcggttagttttaggttggagaaatgaggttaattagagcgaggaagtgcgggcgtgggggttttggaaggtagaggagaggtagggtttgcgcggcgtttgggaagagtgtaatttggggggacgtttttcgtttttttagcgtagatgtatgattggggtaggaatgatttttgttgataagtttttttttgtttgttttaagatattatttttcgaagatgaattgaggaaaatagtcgtaggcgagattcggggtgtattttaggtaaaaaaaaaaaagttagggttgggggagagtttttttttgatgagtaggaaagtgtttagatttcgacgcgtttatttgttgtagttttgtaaataatttaaaatatagatatttttatatagacggatgtatgtgaagtggaggaaggtcgaaacgcggggaagttagggaaaaagaaagaaaaagggttgggtagagagagatttgtgttgtttattttttattttgcggagtgaatttcggtagggttttttttggggataggtggaaagttaagtttttttttttttatttttgtattgtgagtggtttttattgtgtgtttgttggagaatatgtttatcgttttcgagttaggtggaggattggaatgttggggggcggggagcgttggagttgaggacgtagtggttaggggttgggggtcgagaaagagtagggcggggttttagtttcgcgtgcgggtggtagcggcggtcgggttttgtttgttagatattgttatgtttaacgggtgtttcgtcggagacgtgatttgttagtcgttttcgtttttattttagtagaaaatacggtagttgcgaggtgtttcggtttgcggggttcgggtattcggtgcgttttgggggttgggtcgtgtgcgcgggtgggagtcggcggtcggcggggtcggggcgaggggcgagcgggaggggcggagtgagcgagcgcgcggtacggtttttcggttttttttgcgttttttttcggtagtcgtcgtcgtcgtcgtcgtcgttgtgtaatttagtagaaattcgataggggtcgcgtttgttgagcgtattcggcggtcgggtagttcgagcgggtcgtcgggtttggtcggtcggtgtagaggcgcggagggggtcggcggaggggatcggcggggatgggcgcgggaagtacgtttgattagagtacgcgtcgttttttaattttggtgttttcggcgagttgggtagtttcgcgcgttttgattttgacgttttagtttttagttagggtttaggtgaatttggggtggggtgtgcgtgcgtgcgtgtgtatgtgcgtgcgtgtgtgtgtgtggaaggggtggtgagattgggaacgcgttgtttttttttttagtttgatattagtaattggatttttattttaagatcggttttgttttttgttggggttgggagggggggcgatttttttttattatttatatttttgtttattgtttattgagtggaaggtaggcgatttaaagagacgaaagagaggaaaaaggggtgagagacggagagaggaaaaagaggggggcggttagaagagggaaggagaggcgtggggatagggttttcgttttcgtcggggtcgggtttgatggtgaaatagtaaatttacgtacggagggtcgttaggaaagtggatattatcgttttaattaatttcgagatgtttcggcggcgggatttggcgtagtcgtgacgcgtttttataaatttgttcggttcggggttgtttcgagaattcgtatagtagcggcgttagatttatttcgcgttttttagttcggagtttatttgtataattggattttttttttttgtttttttttttttttttgaaatttgtttgaaaatttaagtgaaaatcgcgacgatttgtatatttaaaagtaagtgttaagtaagtgttttgcggtggtttcggcgcgtttcggggtgagcgcgtaaagtcgggagcgaggtgtcgcgagttgcgcgtcgtttcgggtcggtttcgcgtgtgggcggttgggcggttgggcggcgggaggacggttttcgcgggtttcgggattgttcggttggttgttcgtataattttttttttttttttcgtttgttgatttttcgggttaggtgaagtgtttgggttacgcgtgtatttgtggcgagattcgggaggcgattttggggggcgcgcggtcgtagttgggtattttgtttgggtcgggggcgggtagtcggttttagtggtcgtcgttgagggtagagttgcgagcgagcggggtcggttgttggtcgcgtcgcgtcg

SEQ ID NO: 6364 - DNA, 808 bp, Artificial Sequence
  Description of Artificial Sequence: Synthetic polynucleotide
tcgggggagttgcgaggttatttttagtcggcgttcgggcggattgcgagttttcgcgggttcggtcgggggagcggagattggtttttcgttcgggttggggcgtttgtcgttcgcgagtcggaagagcgttttatttacgagtaggtagttttggtagagggttaattgaggattattgttgttggttttaggaggagcgaagcgtttggagatcgggcgcgcgggcgcggttttgggagcgggggaaggtgaggggaaatgggatatgatggtattaataatcgttattaaagacggtgggagtaataaaggaatgcgttttcgagacgtcgtttagtttcggggtgttttttggcgcggtcgcggtgtaggaacgcgagtttcgtcgtcgagtttttcgtcgtttgcgttcgttggcgcggcgttcggcggtagtgttatttcgaggtcgagcgttgttttcgtcggttcgcggttgttagtcggttttgttcgcgttcgggtttcgcgagcggtcgtattttattttacggaggggagataatgagattaattagaggcgtcgttatcgcgtcggagatagttgtcgtcgtatagtaattattcgcgggttgggtgcgcgggggtttttcgttatttgcgcgtttgttgtttttattacgcggtatcgattcgggcgcgttttcggtttttgttcgtagtttatagttatatcgcgtattttatattttttttgcgtttttgttggggagtttattttttttattcgtatagtgcgttgcggttcggggtgtgggaggtttcg

SEQ ID NO: 6365 - DNA, 3415 bp, Artificial Sequence
  Description of Artificial Sequence: Synthetic polynucleotide
tcgaggggatcggttcgtttattcgttcgcgttttttggttcggcggatattaggtagtttttcggcggtcggtcgttcggaggacgcggaagatgtttcggggaatttaggtgatttcgttcgttatttatagaaagagttaggtcggggttgttttttattttttttgtagtcggagagttgaggaggtagggatttggcgcggtttagcgcgtttcgcgagcggttttttaaatgggtgcgagagggaagagggtagagcgcggcggggcgttcggggggcgttcggtattcgaggcgggcgtacgtatttaaataggagagcggcgttcggagttatttagtgcgggtagaagagcggggcgaggagcggggtcgcgttcgttggaggcgcggggcgagtggaggaagaggaggaggagagtagaaggaaggggaagcggttcgtatttgttgcgcgtcggggcgtttgttgtttttttttcggtatgatgttttttcggcgattgttattgtcgtcgtcgtcgtcgttgtcgggttgaggatagggagggagggggcggcgggttcgcgggggggcgaggcgggtttgtttttagtttttttttcggagagcggtcgttcgtaggatgttgttgcgtttaggtttttcgcgtttttttcgcgtcgcgtttcgtcgcgaatttcgaacgtgcggagggaagaaggagggcgggcgagggaggttcggggagggaggagtacgggggggaggaggaggtagaggaggaggaggtggaggaggaggaggaggatcgcgttgtcggcggaatgggaagtttgataaatcgttttagaggttagaggaggagggggcggggaggagcggcggttttgttttttttcgtttcgtttttagacgaggtgcgcggggttcggggttggggggcggggagagggcgggtagagcggtgggaggaggagcgcgggagcggttcggatcggtattgtttcggttttcgtttttaggtcgggggttacggtattcggggggacgcgtagtcgtcgtcgcggttcggggttcggcggtttagttttttgttcgtggcgcggttggagcggcggcgtcggtaataggtaagtttaaaggaaaaggagatgatcgtgttaatcgttcgttcgcgggggcgtcgcgttttcgttttcggttttaggttcgcgtgggattttcgtttcgttagcgaaaggggtgtcgttttttcgttttcgtttcgtgcgtatacgcgggggcgcggcgttagtttcgtcgagttcgtttcggggcgttcgttattttttatttttatttttatttagcgttcgtttttagttattttttagttgttttattcggttcgtatttttttttattcgtcgatttcggagtttttagcgtggttttcgggtcggggttggcgtttttcggggaagttagagtttacgggtaggttttttttagggaggaggcgggcgcgggtcggggcgggtgggggtagtttttagatttcgcgttatttagttttttttttaggattcgtcgtagttattttttttaatttttttttttcggataaatttttttgggttcgtttcgggggtcggtgtgggagggggtttttttaagtttttttttttgattttgggatgattagggtttttttatttcgtttttcgttttcgggagtcgggtcgcgttttttatttacggcgcgggtcgattttagggcgggacgggggcgggagaaggaaatcgggtttttttgtttatttttcgttaggggtttttttcgagagtttagggggtcgtcgcgtcgtgtttcgcgttcggtttgtcggggttgttggattagagggattgattattgattggtgatcggggtcgttgaggtttcgggtcggttcggtcgattggtcgcggtaagaaggagttggttgggcggcgtgggcggcggggcgacgcgggtttatttacgggcggcggtgagggcgcgggtgggtcggagtttatgcgggcgattttcgggcggcggcggttgagcgggagtcggagttcgagcggcgcgggcggcggcgtatcgatgcgttgcgggttcgattgcgtttttttgggttagtttttaggtcgggaatggggcggtcgcgtcggggtcggtttcgggcgttgtcgggcggcggttgttggagcgcgggggcggttttcgggtttattattttcgaggcggttttgcgttcgggcgcgtcggttggggttttggcgttttcgtaggtttcgaggtcgatagtttcggcgagggcgggcgtttcgcgttttagtatcggttgtttgagcgtttttggagtagtaaattttagatttttttttttttttttttttttttttttttttttttttttatttttttttttttttagtttttttttttttttttttttgttttgtgttttttttattttttttttacgattgtttttgtaagtttgttttaaaagtttatagtatgttttttttttttttagatcgggagatagtgattttatttatacggtaagattaaaagttttcgttcgtttagtttgcgggtttgggttgggtttagacgttttttaggatgtagatgcgtcgtcgttggttttttcggttataaagtcgtttttagcgttttttcgcgcgtaggagcgttcggagttgtggggtacggattttaggcggggtagggagttcgaggcgggttgcggcggggttttcgggttggcggattcgggggttgaggcgtcgtgcgcgttgggtgttcgcggtcgtagaggttagaatcgttatttttttaggtcggggagacgcggtcgtggagcgtgaaacgttttttgtaagcgaggaaacggtgagttggtcgatatcgtcggcggttttattattttggtggtcgcgttgagtttttgtcgtttggaggcgggttgcgtcgtacggggttagttttcgtcggtttttagtttattttcgaagtttttatttaggcgcgttcggtgcggcgtgtgtatagcgcggggcgtcgtatacggaagcgtgtagttttttttggtcgcgtttttttttttttttttattttttcgttgtttttgtaaatttttgttttttcggtttttttttattgcgggtcgcggtttgaattcgggttttcgcgtagtcggtcgtcgtcgttgggtcgttgtttggttttttttcgtttaggcgtcgagcgttgtgcgattcgttttaatatttgttcgtttaattattggcgtatttattagtgttaatgggttgtatattgtagcgatagttcgttacgtataatacgggttatgcggagtgtacgtagtaattatattgttatgtcgggatacgtaaaaaggttttcg

SEQ ID NO: 6366 - DNA, 3415 bp, Artificial Sequence; identical to SEQ ID NO: 6365
  Description of Artificial Sequence: Synthetic polynucleotide

SEQ ID NO: 6367 - DNA, 1592 bp, Artificial Sequence
  Description of Artificial Sequence: Synthetic polynucleotide
gcgaagcgatttagcgcgaggattagtttttaattaattcgtttttagttttgggcgttttttttagtagttagatgggggttttagaggtcggtgcgcggttatatggtttcgggttaggtagggggtcgtggggacgtatttgcgttaggcgtatagtatttttgggcgcgggacgggcgaagcgtcgtgggttttaagttgagttgggtcggttttgtagcgtcggagagtaaggcggcgtagggaagggagatggggcgggatgtggggaaagttgtcgattgtttggattttttcggttcggatggcgttagttgtttttagtttagtttgcggaaattcgagttttttttagcggttcgacggttcgggcgtttcgtagattttgggtttttttcgcggtgttttcgtcgttcgtttttgcgttttggttcggtttttacgttttttcgaggtttcggcgtagcgcggtcgtcgttattttttttatattttagaggtcgtagcgtcgttttttttttcgtatttttgttttcgtaaaggagttttttcgtttcgcgcgaggtcgcggcgaggagggggcgcggttcggcgtttgggagtttatattttttcgtcgcgcgcgtcgtcgagtagggcgtcgcgtttttcggttcgcgcgtggtcgtcggaacgatttcggttcggcgtcggtttcgtttcgtttcgcgtttaggggtttcggggcgggtttcgggtttcgggcggacgatgcggcggttcggtcggagcggcggcgggaagcggaggcggaggtgacgcgttagggtcggcgggtcgggttatgtagcgttttagggcgggcgcggacgaggcggttttatttttggtcgggttggttttgcgggagttggagttcgggtgcggttttttcggtcgggggcggcgggggtcgcggtttgggtttggagacgaggcggcgttcgcgttgggtcgtagagggaagggtagcggcggtttcgaggtcggggcggacggattgagtcgcggggagcggggttttcggcgcgcggcggtttcggagtttagcgcgtagtttgcgggtagtttacgggttagtttggcggggttcgacggcggcggcggtggcggtagcgttcgatttagcggtattagtttgggttacgattagcgttacggtagttcgcgtttcggtcgttcggattcgcgtttcggtttcgggtcgttttcggtgggtagcgttcgttttagcgtttttagtttcggttttcggggttcggtcggcgtttacgttgattttttttcgttcggcgtttgtttcgcgttcgttcgtttttcggagtttgcggggtcggtttttttttcgttgtttgtattttcgttgttttttggtcgggagggcggtttaagcgcggtcgagcggcggttggaggcgtttattcgggagttggagcgggcgttcgaggcgcgtacggcgcgggattatttcggtgagttcgttcggttcggtagttttttgcgcgtatggttggggttcggggtttcgagattgtttcgggtaggcggtcggattagcggaggagagtacg

SEQ ID NO: 6368 - DNA, 903 bp, Artificial Sequence
  Description of Artificial Sequence: Synthetic polynucleotide
gcgattttagaattcgttttttatttcgagttcgtttttcgtcgttttttcgtttttgggagggcggttttattaattttcgcgattcgggtcgtttttggcggttttgatttcgttatttcgtttcgcggcgggggtttgggggtgaggggcgcgttttggggtagaggattgcgcggtagggtttgttatagggtagaggttagggtttttcgggaaaaaggtaggcgtatatatgtttttttttttgggaaaagacggggaggggggttttttttgggagattttaggtttcgaaatttttcgttttttatttttcggttttcgtattttttttttttttcgttacgtatttttttttttttttagttatttgttttatttcgtagcgtcgcgataaatacggttttagttcgttttcgtttttgtttagttttttttttaagtttcggggagtgggggagtgagtagacgttttttttttaggaggtcggaatttttgtttttattttttatcggggttcggttggttagaggtaagtttcgagattttttattaattattattatcgttgcgagggtcggtgaggttgtagataacgtttgtaaggacgggagtcggggagggtgtagggcgagtttaaaggacgggtagagtaagtttcgggaagaggtaggggttttttttttcgggtcgtcgtttttcgtattttcggagttagtcgtagttacgtagcgtcgtttgtcgggtatattaaggatttggcgcgtacgtggcgtttatttttattttcgggttcgtttttggttcgcgtttagtttttttagattattcgtaaattgaggatttcggatatagagtgtagagatttcggtaagtttattgaaagttagtcgaattcg

SEQ ID NO: 6369 - DNA, 1592 bp, Artificial Sequence; identical to SEQ ID NO: 6367
  Description of Artificial Sequence: Synthetic polynucleotide

SEQ ID NO: 6370 - DNA, 382 bp, Artificial Sequence
  Description of Artificial Sequence: Synthetic polynucleotide
acggattgttcgtttagtaatatttgattacgttttttattggttatcgttttcggaagttcgttttttcgttttcggaattttcgtaggcgttgggtttgtagatggcgtttaggtatatagtggcgagtgtgatttcgtagttttgggttgtttggttaagcgttcgtcggatatggtacgtcgaagggttatcggcgtggagttttcgtttttagcgttcgcggttgggaaatcggttatcgttacggcgggaattgggattcgggttgcgtttcggtttttttatatcggtttatcgtattcgtgggcgttcgtattggtgttgatataattttttgatttttgattcgtattgtttcgcgattaaaggtaaaaaacg

SEQ ID NO: 6371 - DNA, 665 bp, Artificial Sequence
  Description of Artificial Sequence: Synthetic polynucleotide
gcgtttttacgaaattcgtttacggatacgatttcggggttatatttagttagacgaatgtttggtaaatgatagttattttacgttagatttttatagttttttatacgttatttttattgttttagggaattataagtataggtatcgtttcgttcggcgtttttttttaaagattggggtattaggatcgcgggtttttatttttatttagtataaagagttcggcgtttagagttagcggtttttcgaggatttattattaagttcgcggatataggtttcgattttatatttaacgttgttaaagtggtagagtcggcgcgggttgggatagaggcggtattgaggtcggcgttgtcggtggttgagagcgttataagtttcggttcgttatattaggggcgacgttttttagaggttttcgcggtttattcgggcgggattggttttattgtttgcgcgttttgagaagtagattacggtgttttagggtttatagtttcgcgtaggggagtttagtttaggttttgtacgagcggtttttcgcgagtttagttttgagagattgggagcgtaatttggtgttgagaagaatcgaatcgtttcgttgttttttgcgtcgaattatattttttagaggttttcgcggttttattttttcg

SEQ ID NO: 6372 - DNA, 764 bp, Artificial Sequence
  Description of Artificial Sequence: Synthetic polynucleotide
acgcgttattagcgcgtttttacgtataaattttttttttgcggttaatttgcgatttttaatttttcgttttggttgttaagggaggcgcgtagagcgtttgtgtttgcgtatttttatattagttcgtgtagtgtgacgttgggtttcgtttttgtgatcgggttaggttcggagttgtagggaattcggattttcgggttttttggaaggtcggggagaggttagtgtgggaggatttggtggggaggaggtcgtgttataaattttgcgcggagttgtatcgttgttgttagatattgcgacgtcgcgattttttttatttcggattacgttttttagcggatttcgcgggagttgggtcggcggtttttttgtgtttttcgggggcggaggtagttgaggcgttttttttcgggttcgtaagggttgggttttatttaattaagggtagcggtgagattcgagtgtagatttttcgagttttcggggtaggaaggagattttttattagttttgttttgtaggtcgggagtgggttgaggagtggcgtgtgggttttcggaagttcgtcgtaggttatttgtgtgatttcggtgcgagtggaggttggtatcgtttagtgcgaggttgttatttcgtgtgtttgtttacgttttgtgtgattgggtgcgaggaagttaatggtatcgtggaatgtgaggttgtgagttgaggcgggagcgggcgattgttcgttgtattttgttgggtcgatattcgcg

SEQ ID NO: 6373 - DNA, 1394 bp, Artificial Sequence
  Description of Artificial Sequence: Synthetic polynucleotide
tcgcgtttgggttcgtagtttcgggtacgttgtagtttcgtattcggttgtttacgttcgggattatttattgtgttttttcggaattgtttagcgtgtttttttagattttagatatttattttaaatttaggttttagcgttttgtaggggatttttattttggggcgtttatttttgattttttttttgggttttttcgttacggtcgagtttaagtggttgaagcgcggacgaggatgcgcggggtttcggtttttaattgtattataggtcgtatttacgaatttggttcggtatagttattatcgttcgggtttttaggttttagggttgtagaagtttagtttcgggaaaaaaagtatatcggtttgaggttttataggaattttttttttattttggttcggtttgtaaaatttggtttatttcgcgttttttttttttagaaaagtagcggttatagtggcgttcggtttttagttttagttttattcgatttagaggatagtttagttttgggagttagcggcgttagaatacgggagagcgtttgttttcgtcgcgaatgcgttagcgcgcgggggggcggaggtaagtttcgtagttgtttcgggtcgggaggggcgcgtggggtcgggtttcggcggggatagtcgggtcggggagacggagttagaggggtcgtagtgtttttcgttttaggtttttatttgtaatggtcgtttcgtgattgattagtgttattaaagataatttaggtttgtttttttgtggatattgcggtttaaaatttaaaaaaataatatttcgtttttttattttttatttggttttcggttcggagataggcggaggttgcgagtttcgtttcgtttttagcgacgttttatcggaatttttggaaatcggtttttgtttcgagtgcgtaagcgcgcggggggcgaacgttggggttttttagggagtaagggagaagtgtggggtcgtatttgtcgaggggtcgggaggtttggaggagggtggaggttggttataggatttcgatggggatggagtgtttaaatttaggtttgtagtcgtgattttggcgtgagttggatggaggaaattttagtatcgcgagtttggattaaggcgcggcgcgtgttgtttgtggtgtttgttgagtgacggtcgtcgcgttttcgcgtatttggatcgagtgtttggtcgttggcggagtagtgttttcgtgtacggggttgttgcgtgcgcgtgtgtcgttttttagcgggggattaggatggtgtcgtagagaaggttgcgcggtggtgtttgattttgacgttggttgtagcgggtttttggggtttttgcggtttgtgtttgcgtttgtgacgtatttgatatcg

SEQ ID NO: 6374 - DNA, 949 bp, Artificial Sequence
  Description of Artificial Sequence: Synthetic polynucleotide
acgtcgtgtttcgttattttaaaaaagaaaagttattttcgttaggtttttttttttttttattttcgtgtgtgtttcgaggtcgagatgtagagagtaagaaaaaggagcgaaggggatttttgcgcgttttaagtatttattagcgtttacggtgtgagatgaaggcgtattttttgggcgcgaagtttttaaagtatttgtttagggagatatttttgaagttgttagggttttttttttgtttttttttagattcgggttttgtataaattttggagggttagcgggcgaggcggttatcgtagcggtcgttaacgagtagttgtacggaggtgtagaagaaggaggttattgttatttttttgataagttgggggcgtgggaggtttcgggagttcgaagtcgtttcgagcgggggtgggcggtgagcggattttcgggtgttgattaggtgtttggtggtagagtagggaaggggggaacggacgtcgattttagggattttttattcgtttacgttttttggcgttggttatacgtcgtcgttttagtattaattggaggtttttagtggacgagtagtcgttcgagggtagtcgtttgagtcggtagatagcggttagttggggtagcggttcgaattgttttcgtaatacgttttttagtatttcggtttgcggggtgtttaggagcgcgggcggcgcggcgcggggatttaggacgtcgggcgcggggtttatggtagggtcgaggtcgttgaggtcgggtttttatttgcgtattcggggtcgtacgaggtttgggcgggggcggggcgggggcgggagttggattatttgtaattatttttcggttgcgtattttaatttcggttttttttttggaggttgcgtttaggtatcgcgttgaataagtcgtataggtgtgattcgggagcgttggagcg

SEQ ID NO: 6375 - DNA, 1365 bp, Artificial Sequence
  Description of Artificial Sequence: Synthetic polynucleotide
tcgcgcggttttaggtgaatttggtcgaggtttttgcgttaaggacggcgcgggttagttgaggttaagatcgtaggtattgttttatcgttttttagattatagtttcgtttttgtaaggtttcggggaaacgggtattttttttttagtgagtaaaggagaaagacggagttcggtggttgggtgtttcgtttaggattattagcgagtttagagttttttttacgatcgttttagggtgggtatttttaaaagcggaggaagggagggaatatattttttggtgttgtgtttattttgtttcgtatagagcgggcgtttataggttttgggggtttcgttcggatcgtagtggggagaggtcgttttatgtttcgtttcgttaaatttaagagttttcgtcgagcgttaggaggtttttagataatcggttttgttcgttgttttttgtagaatttttttatttttttcgagtttttttttttgcgttcgttcgggtaacggtcgcgttatgtttagttttaggtcgcgaggtagttcgttattcgttttttcgggttttcgggttcgattttcgcgttttggtcgtttttcggcgtttaggttttttattggttcgaatacgtttcgcgttttcggacgtttcgagttttttttttcggtcgaggttattttggcgaggttcgatttttgcgcgtcggcggttttttagtcgtcgggtttcgtttgcgtttattcggttttttggatcgttgtttttttgtgcgttatcgggggtttgttttgggtttgttcgatatcgtggttgttcgtttatttgagcgtaggtttttattttgtgttagggtcgcgcgtggttttcgtttgcggtttgttgggtttcggcgttataggtattgcggtttcggcgttcgtacgcgggggattgggcgggggttggagagtttaggtcgttattgtcggcgttttagtgtaggagagggtattgagtgtgagaattatatacggttggagtgggaaggggttttgttatcgtttattttgtagttgaagtcgaggatcgcgatagttttgttgaaaaagatttcggcgcgaggtttttttcgtacgttgttgaggtgggagagggtgggtgtgagggcggcgtagcgtttgaatgcggtgggtaggaggttagcgttggggttgtaaggggatttagttttgttttcggttttcgcgttttttgattttttcgtatatttcggggtagcgtttagtgatagagacgttttttaaagcggttttcgattcgaattaatggttttgttttttttttttacggggtagggggaagtggacgtttcgggcggtgttgttgagcg

SEQ ID NO: 6376 - DNA, 2638 bp, Artificial Sequence
  Description of Artificial Sequence: Synthetic polynucleotide
tcgggggtcgcgttggaattttataggaaaaaggcgcggaaagtcgtcgggtatttttcggggttttatagatgtttttagtgttttagttcgtgtattagttcgcgtattcggagggattttaggtagggggagggtttcgcggttagtatgtgcgttcgaggttttttcgtagggggtagtgtcgttcgttcgcgcgtcgatacggtgggagggggtgggaatttgcgcggagttttggaggttttttgggagaaagttaggggatgcggaggggtgggcgtaagatttttaggattttagggaggtcgtggggagggtcgtcgagggtgtagtgtgaggcgtaggagggggttgggggcggtgtacgttgtagggagacgtagtttttggaagatgcgagtgtgaatgtgtgagtgtgagtgcgtgtgtatgtgtgtgtgtgcgcgcgtatcgtagtttttcgggtttcgcgaggcgcgcgggtgttagtttgtagtcggggttttttttttcggtttttttgtttagttcggcggtttttttttttttttttttcgttcgttttttttcggcgggttaggggttgggacgtttcggcggagtaggcggcggcggtggcgagttggggagttttaggttcggcgttgtcggaggggttcgagtcgagtcgtttgcgtttcggtcgggtagcgtcgggttcgtttttcgcggggttacgttttgttaaattttgttgcggcggttagcgtagcgggttcgtaagcgggcgggaggggcgtcgggtcgggtcgggtagggcgcgggcggttaggggtttcgagagcggcggtttcggttcgcggttttattatgttttagttcggcggcgggggcggcggcggcggcggcggtagcgggggaggcggcggttttagcgtcggggcggtcggcggaggggacgatttcggggcgaacgacgagttgatttttttttaggacgaggggggcgaggagtaggagtcgagtagcgatagcgtttcggcgtagcgggatttagacgaggttaagtcgtttttggttaacgagtcggagaattagagtagtagttcggattcggaggtaaggaagtatcgcggttattttcgggggatttcggttttgcgttcgtttattcgtttttgtttttgtgtttttttcgtaggcggagaggcgttcgtagttcgttcgggatattttttagaagtcgcgggattatttcgtcgaaggtatgtgttcgttgggatagttttttattttcgattttcgttgcgtttcgttgtttagttcgggcggtttatcgttttttttgtttgggtggacgtatttttgtttttcgtttttattggcggtagttttcgtggggcgcgcgtggggggcgttggggtttttagttttcgtttcgagttttttgtcgcggcgttgttagtttcgggggtttgggttttatttcgttttggttttgttcgtagtgagaaggttttaggatagcgcgttttttaaaggattttcgtattttgggtatttttttttgatgatttcggatttgagtagttcgtatttttttaacggatttttgtttttcggaggagcgcgtatcgtgagtgttcgtcgggcgcgtcggggagggtgggaggtcgcggttcgtaggatgcgttttcgggtttggttatggagtgggggatggggttttttgcgtcgattttaagtagaatttgtttgcggagttgaattattttttggcggtcgagcgcgaggttgcgttggttagtgtttggatgaaagtaaagttattttaatttttttttttttgcgggttgaggttttggagtttatttttgggattttttttggtttttagaatttttcgtttgtatcgaaggaaatttggatttgtgttcgttttgggggggtttcgtttttttttttggaaatcggttagttttttttggtagtggggtaaggggtttagggagttgggttggcgacgttgtttttcgatttcgggtttattgggcggttgtaggttggtttttaagaaatttagttttcgtggcgggttatttatagttttcgtttttatttttagttttcgtatcggggttttagtttttttgcggagttagtttcgaattttaaattcgcgtagatgatttcgaggcgatttaaggtattttttaagttgaggaatttggtttttttttttttttgtcgtttgttttttttatttaaagcgagcgttgcgatattttaaatttgttaatgggcgcgtattgtgtgttgttcgttggtatttagagcggtgattaagtaaattgatcgggttttagacgacgtgtaaatgagggcggattttttcgttttttttttttggttttaaattttcgtttttcgcgttgcgaggggcgtagttgggggttggcgaggtttttgtgttttttaagtcgttattttatttttaggttttttgtttaggtgttgggttcgatgatagatgttgggtgaacgtttatttattgtgtgttaggttttcgcgtgttgttgtttgggcgcgatgtgaatcgtagtagttttttgtttttcgtttagatttttattgtttgttatttcgttgtcgacg

SEQ ID NO: 6377 - DNA, 1531 bp, Artificial Sequence
  Description of Artificial Sequence: Synthetic polynucleotide
tcgtatatcgatttttgcgtcggtttttgcgattcgcgttcgtttttttcggttgggaagtatttgttagcggtttttatttgggtcgttttcgtcgcggggtatttttttgaagtagtcgttgagcgataggttgtggcggatggagttttgttagtcggttttgttgcgttggtagaaggggaagttatcggcgacgaattggtagatgtggttgagagtgagtttgcgttcgggcgcgttttgaatggttatggcgatgagcgtcgaatacgagtagggcggtcgtattatttttattaggttttcgcggttggttatggatagttagtttagtttttcgggtttcgcgggcgcggcgggcgaggcgggcgcggcgggcgcgggttgcgcgaagggtcgttgagagtagtcgaagtgtcggcggtaggcggtggttgtagaaagggttcggtcgcggtttcggggggcggcggcggcggcggagcgtttaggtacgcggcggcggttgcggcggcggcggagggcgggttttttacgtcgggttcgttgagttataggtaggggttggcggcggcggtcggcggcgcggcgtagtcggttagttcgtaaggcgttttggttgtcgggggggcgttcggggcggcggcggtggcggcgggcgggggtaggtcgggttgcgaatatatttcgaagttgtcgtcgtagtagagggttatgtcggcggtcgtgggcggttgcggcgcggtcgcggcgaggggcgagcggggttggtttcgtcgttcgggcgagagtatttttttgggggttaattttgcggtttcgtttttattcgcgttgggcgttcggtgtttcgggtcggggtcgggcgggtgttagcggagcgtttgttagtcggttttttataatcgagttcggcgcggttttttttgggtcggttcggagcggggcggtggtcgcgggtttgggttttttacgttttcgttacgttttatttgttcgcgcgtttaaattcggagttcgttcgtttcgtttttatcgtttttttgttcgggttcgggagcgtttgggaggtcggcgtttttaggtttcgggtaaaaagtagtattttatttttagtttacgttttttaatattataataagtaaagttacgaatattaaagagaagataattcgaatagtacgaatgatttttaaaaagttaatttggggtggtcgttcgggttatttgtttagttatttttttggtttttttatttttttttttttaattttttgtgatcgagtcgcggaatttacgtttagttttaatcgatcggtttttagtcgaaaataatcgatgtgatttataacgttttggggtatacggtagaggttattaataggttcgtttggcgtgttttttttttttcggggattttgtgattggaggaacggaaattagtgttgagtttttttaattaaattgtaggttcgtttatattcgggaagtatttattcgttttttgtgcggtttgtacgggttttcg

SEQ ID NO: 6378 - DNA, 2045 bp, Artificial Sequence
  Description of Artificial Sequence: Synthetic polynucleotide
gcgaaacggtagaggtcggtagttcgcggtttacgtgtatttgtttagggaatcgttttagcgaaatttgattcggatcggaattttttcgtagtatagcggtcgtgtttatcggaatggaacgttataagttgttatttgtattttttttttagttttgatagggaatacgcgttgtttttacgtttatatcgatattcggatttttatttagttcggttagagttttaggggttagggattagtgtagggagaaggttttttattttagtttttaggatttttaattatagtttattcgtttttattttgttcggttttaggtttagtcgaatttatatgttttcgtagtgtcgagcgttattatttatagtcgttttttaaattgtgatttttatttgggagattcggaattatttaggattttggtgtggggggtagtattttttatatttgtttttcgaaaattgttatggagtagtcgcgtttcggcgggtaggtgagggggtcgagtttattagcgtcgtagtttcgttgtttattttttttagcgtcggttgtcgttttcgggtagatatcgtcggttttgattttggggttgatatcgttaaagggtagttagtgttcgtttaggttatttcgggaggtttaggggtacggcgaggggtcggggaaaggcgatcgtttattatagttcgcgcgtttagattgagggaggagtcgggttgtagaatcggcggcggatggagacgggagggaggttgcgaggtcgttcgaggagagattaaggttttagaaacggagaagcgggcgttttgcgggaggcggcggcgttgtcgttggtcgttaagggcgggaagtgttttgggatttttattaggggtcgcgagtttcgagcgttaaattttcgcggcgttcgtttagcgcgttgttgtggcgggcgcggagggcgcgcgtcggtagtgggggttgcggcggcggagggtacgggttttcgtttagcgtttttatttttttggtgtagttgtttttcgcgagtcgagatatttttgttagggaagaggagcgtttcggttgtttttttagagttttttgttggggggatatcgtttttatgaagaaaatttttaaataaattttagtttaggaggaggttatacgattatgttcgcgggttgtcggtcggaggggcgaggacgcgcgggcggaggcgcggttgtcgtgtttaggtagggagtcgagtttcgggtgttcgtcgcgcgtttttcgtcggggttatgtattttcgtttgcgttcgatatcgcgggttggaggcgagtgtagcggcgatagttcgttagcgtcgcggttcgtttcgtttcgggttcgtttttttcgtttcgggcgttttgcgtcggggttcgttttcgtagttttttttagtttttttttagtttgggtttttttagtttcgttttagtttgtggcgcgtttggcgggcgtttttttatatatgttagtatatcggttatcggttgattttttcggtttgtgatttcgcgtgggtgtagttcgtaggagtttatcggtttgtgttacgtacgggggtttttagtgtacggatacgcgtttttttcgttatttgtttatttttattagattttattttttttcgcgtcgtgttcgcggcggaaggcgtttttgtagcgcgtgtattcgcggagcggtggcgattttagtttgagtagaggagttgtagtgatttttgtttcgtttttagcggattgcggagggaattttttattttattttattggggatagggtggtacgtcgtagagtgtcgtagttgtataaatttggaagtttatagtatcgtttgattttttgtgtaatttcgaacgttagtttgttcgggtaattttgagtgggtttttgtagtcggttatgttagcggtttttgtatatttgtattcgcggttttcgttgtttgtaggttgtagagacgggggtattttaaacgtgaaagagtaatgaaggaaaatgtagatagagcgaggacgtcg

SEQ ID NO: 6379 - DNA, 476 bp, Artificial Sequence
  Description of Artificial Sequence: Synthetic polynucleotide
tcggttcgcgcgggaggagtgtgatttaggtgtcgttttttttcgtcgtcgagggttaggagttcgggagcgcgattttttttcggttcggtttggttcggtttggttagttttcgcggtttttgttcgggttgacgtttaggaatgtggtcgacgagaagttttaatagtacggcgtggttttttagtttcggtgagtattcgtcgtggggaagggttttggggatttattggaggtcgcggttcgtagtagttaggggtcgagttacggttacggacgttttggtgtttcggttcgtgtcgggtttttaggcggaggaggcgttcgttgggtttagattttcgattttagtttcggtttttcggcgtttgggttgcgcggagtttttgtttcgcgtttcggatttttacgcgtagtttttacgcgtttcgagttggagaagtcgttagttcgtttttttagggcgtgtcgttcg

SEQ ID NO: 6380 - DNA, 455 bp, Artificial Sequence
  Description of Artificial Sequence: Synthetic polynucleotide
acgcgggcggcgttcggggtttgcgggtaggtaggcggtttggtcgcggaggttttttcgagttttgcgtttttttagagagggaggggtttatatcggttggtatagttattacgggtatcgaaatttggggacgtgttcgattatgtttttttcggtggttcgggggttatttcgtattgtttagaagtttcgtttttcgttttttttttttggtttagtttattattttttcggtgattttgggtatgttacgtttattttttaggttttagtttttttatttgtgttgtgaggagtggaaggaacgggatgattaggagttttttaagatcgagtattcgaggtttttttcggtttcgcggagttaggaggtgttagtcgagatgcgcgtgtcgcgcgcgttttttagtgttcggttttcgtttttgtacggttttcgttgggtaagggcg

SEQ ID NO: 6381 - DNA, 749 bp, Artificial Sequence
  Description of Artificial Sequence: Synthetic polynucleotide
tcgggcggcgcgtttaggtgtaggttcgttttgcggaggagggcgggggtcgggtaagtagagggcgtttagttcgggggcgtcggtttgggttgggcgtttagagtttatttcggcgcgcgggtcgcgggcgcgtggggtagtggtttttttagtcgggaagttgttgtttacgtttcggtggttgttgcggtttcgttagggttgtatcggggtttcgcgtagacgttttttcgcgatttgttgtagtttaggcggtggcggtggcggtagtagcggcggcggtggaggtggcgcgggcgatagttcggttcggcgcggtttttgaattgtttaatttttgttcgcgtcgggtttaagcgttcggtcgttgttttcgcgttgagcgtttgcgtatcgggtttcgtttaggtgaggggcgtgtgttcggagttcgttgggcgtgttcggttcggttcggtttcgtcgtacgttcgtttttttggtttggttgaggatttcggggtttggacgtgttaacgttattttcgcgcgtcgaagttgtgacggtttattaagtagagatttgcgaggtatatagagagggaatgaggcggaatcgttcgggggttcgttgatattgtagagtttttcgtagtatcgttgttttaaatttcgtttttttaggcgtgcgcgtatagcgagttagaggaggtttcgtttcgatttggggtttttcgcggtttttagttcgggggttcgggttttcg

SEQ ID NO: 6382 - DNA, 1134 bp, Artificial Sequence
  Description of Artificial Sequence: Synthetic polynucleotide
tcgaaaaatacgttttaggcgtcgggattttagatatttgggaaatagagtgtacgtagttgttgagaggtttcgcgtttggttttttttattattgaggcgtagaggtgttgtggatagtttagatttatacggcgttcgaggtgaaatagaatttttagtttttttatgaggttattggtattttcggttgtttttagagtttttcgatttagagttgaatgtaaagtaagcgttcgaaatgtagaagtagtcggggtcgtttacggtatttgtttcgttcggggcgagagaagacgttaggttgaggttttagcgattttaggtattagtttcgaaggagggcggggagatcgtaaaggggaagtgttcggagggttaacggttttcgcgtattttgcgtttttttgaagcgcgtcgttttttcgcgtcggggattgggatttgtttttggggaattcgtttagaagacggcggcggattggggtcgggtattttttagggttgttaggttttttttagttttgtatttgtcgcgtcgttttatttcgttaggaagttttagagatttcggggatggggtgggagcgtttttttatcgcgggtttaaaaagaaggaaggacgtttttaggggtcgtagaaggaggattagttttaagttataatttttttcggatttaaggtaggtcggttggggtttcgcgtttatacggtttttggcgggggttcgcgcgtttcgggagtttcgcggttcggggaggaaagaggagataagagataggcgaggattacggggttgatttagtcggggtagggattatcgtggaaaaattttggcgaggtggggggacgcggaaagagagcggttcgcgttttgtattttgcgtcgggtatttcgcgttagtgtttcgtttttagtgtttcgcgtttcgcgtttcgcgttttgtttttatttcgggttagttgtatcgcgttcgcgtcgtaggaatcgtggagttggaaagtgggggcgtcgcggttggggggttgttttagttgcgtttcggttagcgatcggcgggtcgggtttaaatttagttaggttgggtaggcggtggtcgcgcgattggggatcgggcgtttcgtttttttcg

SEQ ID NO: 6383 - DNA, 1645 bp, Artificial Sequence
  Description of Artificial Sequence: Synthetic polynucleotide
tcgcgtatcgaattcgagttaggtttggttttagggtagatttaattatttatttcgatcgagttttcgaggtcggcgttttagtttttatgtttatttttcggagacgtttcgtggagattttggcgtttaaaattgcgggagtttatttattgcgtttaggtggttagtttttgagttttttttattcgtggttttttgtcggtatgtaggtatgtataagtatatcgtcgagtaggaggatttaacgaatttagtttgtggatatgttttaatttttattttcgttttttttaggtttgtttaggtgaggatgatgggagggaaaagcggtgtatagtcgtaatattggtattttgtaagagtcgtcggggtattgatatagagggatatcgtattggagatgcggtgtttacggagatttattgcgcgcggtgaaatattttaagtatcgcgcggaataattgggtttagtttttttatttcggattttttttaggattatacgttattttttattttcgaatttaggggtttttttacgttgcgtttatttgttttgtttcgtaatgattattttagtttggtggcggtggaatttgagttatagaggtcggttgtataggtagacgtgggtacggaagttagaatttggaatttttaggttttttagtttttcgtaagatttcgtcgttgcggttttagggtacggttcgtagagcggagttttttggttgtattgataggtgttcgggtcgtcgttttcgtcgttgttatcgttcgcgttattgttcgtatcggtttttgggtcgaattgcgttttttcgggtgggtatatagtcgcggggaagtcgtcggggggtagtatggagtcgtaggggtagcgcgtttcgttaggagtcgggtatataggttcgtggggcgttttagtcgtcgtttggtacgggaagagtgagtagggcgtagttagtttcgatttttgaggatcgggggattggaggtagtatcgttcggagtttaggttgtttatggagtagcgtgtagtggtcgtagtcgcggcggcggcggcggcggcggttgtagcggcggagggtagtttttttttttcgtagggggagtttttgcggtcgttcgggggtttcggtttggttattgtcgtagcgttggtaaatgcgttttcggcgtcggtgttattaagtatggtcgcgggggtttttgcgttggcggttgcgggtttttcgtttatcgtttcgtaggagagattgtcggaaaattttttggacgttttgtttaagtttaatttttgaggagagggggtcgcgttggggaggtggttagcgttttcgtcgttgtcgtttcgcgtattttttagcgggtagaagtgcgcgttaggtaggtttattgagtttattaagagttgtttttttaattgtatgttttgtaaagcgtagacggtagttggttgttttttttttttcggtggttttattataaaggtaggatgggggagttagcgttttttttcgaggggaaggtaattttttttttttttcgcgtcggggttatttatttgtcgattcgcgggtcgttattgcgcgtattggcgcgttttgaatttagcgtttttttcggaaggaaagcgtcg

SEQ ID NO: 6384 - DNA, 4698 bp, Artificial Sequence
  Description of Artificial Sequence: Synthetic polynucleotide
gcgtttcgggaacgttttttcgttgtattttataggaggtcgtgggcggtggtttaatagttttagtgtagagtttgaattttatcgtttagaaggaaaggtgagtgggggattcgggcgggaggtgaggtttgtcggtagcggtttttaggcgtgttgggtagtacggttagtagaggcggcgtttggttttggatgttgtagcggagacgttaaggagattgaatgtagggagcgaggcgtagcggtcgcggagggtggggtcgttcggaaatttaggcggcgttagttttgtagtatttgtaggtcgggggcgcgtatacgaggggtacgtgggtgtggaggaatcggcgcggcggggttttttttttgtagcgtcgcggcggtcgagtgttcgtgttggaggaacggcgagtggggtgtttgtttcgcgtaggcggtattcgtcgttttagtttcgtatatagtaggtacggttagggatcgggatcgtggtttagcgtttggaggcgttttttacgcgtatttttttcgatgtcggggcgggaagtcgagtggttttgttcggagatgttaggggatgtgggtaggggacgaagaggttttttaattggttaaattttggtttgaggaaagattgaggtggttattgattcgtgggagcgttttggggtttcgagggaacggtagtcgagttcgggagattggtgttgggtattcgcgggggtcggcgggttttacgtgggtggatttcgagttgagggtagggtagggtcgcggatcgttgatttatgagtttttttattttcgtataaggatatttgtatatggattcgggtttttattcgtttttggttgggttggcgtcgggagcgcgtaggggagggacggcggcggagtgcggggtttggcgggtgaggtgggtgaggtgtggtcgcgggggagggggcgaaggtattagaaggttgcggtcgcgttgtcgttgttgtttttatcgtcggcgcggggcgcggagggggcgaagaggtgtttgttagtcgtattgcggtttaggggtgaaaggaaaagggtttatgtaaaggagaaagggtaggtagagatttttgttggtgttagtaggtacggaaggatgtggtcgcggggatttggagtttagagggtaacgttgggtgttataatgtcggagatgatttcgggtgtagaggcgattttagttgggtagagttatagagaacgtggttcgagaaggggagtttttttaaattagatatattttgtgttgttttaaatttagtatttatttttttttatttcgtttttataatttttagggttttagcggagttatttaagcgtttagtattattagttttattttaggtaaaaattaagattaattttgtattttattaattttttcgtatttaagttattacggggtagttttttatagttttaaggcgtggttattttaagtttatagcgagttgttcgtgttttcggtttttgtttcgtaaatttcggacgatgttatcggaggacgttgaaggtaaaggttggtggggttaggcgtcggcgagattgtcgcgttagtatagttttcgcgggagtcgagtgttgacgggtttcgcgattttttttcgagggtaaacggttcggttttttagggatatttggttagtgttattttttttttatcgggtgtcgcgtatttttttaatagaacgtgatttcgtagacggatgaattcggaatcggtaaaattcgtttgtttttgtttagtttttttgttttattatattattgttttttattgcggattgcgtcgtgtgcgtttcgggatcgtttttgtatttttgtttatagttttttattattaaggtagtcggaggaagattttttcgagttatttgttttacgttagtagttatatcgaggcggtttttttcgtattattttttaagtgtagagtttttgaaagttcgaggtttttgtgttacgtatttttttttttgcggggcgatttcgcgtatgcgtgtgtgtgttacgcgtttaatcgtatagagtaatttttagacgtgtaagataaagtattttaagtaaagatggtttagagtttaaattggaaagtatatttcgaggcgttgaatttgttttcgtcgtttgtttcggtttttggggcgtcgtatttaggagaagggttttaattttttgttagattcgttcggaattagtttttttggcggtgtagtaataagtggtttcgtcgttttttttgtgtattcggagggattatatttttttttttttttagtttttagtttaaacgggagtaggtaatggcggggaaagggggaggtgacgagagcggggagaaggaagtatatattttttaattgtgaaattgtttgtttgcgtgttgtgttttgggatttttttgttttaattaattttaattttaacgtggtcgtaacgttaagattaagatttagaaatgaaaacgtatttattttttttattataaaggtcgtttgttgttgttgtttttttaaaatattaagtaattttttttttttttttttacggatttatattttgtttatgagatttttttaattttggtggtttggagaaatgaggtgggggaggggaggattaagggtagtaagacgtttattacgaaaataagatatttattaatttaatagggtcgtttttttttatataagatgtttttttattttttattaatttataataggtaaattttgagtttttttaaagtttcgttatttagcgtttatgttcgaagttttacgaataaattttttttttaggtaaatttgtttaatttttgttttatgtttagcgaagtttaggtacgatgggttaaggatttttggtttttatattgtttgagttacgttttagttggaaaggttattttgggcgagggacgtgttgttcgattggtttaaataaggaaagaaagtggagtattaaagaattaagggtttttgtttttttttatttcgttattattattatcggttttcgggttttgttgagcgttgcggcggttttggttgaaaattgcgttttcgtttaaatcgagcgtaaaatttttttggatagaagtttgaaagaatttagtgtagaaatagattttttcgtttaatttggttttaattagtaattatataagtatatttatataattatttaagtggagagtagacgtttagatttacggtttttacgtgttgttggagttggcgtagacgcgtgtgcgggtatagcggcggacgtgatatcgtatttttttcgaatttttgttatttagggtggtgtcgttttaagagggggtcgtggggaggtggggtaataggttgcgtaatttatttgttttgggggagtttagggtttagagtagagcgtaatttcggggggttgtcgtatagttttatttttttatattagaagagtaatgttttttatggatgattaatagtcgggttttttttgattatgcggcgcgtttttgtcggtattatttagttgttttaatttgatttttattagtaacgtgtttttagaggttgcgagttggattcgtattacgataacggttttttttttttttattcggtcggttttttgggaaggatcggggattgtagttttcgcgacgttttttttttttgcgtagggagtaggtttgagtttttttacgtaatgatttgggagattttaggtatttcggggtttggtcggagggttttcgggttttggagttgggcggtgtttgtagtgtatcgtcgtgagtttttttcgggtataatgtgttggtgtgtagagaggaggaaaggaaaaaaaaaaaatttaatattatttttaagtggtattggtatttatgaagtggtagtggtttatattgagcgtgtttttgtttggaggtgtagggggcggttattgtagtcgaggggagggtattgcggttaagggtagggcgagaggatagttaaggtcggttggtcgcgtgggagtttttttttttcgggtttagcggtcggaattattagtattgcggttaaaggggttggtaggtttttttgtatttcgcgtgttttttcgttttttttgtgtttttcggtttttttaggaggaagatggggtgtttatcgcgaatggggcgcgtcgggtcgtttggtcgggcggttacgtgttttttttttttcgttattgcggcgggagttttaattagagcgcgttagggggtttttttcgggtaggaattattcggttcggcggcggagggtgggtcgtcgttatttgatcgttcgttttcgtttttcgcgagtaaggggcggtggtagcgtttgttcggttataaatggtttttttcgttcggttcgttcgttcgttcgggttcggcgcggattcgtttgggcgtgtttttttcgtcggttttaggcgttttatcgttttgttcggcgttagttcgcggttttagttatttttgagggcgcgtcgggtatttagcgcgtaggttcgtttacggaggtcgatacggaagtttggatcgtcgaggcgtgtggttcgtttatcggtaggtgagcgtgtatcgcgggcgtgggatgttgtggggatagtgcgggggacgtgtggggttttcggatgcgaacgcgagttcgtgcg

SEQ ID NO: 6385 - DNA, 462 bp, Artificial Sequence
  Description of Artificial Sequence: Synthetic polynucleotide
tcgttgggattttgtgcgcggggtacgttagcgattataaacgtgttttaattttgttgagttaaagttttggtgttaggcgttgttttttttttgttcgttcgagtttcgtattttttggtttttttttagttggtgttgtgtttagttttttttgggtaatttatttaggaattcgttgcggttatttttcgttttttttttaatttgggtcgagtaataagtggagttagaattaattttatgggcgagaggagtacggaggcgagtggagcgcgttgtcgttagaggttgttaaggaggcggggtggttagcgcggggggtggaggatgggggtaggacgcgggagggaagggtagggggtggggggcgaggtttcggggattagcgcgcgagagtgtttagttgggaaatgtagtttcgaattaatatcgtatgttttataattagtttacgagtcg

SEQ ID NO: 6386 - DNA, 300 bp, Artificial Sequence
  Description of Artificial Sequence: Synthetic polynucleotide
tcgaattggtttgttcgtggcgggtttgtttaaagtataggggttttcgttttcggtgcgcgttgtttttaggattagtgttgttgggagataaagagttttagatattcgaggttgggagcgtcggagagtttttaggtttcgggtattttttcggagtacgtaagtatagttttaggtttttagggatagatgggttagagtcgtttgtatttgttcgtattttttgggaggttgcgatgatcgtagttagggtggtcgagcgttcggtttattgtattcggcggttgttttgtagcg

SEQ ID NO: 6387 - DNA, 554 bp, Artificial Sequence
  Description of Artificial Sequence: Synthetic polynucleotide
tcgagatatttcgggcgcgagcggtagtgttgtttgtttgtttttttttttttttagtttttttttttcgtgatttatttattttttgtagttttcgttcgtattttttttaatatttcggtatttttgtattatttgttcgggtagtttcggcgggttttgggatttgttgtgcgcgtcgagaggaaggtaagttttaaatttttgtttggaagacgggttgtcgcggttgtattattagtaggaggaggaggagaagaaattatttcgcgatattttattttgcgggtgttttgtcgttgtcgtttttgttgtcgtcgattcgagttcgcgggttcgaatatcgtagcggtggggacggtgggttcggcgggcgtcgggaggaggatattagcggagttttgtattttcgtgtttcgtttattagtatttatttgttttttcgttttttttttagttttttagagaagggattatgatttggaaacgtagcgtcgtttttcgtttttatagtgtttgcgggtttttgttataaggtaattttcgtttcggcg

SEQ ID NO: 6388 - DNA, 1153 bp, Artificial Sequence
  Description of Artificial Sequence: Synthetic polynucleotide
tcgtttttttcgtagagatcgttagttgaggttgtaatatttgtttcggtaaagcgttttcgtagttttttcggtttgttcgattcggtttttttcgtttttgtttcggttgcggtattattttttggagttacgtttcggcgagcgggggtcgcggagcgagggggtcgttgtgtcgttatttattcgagtcgttcgggttggtcgcgagtcgggattcgcgagggttggcgggttttggttttcgaggacgtagatatgtggtttgaattttcgtttttttagtcgttgtttttgtgtatttttttgggcgtttttagcgaatgcgagcggcgaggcgagggcgagcgcgtcgaggaagggcgggagaggcgcggagtttggtcgcgtcgcgttgcgtcgagcgtcgggtttttttcgcgagtttttcgggttcgcgcgcgcgttttttattgttttcgtttttcgcgcggcgcgtgttttttatttttcgtcgcgcgttttcgtattcgttcggttttacgcggcgcgcgtttgttttggcggtagcggcggcggcggcggcgcgttttttttcgaacgtcgtttttagggttgttggttgcgttttttattgtttcgcggttgttgttcggggtgggcggcgaggcgggggggaggtgtcggtttggtcgtcggggagggtttatcgttcgggcggatttttattgcgagagcgatgcgggtttaggcgcggcgcgcgggggttgtagggcgtttagtattgggggttgtcggcgcgcgggggtttttttttggtttttaggtattcgttgttgttgggcgtttttcgtattttcggttattatggatatttcgttttttcgtcgtttttttcgcgtatttcgggaggtcgtcggggcggtagtagcggcgcggtttcgcgggtgtttaggtgatcggttcggtagcggtagagtagtggtagtagtcgttattgtcgttgttattgcggtcgtcgtcgttggagagaggaggacgaggagggtaaggggtagaagtaggttttgttttgtttgttttagaggttatttcgggtttttttttattaattaagcgatttcgtgtttatttcgtaggagacgtttcggtagtttttaatttgtgtgcgtcg

SEQ ID NO: 6389 - DNA, 1603 bp, Artificial Sequence
  Description of Artificial Sequence: Synthetic polynucleotide
gcgatacggtttttttgacgcgtttttaattaaggcgttaagtttagtttgatagtattttttttttttttcggtttttggtttgatgagtcgtttttatttgcgagcggtgtaggtatttttgttgtcgattaattttttttagcgtcgaattggcggtattcgagtcgcggttgttaggtcgggagaaggttgggtttggtcgggttttgtagcgtttcgggtttcgtttttgttttgggcgttcgttttcgtcgcggggcgaggtggtggagatcgcggacgtcgagggtttttttagttagtacgtcgcgttgtttcggttttggggcgggggtcgcggagttttattaagtggttcgcgtttcggttttcgggagattcgagcgcggggagggagtgggtgtcgcgagggggcggttcgcgcggggagagtcgttagtttacggcgtttttgcgttgttgtggatgtggttacgcgttattcggtttttggattgttaggagagcgcggttcgacgttattacgtcgtggacgttcggggatttttgaattttagcgttaaggttgcgacgatgttcgtgatttttatcgcgaagttattttcgtaaggcgacgtaaggatttcggcgatttcgggcgtcgtatattcgttattttttagttttatgtaattttttttttgttgttttttttcggcgttttgtttttttataattggaagtcgcgaaggcggttattgcgttgagtcgttcgttttgttggttaagtttgggcgattcgcgcggaggagggtcgggttgattgtcgtcgttgagttgttttcggacgggagcgtttgtttacggtatttattttttttagcggtggaaatgtggagaagtaagtgggaggcggtgtcgggaattgattttttttaaaacggtcggcgtcgttgttttgaaatgggcggttaagtgtttgtgggattaagggcggttttagagatgttcggaaaatcgttgttacggttagagtgcggcgtagacgcggtagagttggaggtgttcgcggtgtaggttgttgtttacgtcgtttaggttaggtgttgagggtttagttcgcgtttcggtcgaattatttttagtttcgttgagttatttcgttcgttcggtttttatcgtatcggttagaggaaagttttcgcggtttttacgtttttttatagttgtagcgttttttttgtttttggtttcgtaagtgtttatttgagtcgggagaggttttcgggtcgttttaattgttcgttttatttggtagttcgttttcgttttcgttttcgcggtgaggcgtttttcgttttttcgttttttttttttaaattatagttcgagttcgtttttgcgcgcgcgcgtttttttcggtttaagtgaatagttttcgcgtaagcgggatattgtggtggatgtaatttttttcgtttttagtcgcgaggagtttttcggcgtcgtaggtagcgttttttttcgaagtagttgtatttgtaattgggtagtttggattttcgtgttttgttttcgggatttcgcgtagggggcgtttcgggatattttttgcgggtcg

SEQ ID NO: 6390 - DNA, 1411 bp, Artificial Sequence
  Description of Artificial Sequence: Synthetic polynucleotide
acgattagcgttttcggtgcgaggatggaaagaaattttagaaaaattttcgttagataattcggtagtatttggtttcggaatagagaggagagaaagatttgatcgtcgtatttagggttattcgtcgtattaagtttgagggttttttttgtttttaggtttttgtcgttcgagtttaggtttttttaggtgttttagggtcgggttgtattcgagtttcgaggaggttttgttagcgttagcgcggcggtgataatcgagggaggtgggtgagaggtgcggttgtcgaggtaaacgtagagtattcgtttagttttttaagggtcgagagtcgggagtttcgaacgtcgtttaagtagttttttgtttttcgtagttcgtttatatttttgcgggatttttggacgtttcgttcggggatttagggaggagggagagaggagggagggagtgggtagtttgggcgtacgttatcggttttcgtacgttcggtatttttcgtggcgcggcgagttaatgggatttgtatattcgaggtgtaatagtattattgtattaattattatttttattttacgtttagattgtttatttatttgcgggaaatatatgtcgggagaagtttatatttcggattttgtttcgttgtttaaggtgtaatttcggggaggcggcgaggggggaggggagggttttagattttttattatattttttagttttatttgtcgttgtaaattatgaggattttttattgagcggtatatggagattatatatttttttgaatatcgttttttaaagtttgtagatttttattttgaaatgaaataatttttcgttggttttttcggggataggcgttttttgcgttttttcgcgcggtttgggggatttttttcgtagagtaggcgcgtattttaatgtcgtggtcggcgtttagtggagattttttttatagggtttagaataatttttcgcggaatatttatttatatgtagtgtttgagaattaaggtagtttttttgttttgtttttttgcgtttagttttcggatttttgtgtcgtttgtagtttttttttatttcgaatattcgtatagacgcgagtttatttttgttttttttttacgttgggcggttttaaattcgtcgcgagggttgaggtgtttatatttgtttacggtagtttgtttcgtttttaagcgttttaaagttttttaagcgtttatattggttttgggatagtcgattttggtttttttgtttgtttgagggatcgcggaagtggcggggaatgtgttttcgtttgagatcgtttattgtgagtttttaacggaaattttgtacggaaggtaatcgttttttcgttcgcggtaagtaggatttattcgagtagcggggatcg

SEQ ID NO: 6391 - DNA, 2629 bp, Artificial Sequence
  Description of Artificial Sequence: Synthetic polynucleotide
tcgtcggggttcggaggtgttcgaagcgacgggattgatagcggaggaaacgtagttttttttcgcgttcgttcgcggtgtaaatcgagtataggtcgtggagttaggttgtttcggttttcgttgggttttaattttcgtttcgtttagtgggtttcgcggtaagcggtttttgaatagttttaagagggttcgcggagtaaatatacgtattggttcgtttttttttcgggtagcgcggtttcgttattagttttgttcggcgcgtttagttatggattgtacggtagtcgggcggggaacgcggagagcgagcgtatcgatttgtgagagaaggttaagaggtttgcgttgtcgacgttcggtcgtattttcgtttcgggtttttttcgcggtgaatttgggtaggagacgttggggtttcggaaagagacgagtttagtagaaagcgcgtagagaggtagttttaggttaggggagtgtaaggttatagaggttagggaggtgagtataggaggatataaattgaggggataaagaggagcgataggagtttaggaaagcgaaaaagtatagagggattttgggcgttggttttagaggcgggtttagagggtgtgaggttaggttggcggcggcgtcgtcggttgcgatcggggtcggcgtcgcgcgtttttgtattttcgtattcgtttgtatcggtatgcggtgggtttttagagatcgaggcgcgaatgtagcgcgtcggttttgttgtcgtggttttagtaagagtaatgtattatggcgagttcgggttgtcgggtataagcgaattgtaggttcggcgtattggtgggcgcgggcgtcgggggcgcggcggtggttgggttggtagggttgagttggttcggcggcggcgcggcggtttcgtggtgcggtggggtaggcggcggtgcggcggtcgcgtgtagatggtgtgcgtgcggatgcgggtgggggtgcggcggaggcgggggtgcggtcggcgggttttttaggttattgtacgagtttattacgtcggggggtagcgttatgttttgtacgcgtgtgtacggttcgtacgaggcggtcgggttcgttagttttttgattatagcggtcgcgttagggttatcggggttcgcggttgtagtcgtagttgttgtagtcgttgcggttgtcgttatttggtaggaggtatagggtatgggtgagggaggttgcggtagcggttacgagttgttgaggaagttagattgtaggtatttggggggcgttaggtagtcgtagtcgtcggtttcggcgttcgttacgtcgtattcgtttgcggcgttttcggtttcgaagagttttttgtcgggttggaagtgcgcgggcggcggtcggaagggtttttttatgcggcggcggcgtcggtagttgtttttttcgaatatgttttcgtaggtcgggtttagcgtttagtagttgtttttgcgttcgtcgtcgttttcgcgcggtattttgatgaagtattcgttgaggttgaggttgtggcggatgttattttgttagttttttttatttttttcgtagaacgggaatttcgcgatgatgtattggtagatgtcggatagcgtgagtttttttttcgcgttttcgcggatcgttatggcgatgagcgttacgtacgagtacgggggtttttgcgtcgggttcggttttttcggggttgtttcgtcgttatttttatcgtttttgtttgggttcggcggcggtttttttggttttttgattgtgcgatcggtttttggggttagtagggttttcgtcgcgttttcgggttcggggtagttggttattatgataaagtcggcgcgtcgcggtcgggtcgtttttgtttttcgttttaggcgttggcgcggtaaagagttggggcgtacgagttcgtttacggttaagttttaaatttttggagattgcggatgtcgttcgcgtttgtttgttggaggtttgtcgttgttttttttttttttttttttttttttagggagcggtcggcgggagtggagtttagtttttggttatggggagttcgtttaatagagaggggtttcggtttcgtcgttttttttcgtttaggttagttttcgttttggtgggtttttttttttgcgtttttttttttttttcgtttttcggtttttcgaagtacgattcgcgtttttggcggagttgttttttggagtttttagtgcgttaggagtttcgttttgttttgattcgtatgggttttatcgagtttcgtttgcgttaggcgttttcgtttttatagcggggcggttagtcgcgtacgggcgagtttatttttaagttattttttgtaaacgtttcgtatagtttggatcggtttgttttcgtttagcgagttttaggggtttagtcgatagttaggtttacgcgtttttgaaatttgtcggtattcgttttgcgggttgggttgggagatgacgaggatttcggtggggtttgttcgtattcggttaaagtttaggaagttcgggttttagcgaggaaaggcgttttaagttttttcgcggtttttaggtgaaagaaaacgatttttttgttttgtcgtttgttgtcg

SEQ ID NO: 6392 - DNA, 1686 bp, Artificial Sequence
  Description of Artificial Sequence: Synthetic polynucleotide
tcgcggttgtttttgtttttcggagatgacgcggagttttgttattgttatttaggtttaaggttatttattttgttcgataatttttagtattattaggcgttgttttagtgtgcgtttggcgttttttttagattagtcgacgtagaacgtttagagatttagttaagggtaagatttttagcgacgttcgttagtttttttcgtttagatattagtttaaagggtatggtaggttagggtttttcgcgttattttagatgatttttaggtttcgggtggttattttttgggggagttttttattttttgcggtagttttttcgagagtcggagtggaggcgcggggttggagggtttttcggagtcgtttattagggttttttgggggttcggtttcgattgggtagggggatttggatagggtttcggagcgtggagacggttgaggaaagttgggggtcggggttttggggcggggagcgcggaattcggcgtcgatgttcgcgtttatgaatatgtacgagttattttttttttttcgtgacgttacgggtcgtttcggggtgagcgtttgagtcgtttcgggttcgcgttagtgagcgcggttgttgtcggcgagttagcggcgtagcggcgggaattcgaggtcgagcgtcgcggcggtagcgttagaagcgtatttatcgggtacggcgaggcggtttacggtgcggtaggtatcgggaggcgagagtcggcgcggatagtaggcggcggttgtagttcgttggcggttgttgcgaggatgttgtttgggcggttgtgttgggtgtcgtttttgttggcgttgggcgtggggagcggtagcggcggtggcggggatagtcggtagcgtcgttttttcgcggttaaaggtgggtgttggggaagtttgttttttttttaggagggaggtagggtaggtttgagggtgaaagcggtaaggatttaggtttaagttggatttgtttatttttttttgtcgtagtttttttggtttttgtgcgttttggattttcgaagttagttttttgcgtagcggattagagaggtttattcgcggacgttaatttaatttttgggcggggttcgggggttgagtagaaggcgaggtttggggagtacggataattttgagggttgtttgtgtcggggtgggagcgtagtgggtgagtttcgagttttggtttagggacggttagagtagggcgttggcgcgtcgtggggataagtaggtgtttgtttttgtttgggggaaggattagcggcggtgtttttaaggagggagtcgagttgtgatttgttttttagttcggggatggagtggaaatttgtaggttttagggaaggtttcgttgatattttttaagtttttttagggcgtttttgatttttcggggaacgtgtatttttcgggtaggcggcggggttcggaagaagcgcgggatgtgaggtttttcgttgttttttttatttcgttttgattatcgaggatcgaggagtttaatttggtattatttttttgtttattttgtttttttgaagagtttgattttttcgcgtttttcgttcggaaggaagttagatttaagcgaacgtttggttttgttaggcgagtttggaagtcggcgaatttcggattttgatagttgtttgggagcgtcg

SEQ ID NO: 6393 - DNA, 1686 bp, Artificial Sequence; identical to SEQ ID NO: 6392
  Description of Artificial Sequence: Synthetic polynucleotide

SEQ ID NO: 6394 - DNA, 2132 bp, Artificial Sequence
  Description of Artificial Sequence: Synthetic polynucleotide
tcgagaaagtgggtgcggtaggcggcgtttggaggaattggcgtaggtttttttttacgtagtatatttggtcgtagatgttgaggaaggtgaagatgtggaagagttggtggttgtggtcgataatgtcgaaaagattcggttggatgcgttcggggattttgtttacgttgaagaaggcggttattattagttagaagtagcggcggtagaagtgtacgaagagtgtggggttttttttacgtaggtcgaagagttagttttcgagtataatggggtaggttatgttgagcggtatgacgaagacgaaggtgcgtagcgcgaacgggtaggtatattagtcggtacggtttttgtagtaggttatagtgtaagttatcgttagtacgaaggttataggtagtattagggcgcggtaggcggcgataaggcgcgtgtagtttacgtgttagtttaggcgttgttgtaagtatggagttatgattttggtatttagtaagttgaggtttggtaataggtagtagtagtaggttatcgtgttgtcgaagtcgtagtagttgatggacgcgtagtttaggtagaagaaggcggcgcgtagacgtagcgataggtagttgaatacgtgcgtcgtgtagtttatggcgaaggttagtagtattttcgacgcgtagtattataacggtagtagttacgggtggtggaagggtacgtcgtcgtcgtttaggaagaatagacggtagaatttgtttaggaatagtagtagcgggatgaagtgcgtttagaagttgagcgtttcgttggtaggttttagtatcgaggttaggtatttttgggtcgtgtacggtagacgtcggtagttcgataggatgaagtattttacgaagtcgtcgggtatttcgttttagcgtagtagcggtttggtagacgttggggggtttcgggaggcggtagagtgggagtttcgggcggttttcgaagttgtcggggtcggggtcggagggttttttgtgttcgcgtttcggggttgtaggcgtcgcggtatggtgttcggggttcggttagggcgcgcgtaggcgatttttggcgtcggttttcgggcgttgggtagttttcgtcggtcgtcgtcggagtttttgtgtttacgtcgggggcgtcgttgtaggtttaggagaagattcgtgttttcgagtagtcgtttttaaaaattaaataaattaataagagaattaattaataggtagcgttgcgatcgttaggagcgcggagcgcgcgaggtttagcggttttttcgttaagtttttgttatcggcgcgcggtcgttcgcgttgcggtagcggcggcggcgcggttgattgcggcggtagcgcggtagcggtgattgggtatcgcgcggtgcgggtgttttcgtcgtcgtcgttttcggagcgggaggtggggatgtgcgagtcgaggcgcggagggagggacgggcgtatcgaggaagggcgggggttttttaggttagggtttcgcggtcgtttcgggggatagagttgttttttgtttcgagtttcgtattattttttttttcgggtcgtcgtagttcgggtcgtttcgttaatgattgatgcgggggtcgtaggttggtcggcgacgcggcggcgcgcgcgtcgagtattagagtcggttttggggttcgaaattcgatagttacgcgggcgttttggaggatattggggagtcgcgttcgcggggggcggggagttgcggttgcggggggaggggagggcgtcggagtcgggtagggcggagagatgcgttagcggtaattttcggaggtcgtcggggaggggggtatttcggaagtcggggggttttaagttcgcgttcggatcggggtcgtgttattgttagttatttggggatgcgtttttcgtttttttattgtttttgcgtgtgtgttagtgtgtgtgtgtgtgtgtgtgtgtgtgtgtcggtttgtttacgtattatacgaaggtttagttggttttttttcgtttagtgggcgtatttaggtgcgttattattttgtcgtttttttcgtttttgttttgttcgaaagaatcgttcgtaagttgttttgtggtcgcgtttattagtttttcgagtcg

SEQ ID NO: 6395 - DNA, 2954 bp, Artificial Sequence
  Description of Artificial Sequence: Synthetic polynucleotide
acgttaattatagtggacgtagtatcgcgagcggaaatgcggagagtatcggggtttcgtatgtggggtataatgaaataagagtagtttcggttagaggtttagtaaagcggaaagacggtttcgttcgtatattttttcggaaaattgaagcgttttttttgatttttaaggttagaaagatttattatttttttcgagagggcgtagttatagatttattagagagggcgggtagggtgtcggaagttagagaacggcgtttcgcgtttttttatcgttttagggcgtagaggtgtttttagtgttcggagaggttggtagtgtcggtttcgagggaagcgtggagcggacggtcgataggggatttttgtttaaattttattattaattttttttgagagtaaaaatatggggtcgagttcggtagttgtacgtagaatttaattttttggtagttttcggtatcgacgagttttagatttcgcgttcgtatttcggcgttttgcgcgtagagttaagttttcggattcgtggattgtagttttcgcgcgtcgcggtaaagcgggtcgcgtttttagttttcgaggcgtagcgacggtgggagtcggttcggcgttgggggcgggggcggggtcggcgaagggggagggttgcgcggcggaggggaggagtcgcggcgatagacggcggcgcgtattaatcgggcgtcggttggtaggagtcgcgtagaggttggttcgagcgcgttgcgggcgttcggcgtaaggggagtcgggtagtagtatttttttgggcgtcgttttcgcgcggcggcggcggttgcggcggggtttttttttgtttaaatatttcgttggttagaagcgttggtatcgggggcgggttgggtcgggtcgggtagtgttgtatatttgggtttttttgtttagagttgtgtgttcggggttttttggtttagtcggaggttgcggagcggcgggggttgtttgcgttgttcgttcgggtattttttcggtgatggaagtagtcgtcgtcgtcgttgcggggtcgcgttgtgttttatttatcgttgttagagaggtgggaaaattcgtcgtacggaggtcgaaagcgagaggggttgcgtcgttatgtcgggagttgagttttatataagtcgtttttagttatcgtttttagtcggtttcgtttttttgagcgagataggaagttgcggtttcgagaaagcggaggagacgtcgttggagtcgggaggcgtcgggttcggcggagcgcggagcggggttttgggtcgcgtgaaagttttttttttcgagtcgtagggcgttcgttgttcggaaattgtttagggataagtcggtcgattttttagatttttcgaaggtgcggggatttttagcggaagcgagagggagcgaaatcgaggaacgagtgatagtcggatagttcgtcgggcggtgattcggggtcgttttcgggcgcgttttcggttttaggtgagcggaggaatcgggtagaatcgagggtgggcgttatttaggaggaggaggttgggagggagattggggcgtattcgtttatttcgttttttttcgtaggttttattcggagtcgttgttatgggagagttagttttgggcgttggggattagtcgtcgcgttcgtttcggagtcgcggttcgagtttcggcgttagtagttagttcgttgcgtttttttttcgggttgtagggttgttttcgtcgcgtcgtcggttcggattgtgtttgtgatgagtcgtagttcgtagcgagttttgttttcgggcgcgttttttcggttgttttaggttgcgtttgtagtcgcgtcgcgtgttttgttttcgtagtggtttcggcgtttaggacgtcgttggttcgcgttttttttcggaatgaaggtgtttcgtaggaaggcgttggtgttgtgcgcgggttatgtattgttgttggtgtttattatgtttaattttttggattataagtggtataaggagtcgttgtagtagtgtaatttcgatgggtcgttgggtgtcgtagcgggggtagtcggaggtagttgggggcgtttagggtcgttttcggtcgggtcgtttcgtgtttatgttcgtttggattttcgtattttttatcgttttttcgttgtcgtcgtcggggcggtttttgtagtcgcggtagggatggcgggggttgcggtttttttaggtaatggtattcggggtatcgggggcgtcggggataagcggtagttggtgtacgtgtttattacgtggcgttttggttcgtcgtttttcggcgagttatttaattagaatttcgaggtgttttttttttacgagttagtgtggtatgtatggtaaaaattgtattcgggggacgtcgtttttttgtagggggtagcgcgggatatgttgagcgttttttatcgttgcgatttttttgttttttagttgtatagtttcgcgggtagcggggggcgtaattttattacgttgggtattttcggcgtagttattaataaggtggtgtgttcgttattattttgtttcgtttatcgtaaggaggtcgtggggttggtggacgatcgcgtgtgtaagaagtgttcgttatagcgtttggcgcgtttcgaggaggagtgtcgtaagtatcgtatattagttataaagggtgtgcgcgttttcgacgtggcggttttggcgttattgttgcgagattcggttttggattttaaggttatttatttggtgcgtgattttcgcgcggtggcgagtttacggattcgttcgcgttacggttttattcgtgagagtttataggtggtgcgtagtcgagattcgcgagtttatcgtatgttttttttggaggtcgcgggttataagtttggcgttaagaaggagggcgtgggcggtttcgtagattattacgttttgggcg

SEQ ID NO: 6396 - DNA, 2954 bp, Artificial Sequence; identical to SEQ ID NO: 6395
  Description of Artificial Sequence: Synthetic polynucleotide

SEQ ID NO: 6397 - DNA, 885 bp, Artificial Sequence
  Description of Artificial Sequence: Synthetic polynucleotide
gcgtacgtttgcgtgtttattttttagagtttttggtttcgcgatcgtgtattgattttttttagaattttaggttcgttttggacgtggaaggtagtcgtgtcgtttgggaaagtggagtcgagttcgggacgttgtcggtttaaatggaacgtcggtttcggggttcgtttttcggcgggttttcgagttaaattttttaattgttttatgacgttatcgggttttttttttttgtttcggttcgcgcggttttagcgtggcgttaaggagtgtggcggttttcgcgcgtatcgtgggttatttttaatttaggatttggttagtaggttgtttttcgagtcgaggttgcgttgggcggaattagggatttatagttcggagtggggttgaaatagagtttttggttcgagtagagagcgtgtatacgtatgaaatcgtgtttttgggtgcgtcggcggttaggtgttcgatgtcggttttggaagtagcgtcggagttcgtttgaatttaggttcgggaggttagaggttgtcggttacgtttaattgtgttttttttgggaagataatttttttagttttggtttttttttgagttacgggtggttggttggtttggtggaaggtaggtgtataggtaatagagataaggttaggaggtaaagtatatttatgtgtaaatgagacgcgttagggaatttgtaattttttgtattttcgtttttgatgtttcgatttttataattatagaattttaggtagaggtcgtcgattttttcgttttcgttaagagggattcggagtatcgaagttttttagtcggtgtcggcgttttcgcgtttttttttttttttgcgtcgtgattttaaaagggcggcgggcg

SEQ ID NO: 6398 - DNA, 2174 bp, Artificial Sequence
  Description of Artificial Sequence: Synthetic polynucleotide
tcgttttatcggttttttgcggtcgttgtagaagcgtattttgttgaatatttcgaggacgtgtttttcgtatagggagcgttcgtttttgttggggttggagcggcgtttggaggtcgatattcggtcgttgttggattttttcgtttgtcgtttttgtcggattaaggagttggttatcgtcgtagttatagttgtttagcgagggttttaggttttagtttttattgcgtttttcggtttgcgtttcgtcggggcgagggtaggatttgggcggttagggaaagggtagtcgcggggaggtagtgttaaaatttgaggaggttgtagtatcgaaaattcggcgtttataaggttagttaaagtttgggtagtggcgataaaatgtgtgaaaatttagatgtaaatttttttaatttttggcggtcggggggcggggcggggcggttttaggtttttttgcgaagtagacgtttgtattttaaatttgtattttaaggcgatcggcgtttaaggggtagtggggagtttagttatattgcgttcggggtattaagtggaaggggaagaacgatgtttaaaataataagacgtgtttttgttggagaggcgtaagcgttgtaaggtgtttaaagtatatttatatatatatatatagaaaattcgtttataaagtagagtttggatttaggcgggtagcgcgttttcggtagaaaatattaaaaagtgaataaaacgtttttttagaaaataagttattaatcgtacgagagaaggagaggaaggtagtaatttaattttttgcggttcgcggttttgaagattaggaggttcgttttagtagggtgaggtttatagaatgtatcgcgtcggttgcggttttttaggggtcggttattcgagttttggaatttcgagaggcgcgaagtgggagcggttattcggagtttgggtaggggcgcggggcgggggtagttgtttttagttgcggtgagagtaattttcggttagtagtattgtaaagagagtgggaggcgagggaggggggagggcgcgagggagggagggagattttcgagggttaagtatttttcggggagaaattagcgagaggcgatttgcggggttttaagagtgggcgtttttttttttttcgtttgtttttcggtacgagacgggtatagttggtgattatttagggaattttaaatttggaatgatttagtagtttaaataagtttttttaaaaggtagcgatgtcgaaggtgttttttttagttcggcgtttatacgtttttaattggagtttttcgttatggtttattcggggtcgtcgtatcgagttggttttcgtataggtttagagggagcgagggaagggagggaaggaaggggcgttttggcgggttcgggattaggttatcgtcgcgttgttgttcgtgttttttaggttcgcgcgtttcggtagttagtagtttataggtagtagattagatggggattattcgtcggacgtaaggtcgattatttagtttcgcgtcgtttatttcggtcgaggaaggaagtgattcgcgcgttgcgaatattcgcgcgttcgttcgggtggggcgggggttggttgtaggcgatgttggttcgcggcggttgaggtttttggtcggagttgtttattatggtttggcgttaggggcgtaggcggggtttttaggttttttggggttatttcgcgaggtagtcgagggcgtaattcgggcgtttggggtcggaggcggaattaggggtcggggttaggaggtaggtgtaggcggttgttaattcgtttaatttgttgcgcgggtggtcgtttagagtcgcgggtttgcggggcgtttttcgtcgtcgcgtcgtcgtttttttaggttcgggagggggcgtttagggtggagttttatttatgggttgaggttttgggcgcgcggagtcgtcgtcgttttttcggttggtttagttggagtgttagtttcgtaggaaattcggggttcgggcgagagttatcgagatggtaggtgggacgtagagttcgcggtagttagagtttttttcgtacggttcgtcgatttacggaagagcgaaagagcgtttaggtggggtcgagttgggggtcgggtttttggagcgttgggaagtatagcgcg

SEQ ID NO: 6399 - DNA, 873 bp, Artificial Sequence
  Description of Artificial Sequence: Synthetic polynucleotide
tcggagagttgttatcgatttttttaacgttttaagttttagttttgtcgttcgcgtttttttttttttttgggttataattttggttttttcgggtcggttttacgtagttgcgtaggagttcgcgggggaagatttttcgtggggatttcgagtacgacgtgcgattttaaatttttatattttttttgtcgtttcgtaggttatatgtatcgggagtcgggcggggtaggcgcggttcgtaaggattttcgcgatggagacgtaatattgtcgcgattgtatttggggtagtttcgtcgcgttttagtcgtttttcggtaggaagcgtaggtgtgtgagtcgattcggagcgagtcgcgttttcgggttagcgtgggtagggcgtcgtagtttgcgtagtttcgaggatttcgcgtcgttttttcgagttagggtttttaggagcgggtcgcgtaggagacgttagagggggttgttagcggttgttgggagaacgggttacggaaatagttttttttaaagtcggggttatcgtggggtgggcgagttcgtttttttaggtcgggggcgcggattagaggggacgtgtgtagacggtcgcggttagttttatttcgttcgggcggagacgtatagttggagttggagggtcgtcgttcgttgggtttttaggggtttgaacgtttaggggtcgcggcgagtttattcggagcgagttaggtgagtaggtcgttatggcgatgcggtttcggagagcgtacgtttgtcgcggtcggtatggaaacgttttcgttaggttcgggggcgtcgttgattggtcgatttaatagacgcgggtgggtagtttagtcgtatcgttaagttcggtcg

SEQ ID NO: 6400 - DNA, 2174 bp, Artificial Sequence; identical to SEQ ID NO: 6398
  Description of Artificial Sequence: Synthetic polynucleotide

SEQ ID NO: 6401 - DNA, 510 bp, Artificial Sequence
  Description of Artificial Sequence: Synthetic polynucleotide
gcgggtatttcgtacgttacgtaggcgttttttcgatgagtttttttttattttatagtttagggaaggtgcggggttgcgggcgtagagttgtataagtagggttgtaggttgggttaaagtcgttttgcggggatcgatatgaattcgggttttttatcggaagggattaaggattgagggttgagcggcggtagcggagatttcgttcgtagatttcgtttcgtcgtcgttatttttcgtcggttcggatgaggtttttttagttttgggacgttttgtttttatatttattatttttttattttaggggtgtagcggagttttagttacgaattatttaatattcgtaggttatagagcgacggaggttgaggttgtgatcgaattatcgacgtttttttgaggggtgaaagtacggtcgtggagattttaatcgagtttacgttggcgtaaaaggtaaaagtcgcgttagatttcggatgtcgttttttttttttcggttgcgcg

SEQ ID NO: 6402 - DNA, 511 bp, Artificial Sequence
  Description of Artificial Sequence: Synthetic polynucleotide
tcggagtttggggtcgggttttttttatttgcgtgttgttttcgggtttcgtttcgtttcgtttcggagggatttttaggtcgggtttagatttaggagttatttggggatttcggggtggttgcgcgtcgagggggcgttagcggggacgtgagttggcgtcgagatagtttcggttttttagcgttagggttattgttaggagattttcggttagtatttacgtggggcgttttcgggagttcgaggggtttatcgtttgtcgggattcgttattttaaagcggcgggtgtcgtcgagtcgttggagttttcggattttaggttcgtttcgtcgtcgagtatgtttagtgcgagtcgtcgtcgaaagttttttggaataaatattcgtatttggggtttggcgggttaggaggtgtcggacgggcgtgggagggggagagcgagttggcgcggtttaggcgttcggcggttaggtttgggtttgtttgcgtttaaatcgaattagagcg

SEQ ID NO: 6403 - DNA, 417 bp, Artificial Sequence
  Description of Artificial Sequence: Synthetic polynucleotide
tcgcgtcgtcgttttggcggggacggtgtagtaggcggcgggatgcggcggggcggtagtttgagcgtttcggatggttcgcggcggggcggtttgtaagagcgacgcgcggttgttgttggggcgggacgcgttgcggtcggcgttcgttttgttggttttcgtcgtgttgttgggcgtcgcgttcggtttcggtttcggtttttggtttggttgtcgcgcgggtcgttagcgtacgcgatattaggtgggtcggtcgagtagatagcggcggggcggggagcgcggggcgcgtggtttttgggttttgcgggttcggagtttcggttttgcgattttttgagtttggttgggaatttcgtacgtaatcgtttaggcgtcgggttttttttttgttttaggagggaggtggcggcg

SEQ ID NO: 6404 - DNA, 1748 bp, Artificial Sequence
  Description of Artificial Sequence: Synthetic polynucleotide
acggaaatattcgaatcggtgaaatgtaaatcgtgtttattgtataagggaatcgtgtagggagagtcgttttttataaggagttaattagcgtttgtttcggatattttcgcggggtttttagcggggtttaaattggcggcggtttagtagggggcgaggggtgttgggaaacgtcggggttgcgaatttacggaagaaaatgtattcggtgtagttgttttagattttgtcgtcgcggtattggttgacgaaggcggcggtgttcgaggagttatacgttattatgtggaagtcggtttcggataggcgattaaaggtttgttttaagtaggtgaatttgaggtagaagcgggacgtgtattttttcggttgtcggtcggggtcgcggttttcgttgagcgtgttttcgaagatttttttggttagcgcgatgcgttcgtatattatgatgcgcgttatacgtcggaatttggcgtcggtttggttgtcgcgtacggtggtgtaggagtttcggtagtttagcgtgaggaagttcgagcgtttgttttgcgcgtcgtcgtcgtcgttattatcgtgcgttttcgggttcgagggtacggcggtcgtcgtttcgcgtagtagtagcgcgtcgttgttattttgcgagacgttgttttttaggtcgttttggtagttttcgtcgttgagagagttttgtttggtgattttgggcgatagtagtttgattaagtcggtgagttggaaatattcggtttcgcgtagtagtcgttttttttcggggaagtgtttcggtagcgcgagttgtttgtttcgtagataatttagtacgtatttgaaaaggaagtcgtttcggtcgatgaagaagcgcgttcggttgtttttgggtagttcgtttcggcgtcgggcgtcgttacggggattagagggcgagaatatgttggttaaagtattgttcgggacgttgagtagcgtcgagtgtttggttatataaatttggtcgtttacgtttagttttattattttagggaagggcgagggtgcgtagggtttcggggcggcggcggtcgacgcgtcgggcgagttggacgaggaaattatttcgttaatgggtaggatggtgttgtcgtcgttgttcgtgttttttagagttatagttttttcgtcgtcggtttagtgattcgagagagttgtattttttcgttttcggagttcgcgttttagtttttcgcgtgtttttggcgttttgcgttttcggattgggcggcgcgttttttcgatcggggcggtttcgtttagggttcggggtagcggcggcgtcggcggcgttcgagttttatcggaggagagacgcgcgagagaggagtttcgtcggtgcggcggcggtaatggagaggtaagaaggagttgttgtttttttggggcgagggcggggaagtgtgagagagatttgcgagaggttttagggttgttgttcggtttttcgtggggagggcgggaggaggggtcgaagtaaagaaaattcgtcgtttcggtagtttgtaagcgtgtcgcgaggtcggagcgtcgacggtggcgttaattatttttggtagtacgggaggaggtattgacgttaagtttcggattgggattcgagttttagttgttatttaaagagataggttgtagtcgcggttttcgggtttcgacgttagggggcggggtcgagagtcgagtttgtaagaggtgtagtttttcgattcgcg

SEQ ID NO: 6405 - DNA, 1748 bp, Artificial Sequence; identical to SEQ ID NO: 6404
  Description of Artificial Sequence: Synthetic polynucleotide

SEQ ID NO: 6406 - DNA, 648 bp, Artificial Sequence
  Description of Artificial Sequence: Synthetic polynucleotide
acgaaacgttgttatatcgagcgaatgtaacgcgtatatacgtttatattcgaatagtataagtaagagatcggttgggtgtggaatagaggcgtatatcgcgtaacgtatttatagtatgtatacgcgcgtatttcgatttcgttttttttcgcgcgtttttatatttcggcgtttaagattttcggtttacgaattttattagatagtcgggtaattttttaggtgcgtagtttgttatttcggcgcggtcgtttttgcgttttagcgtttttttttacgtcgttttttttagtcgtttgcggcgtcggagtttagcgtaggttagtttagttagtttcgtcgtgtatacggtgcgtagcgtgggttcggggttgtcggtttagtcgtttcggttacgtgtgagtcgggggcgcgggttagcgcgatgcgggtaggagttgcggcggcgtcggtgttgtcgtttggtttcgcggcgggggtcggtgtagaggagatacgtagggagggagggaagagaggagggaaggaggagggagggggttagtcggggttattgtttggatagttgggcgtcggtttttttaaaggtggggttattcgcgttcgtacgtatattagttcgaatttttattttcgatatagtcg

SEQ ID NO: 6407 - DNA, 863 bp, Artificial Sequence
  Description of Artificial Sequence: Synthetic polynucleotide
gcgtataggaagggcggaggcggtattcgggggggattgtttttagaggaggtcgttgtgagtcggcgacgcgaggttgggggagtgggaggtaaattcgttaatttgtcgtcgaatggttatttttagtttttcgtttacgagggtggaaaggtagaaggtttgaaggtaaggcgtgagggagcgtttaggacgttttcggaggggtcgggtcggggtttgcgttgtagttcgtacgtattttattttcgcgtcgcggcgttcggtcgttcgtttttttttttgggttttttttggtcgtcgtcgtttttttttttttagtttttttttttttttttttttttggtttttcgtttttatcgttgatttgttagcgtttttgttcgtttttttttcggcgttcgttgttttttttgtagcgtgtttttcgtttttatttcggatggggatggggtagggggcgcggggtgagttattaattttagtcgtttgtttggtcgcgtaaggcgggaaagtgggggcgtttttgcgttttacgttaagtttagggttacgagtatttttgtggagatcgggagcggttgggttagggatgatgttttttttttttttttttttttttttttttttgttttcgttttttttttgggttttttcggggattattttttatttttcgttagagtcgttttgggagagtcgagggtttgagggtcgattattaagggtagagtttattttttggggagttgttggaggagataggtagcgtcgggaggtggtttatatcgtatcgtcgagagcgttttgttttcgtatcgttgaaatttaattacggttataggttataacgttaggggtcg

SEQ ID NO: 6408 - DNA, 1288 bp, Artificial Sequence
  Description of Artificial Sequence: Synthetic polynucleotide
gcggattcgagagcggcgattttcgtttggaggtcgttggtttttatatttaggtataggtaagatattacggttattattgataggagggtcgttaggacggtatacgggggtatggttcgggtataatgttgttcggtaggggtcgggttttcggatttgggttttcggtttttttttttttttgcgtgtttttttagtagtatcgtggcggggtcggtcgtttcggtttcgttttttattttttatattttaaataattttaaaaggaaagaaaaaggtcgatttttttaaagtttagtttttgtggttgtataattagttggtggagttaagtttacgagcggatacggatttttgttttgtttagcgtttagattcgtaggcgtgtattattttcgtttttttttttttttttagttggaagtgaaaagtatttttcgttcggggattgggtggcggtggggtaaaaagtaagacgaaatttatttagatagttttttcgatttttagaggatcgatatttttttcgagggttttaatagtggtcgtttagggttcgagggtaacggtcgaggcgttacgcggggtcgcggttcgttttggttacggaggatcggatttgttgcgtttttgtgagtttgttttatttttatttattcggtgtttttcggtacgtcgatttgttttttatttgtatttagtttaaggtaaaaaggttgtgagagtacgttatagcgtagcgcgaaaggggcgattaaggtggagaagagagaggaaaacgaaataaatttaaggaattaatgttattcgcgaagtcgaagtcgcggttgttcgaaggattttcgtagtttcgcgtgcgcgatttttaaatatttttcgcgatgttcgcgtgagtgtgtgtgtgagtgtgtgagtgcgcgcgcgtttcgagtacgacgtttttttttcgattttttttcggcgttcggcgttcggtttgtcgttttcgttgttgcgcgtttttttttcgaaggtaaagtaggagttcgttttattattataatgtatttattttggtttagttcgcgggtcggttcggggaatttttaagggaggcgggaagtttgggtgggagcggggtaggaggtttgttattagtataatgtatgtaaatagttggagcggttatcgtgattggagaggagtttggcgatttttttttttgcgcggagtaattttagtattttcgagggttatttttttggtttgggtcggggtcgaagcggggtcggttgcgtaagaggcg

SEQ ID NO: 6409 - DNA, 1275 bp, Artificial Sequence
  Description of Artificial Sequence: Synthetic polynucleotide
acgcggagtaaaatttaatcggtttagggaatttagatacgtttttcgcgtcgtacggattttttagaaggagtttggaggtaggcgttggatttttttaggtattttcgttttcgtcggtttttttttttcgcgttcgttgggttatttattcgcgtggggtatggtgatggtttcgttggtgttggagtttacgttgaagatgattacggttgaggcgttttgtaggaacgcgtttcggattttatttttgtacgtgtagttgtttttggggatgagggttatttagtttttgtcgcgggtcggggcggcgaatttggtgttggggtcgtaggttaggcggtcgtgggtcgagttggttatgattattttttcgcgggcgttttgtttgggcgagtgtttttcgtagcgttcgtatttcgtttttttcgtgtgtagtttcgcgtcgtcgtcgttcgtcgtttcggtttcggggttcggcgcgggttcggcgtaggtgatgtttacgaaggcggtgtattatttttttttttcggttacggtaaagtttaggtagagtagatgtacgaaataaaaggaaagtagttatgttgagagagttagattgtagtacgtttggatgagagatattgttatttttattcgtcggggtttttttttcgttttcgcgtttttttttcgtttcgttttttttttttagtttcggttaatttcgggtcgttgtttttttttttgttgttgtttattttcgggtcggaggggtcgcggtcgggacgcgtagtcgtcgcggggatcggatttcgggcgagcggatggcgttggttttttttttttttagttgtagcgcggtggttgtattttgttttttgggcgttcggggggcgcgggaatagagggttcgcggggtttgcggaggagttttgttgtcgagcgttttgttttttcgttcggtttcgtttttttttataagggtggtcgggggtttacgaatttgtagggtggcggttttgcgttttttagtttcggcggggacgggtacgattgttcgtagtttggggtgttgcggtgcggggtgttgtttagggtgtttcggtcgtcgttattgagcgttggggcgcgcgaatttagttgtagtcgttgttgttttgcgtcggtttttttaggttgcgggcgttgcgtttttgatttcgtcggtggttgcgtttgggtacgtatttgtcgcgggcggggcgggtttggggatagtgggagcgagtaggtagagcggagtaagcg

SEQ ID NO: 6410 - DNA, 1071 bp, Artificial Sequence
  Description of Artificial Sequence: Synthetic polynucleotide
gcgagcggtggttcgatttcgggtgtggtaggaaggggtgtttcgcgttttagagttagtgttagtttttattttttcgggaagtcgagatttagggggaataggttttttagagtttagtttgtagggacgcggagggtaggagtcgtcggcgaggagtagttaatttgttatttttggcggttgtatttttcggcggttataggttgttcgatagcggattttagggttttcgcgacggtatttagagtgtttagaagggaggtcggggtcggggtgggtcgggaaaatcgagggagggaaggagtttggagaagtttcgtttaggcggggagggggcgattcggggcgtatttttcgattatgatttttatagattttggcgtcgtaatttgcgttttttgaggtcgaagatgcgtattttggagaagatatttattaggttgtcgttgtagagttcgcggtttttgttggggttgtttcgttttttgttggtagacggtcggttttagtgttgttttcgcgtttgtcgtttttggcggattaagtcgttagcgatggtcgcggttatggtggtttcgggaacgggttcggggagggagggcgcgggaggacggcgagtcgggggtatcggaggggaaggcggcggcgtagatcgtggttcgttttcggggtagaggagggggtgttaggcgggattggggagaggggaaggggggtttagttttgatcgggatttatcgtttttttcgcggggcgcggggttaggcgcgtagatgcgtttagggcgtagtcggacgatttcgggaagtcggacgtcgtggtcgtcgtcgtttggttacgttcgagtggagagcgggatcgcggttgcgggcgttgttggttatcgttcgtcgtaggaatttcggcgggggtcgttatcgttattcgcgttgttttttcgttttgttcggttttcgggcgggaggtagagtcggtcggcggtttttcgggcgtcggttggagggcgggtttcggtagggtttttgcgcgttcgtcggttcgggtcgcgttgggtaggatttagcgtcg

SEQ ID NO: 6411 - DNA, 694 bp, Artificial Sequence
  Description of Artificial Sequence: Synthetic polynucleotide
acgttttcgaatttcggattttagttgttattttatttgcgtcgtttcggacgttatttggttgttgacgtggtttcgagttagtaaataacgttagtagtttttttagatttacgtcggttcgttttttcgtcggtttttttttcgtagtggttttttttgtagtttttttgggtttcgcggttagtagtgtagttcgtggagtcgcggttttgttcgttttttttgggtggttttagtgcgcgggttgatatttatttagtcggggaaggtgaggcgagtagaggttggtgcggaatttgtcgtttttagtagcgtcggcgggttaagtttagggtcgggtagataaaagaggtcgttcgcgtaggaaggtacggtcggcggcggcggagcgtagcgatggtcgggcgagggggtagcgcgttgttggttttgtgcggggtattggttgtttgcgggtggtttttgggcgtcgaagtttaggagttcggggcgttcgcggcgggtatgaggcggcgtcggcggttgtagtaagaggacggtatttttttcgagtattatcgttatttcgagttgcgcgaggcgttcgtgttcgtgtggttgtagtgtatcgttattagtaggatttatacggtggggcgtagtttcgagggtcgggagtttttggttatcgagttgttcgataattttggcg

SEQ ID NO: 6412 - DNA, 694 bp, Artificial Sequence; identical to SEQ ID NO: 6411
  Description of Artificial Sequence: Synthetic polynucleotide

SEQ ID NO: 6413 - DNA, 1424 bp, Artificial Sequence
  Description of Artificial Sequence: Synthetic polynucleotide
tcggcgggtacgttggggatgtattcgcgtagttcggcgaaggcgttgttgatgttttgagttttgcgtcgttttttgcggttggcggtgtttcggcgttttatcgggcgcggtttttttaggttcgggggttcggcgttcggcggtattttttcgtaatgggagtggtttaggtcggcggcgtcgttggtatattcggggttgtaggatagggttatgttgtagtcggggggcgatatttcggggtggtcgatgagttagttatggaagtaggggttttttttatggttgtagcggttggcggcggcggcggtagttgcggcggcggcggcggtaaacgggtagttttcgtggtgtattatcgggtggtggggaaaattatttattagatttatttcgtttttcgcgtttttttacgcgttttagcgtgcgcgtagtttcgtcgcgttttcggttcgggtttttgttttagcgttcggcgtttttttttattttttattttttagttttcgggcgttcgggttcgttcggtagtcgtagagggggttgttgtagttcgggtttcgttttttcgtttggttagtcgggttcgttttagtagcgttgcggtcgtcggttttttatggggcgcggcgagttggttttggtatcgtgcgtttttggtcgtcgtcgtcgtcgttttcggttttcgttttgttttacggttcgcgtttcggtttttgtttttcgggttgttgcgcggaggtagaattttttcgtgtttatataaaggtgtcggggttttcgcgaggttggtacgcggagtttcgggaatttaagttcgggtcgcggttttggtatcgaagttaattcggaatttaggggcgagtttgagtcgcggttggaggagtcggtttagttgtgtcggggggcggcggggtcgattgtttattgtaaagttattttcgtgcgattttttttttttcgtttttttttttttttttattagttcgatttgggtttttgggcgtttattgttttaatgaaatttttggttgttgttgttttggtttttaaatgtgattttagttgcgagtaacgtgttttcgtttttttcgcgttttttcggagggtttttagagaggttttagtgtatttatttttttagatttttttttttcggggtaaggatttggggttttgaatgagttttggagttcgaagatcgcggttcgggttttcggagggttttgcgcggtggtcgaggaagtttcggggtgacggcggtggtttttttgggttggacgacgtgaggggagtaagcggatttttttagtaagatttttatgtatagttatatttttagggtcgttcgggttaatatatgtcgttagaggttttttacgttaatttcggggcggtaggggcggcgtttcgagttttcg

SEQ ID NO: 6414 - DNA, 1215 bp, Artificial Sequence
  Description of Artificial Sequence: Synthetic polynucleotide
tcgcgtaggttttcgggttcgtcgtagattttaacgtaaattttcgggtttttcgtaaattttaacgtagatttatcgtggtttcgttcgcgtcgggtttcgcgttcgagaggtcgagttcggattcgaaggcggcggcggcggcgggcgtttcgcgaggattcgggagtagcgtagcggcgagtagagaatacgttatagagaagaagtttagtaagtgtatggtggaaggatcgggggtgggggatcggttcgttggcgggggtaggggtgggggcgcgggcgtttttgcgaggtcgcgggttttttttggtttttttttttcgggtttttttcggcgattttttttgggcgagtcggaggcggcgggagcgggttcggggtttcgcgtttttaattttgtagggcgtttttttagttagtgtcggggaaaggcggcgggtgttaggtaaaagttttataggaaatcggatattcgagtttttcgtattcggagttcgcgaggtgaagcgagggcgagggaggacgtcgtcgcggttcgcgtcggtgtagttttttggagaggcggggcgggggatattagaatatttcgcgatgtttagtttttttaaattcgttagagttttcgtttttttttttttttttttttttcgaagtgagaggagtcgggtcgcgggcgttgcggcgggggcgttggcggcggtgtcgggggcgggaggagggcggcggggcggttggcggcggcggggttcgggagcgtcgcggcgtaggattttttagagcgcgtcgggttgagcggcggcggcggcggcggcgggcgtaggggtagggtatgattgacgcgttttttgtttgcgtttatgtgagagaaagcggtcgagggagggagcgtgtcgagttcgggttgttttttttttttattttttttcggaagtcgtttttttggagtttttcgtttttttcgtttttttttcggcggttttatttttttcggtttttttttggattttttttttttcgtttttgttttttgcggggagcgggcggtcggaggggtaagtttagtttcggggttggcggttggcgggatcggttttagaggtgatgcgattattttggattacgtgtagcggggagaaattgggtatcgtggggtggagggagttttcgttttattttcggttattttcgagtttttgttttttttttcgtacg

SEQ ID NO: 6415 - DNA, 1184 bp, Artificial Sequence
  Description of Artificial Sequence: Synthetic polynucleotide
tcgtttttttttttcgggtcgcgatattgattcgttaacgttaatgggggttcgcgattgttgcggggacgagggcgtagagtagttttcgttacgggtcggtttacgtaggggtcgagaaagtggcggagaggcggtggtcgaggtttaggggcgagcgcgggttgagttggtttttgttgcgtttacgagcgatatttattttttcgttgcggacgtttcgcgggcgttaggttgggggttttgcgatcgatttttttcgttttcgaggtatcgtcgggttcgtttggtaggtagcgcgtttcgcgagttggagggtcgagtttcgcggggtcgtggggcgtgtgggtgaaggcgatatttcggatgcgggacgtatgaatggtggtagagtaggggtcgggattcgtttatgggttgggagagagatgtttttgtgagtacgggaaagtagcgttgtcggagaatagttttgaggcgggattaaaagtcgtcggcgaagtttcgtcgaggaatacggtcgttgttcggggcggttcgcgagcgtgcgtgtgtggaggggaggatgtcgtttcgcggggttttcggagggtgtcgggagcgggtttttagtgtagttttttcgttttcgttgggggtacggttgtttataggtttcggttcgcgtgtgtggagcggggcgagggggtgaggcgagggggtgaggcggcggtcgagtcggggcgttgggcgcggggttggcgggaggcggcggtggcggttcggcgcgaaggggttaagcggcgtatcgttttttcggcggtcgggtgtaaatagaggagttttagtttattatgtttggtcgtcgcgcgtagttcgagttcggagttaggcgttgtaatacgatacgttttagatttaggtaatttggtagcgttgggttcggttttttacggttatagcgagggcgcgtcgcggtaaggtgggtgagcggcggcggcggcggcggtttggggcgggttggcggagcgcggttttcggtgaggtttttcgcgcggtagggtcgttcgttcgtttcggggattgcggcggtggcggtggcggtggtggcggcggcggcggcggcggtttcgttttttttttttgtggtgtcggaatgggaggaggttcggcgcgggtttgaatcggtgcggaggtaatattcg

SEQ ID NO: 6416 - DNA, 5820 bp, Artificial Sequence
  Description of Artificial Sequence: Synthetic polynucleotide
gcgagtagaaggcggacgttttcgagtcgtaggttacgtagttgttatagttttgcgattcgttatagggatttttatagacgtttagcgtcgcggtcgagttgagttcgtggcgcgcggtggttagtagtcggttttcgtagatcgggtagtagatcggcgtttgggtcgaggcggcgggttcggagttcgttagcgtgcggttttcggattcgtagtacgtgtttagggagttggtggttattaagaattgtagagagaggtcgcgaggattggcgggaagtcgggttggaggttggggttttgggttttgttaatttcgcgcgtcgtttacgagggcgtgtttcgagtattttcgggtttttcgtcgtttatattaggatgttcgtttttttttattagtttgtgcgcgtttggtttttttcgttacgtggggtttagtcgagtatttatattttttttcggagggtttttaaggtttttgacgttatttgcgcgttaagtttttttttttaggggttttttggggttttaggatttttttggggtatagtttgagttttgtggtttaaatattagggaattcgggttcggttcgtcggatttttttagcgtttcggttttttttcgggggtttggggagtaggggttgggcgtgaggggcgcgcgatttaggttttgttagttcggaagtcgtaggtagtcgtaggtcggatattttttatttttcgttttcgttttattcgttttatcggtatttgcggtggtttgggcggggcggggtttcgtttatttggggagtcgaggagtaggggtatttaaattgcgggtaggatatggcgggcgcggttcggggcggacgggcggggtttgtagggttttgcgcgttggggtcggcgtggcgcggttattgtttcggagttgtaggtttttaggcgttgggagggcgaagtaggagagtcggttagtttattttcgcgtttcgtaaatttttttaatcgggtaataaagtgagtagcggtggtcgtcgcgatttttttaatttcgtatttcggaggttcgagggggttttgggatcgagcggtttcgtagcggcgatagaaatatatattttacgaaaaagaaaaaaaaaaaaacgagtcgcgcgaattcgttaagttagatgtgcgcggtttgaagcggaggaggttttgacgttagttttatttcgcgtagttcggtttggtcgtagattcgtcggttattcgtcggcggtttaggtcgggaggggttaggatagtttcggtcgcgcggtggacggaggggttattttttcgggcgttagtaaataaattttattcgagttaatatcgtttagcgaacggtgtttttttttagttattcgagaacgagaggtatttttaattagaaattaattaatgagtagttgttttttttcgttttattgtaattattcgttttaattataaatgagatttatgaaaggatacgttgaagatgtaattaatagttaaaattagttcggcgttgcgtaggcggtcggttcggtttcgcgttggcgcgttttgtttcgagtggtaggaaggggttcgtaggcgtttcgtacgcgtttcgttattattgtttaatcgagaattagtaacgtttttcgtcggtttttattttacgtcggaatggatttttagaatttattgcggtcgtaagatagttcgtaagagttggttaaaatgtttttaggtgcgtgggggtttcggggttttagttggagttcgatattttgagattggcggttcgagggttgtagggtcgtttcgggcgtgcgtttatcggttttgtatttttgggtagtcgagtgtcgcggagaacgttttattttttttatcgcggttttttaagttttcgtttagtttatcgtttttatttcgttttttcgattttttttttcgatttttttttcgtcggtcgtgtttcgtcggtttttttttgtttttcgcggttaagtcggggattgtcgggcggttttgcgcgttcggaagagtaggttttttaatttaggtttcggtttttttcgttaagttcgtttttttcggcgtttcgtagggttggttgcgagggagggggcgttgggtgtttggcggaggcgtttttttttgtttattttgtttagttttttgtttggggcgtacggagtaatcggaagaggggatcgagcgtttattttaggattttttcggttagtattttttttgggattttgtttaagtttaaagcggaggttagtgagtaggcggtaagggggcggtaagggggcgttcgggttatttcgaattcgtttttcgttttttgcgttatcgtttttcgggatcgggattcgtttcggttgttttcgttttttgggtcggtttttcgtggtaagttgggaaggaagtcgtgtaaggtagcgttgtgtagatttgtttagaaagatttttgggtttagatttgtgaatcgttttagggttattttttaattaatgatgacgttttcgttttttttttagttgtaagtttgttttttagaaacgaaatttgtttgtttttttgatagttcggttgaaggtgattgatgattatttggagattatagtatatattatataatatttgttgcgtaattgttttaatttatagatgaaaatacgagtttttcgatcgcgttggatcggagcgggttacgttcgagttgtttgtagagggaaattatcggaaataatgaatagtcgttttatgtaaattatttagatagtttagcgtcggtagtcgcgagaaatatataaagaatacgagttaaatgatattaataattgtttttgaattttgtattgatttcgcggtaggtcgcgttttttttttttttatttgaatcgttaatattatttttttgtaaataataagaaattagttatcggggtttttcgttagaaatgaattttttaatttttttttttttttttttgtttttttttttttttatttttttttttttttttttttatttttttttttttttattttttgtagttttttggtttttttcgagtatttttttattttttattatttattgtttataaattattcgttttttttaggtaatgaggttcggttgaaggaggggtgtgagtttagtcgggttaagggttgggatggggagtagagatttttagaggggaggtatttagttgtggtttgttttttttttatttatattcggggatttggtttcggcgattgtgagtatttcgtcggttgagggggagagttagggtttaggggtttagttatttatgttttgtatttttgggttttagtgtaatagtttagtttatttagatttgaggttggtgtatttttttttttttagattcggcggggtttaattggagtcgaagttttagaataggcggttatttattttttgagtagagtttgggagaagtagtttttattttttagggtagttagtacgtgggggttttttcgggggttttttttgattattatcgttatttttttttgtttttttttgtttttttagtttgtgtgtataaatcgacgttttagtttttattagcgggcgatttttttttcgtgatttagaaatttggtttttgaatcggtttttttaggtcgtcgtatatatacgttttattttttgttcgttagtaggttttagcgtttggggttcgggtttagttatagttattttgtttcgggaagttcgtaattgtttaggaggttttttgattcgttcggttttatttaggttttattatttattttaggatatagggttaatttagtttgtggattggcgattatcgggatattttattgaaattttgtagtttggtttaggttcgtttgtttaaatcggggatttttattgggttattttttttttatagataatattggaatattttttaagtgtttttattaaaaggttaagtttggagcggaggtatttagtgttttttttattaacgataggacgtttagtattttaggtattagttgaacgcgtttgtatagattcggagtgttgagtttttttttttttagggattttcggtattaaatatattcgtgagtaggtgggttagaagttagtcggttttcggagtatatagtatcggtttagtttcggggagatgaggtgttttcgttggtttggagcgtttcgaagagcggaggattagggtcggagtaggtcgtaggggaggtaggggatggttagtttttaacgcgaagcgtaggcgggtcgtttattttgacggggttatcgttggtcgtcggaattatggaaggttttcggggagataggtcgggttttgattttttttcggttagtttagttttggtgttttaggagttattttgggggttattagtttttcgtattaagagttcgttcggagggagttttttttagtttagagaagttaattttagttaaaggcgaagtcgggagttcggggtattaggtaagggtttttttttttgagatttggggttagagattttgggggcgtttgtgttcgtttatcgttcgggatattcggttggggtgtgggtttgagaggttttacggtcgttgacgtcgtattggcgaatttcgaggttggtaggttatttttttatagtttcgaggttttttcggagttagtggtaggagaaggagttatagggataagcggtgaatttttggatttttaatcgttttttatgggggttcgcggtttttttttttttttttttcgttgcgttttcgtcgtttgttttttgggtacggtttgaggttggacggagcgtcgttcgggcgtttaggatttaggtttggttatttcgagttttttatttttcgtttcgcgtcggttcgcgtattttgtttttcgtaatttgtagtaaacgtagcggtttttggagagtttagcgacgggtagtaaattttgtttttttaagcgtaagagtaattttcgtaaagtttgtgcggcggagtttattttttatttgagttggggaagttttcgttcgcgtcgtgtggttgtcggggtcgcggggagtagttcgtagttcgggacgtatcggggagtcgtcgtagtcgtcgtcgttcgtttttttcggcggtcgcgcggagttttcgttttttcggaaggggggaggggtttcggaatttcggggcgggggcgggagcgggggattttatttatttgcggtggcgttgggtcgttttcggtagttcgcgagggtttcgcgcggaagttcggcgcgcgcgttttagcggggagtcggcgataattaatggagatatttttaggcggagtatttggcgagcggagcgcgtcggcgtttttaggcgtcgcggtcgttagtcgagttcgtatcggcgtgacgtgggcgagcgagcgcgttgtttttattcggtcgtttattaacgttttttttcgcgggcgtcgcgtttttgttaattttttttttcgttcggtttgcgcgcggcgcgtcgggtgtaggagttggggtgagggcgtttcgggtgttagtaggggcgttgggagttgtttgggcggggacgtagggtttcgggaggttatatagttttaataggatagtgggaaggcgcgcgagttagatttggttaaacgttaagttcgttgcggtttcgggttttcggtttacggggttttttttttcgtttgggttgttttatttagggacgtttgggtcgggcgcgaagagttcggaaatagttatttttgtcgtcggttcggttttttttcg

SEQ ID NO: 6417 - DNA, 1233 bp, Artificial Sequence
  Description of Artificial Sequence: Synthetic polynucleotide
tcgcgttgggttgcgtttttgtaggagttaggtttttttatgttttgcggcgatagtcgttggggtggggttacggggaagtcgcgttgtttttcgtttgagcgtgggttagggtttaggtggtgattaaggttcggcgtagtggtttcggagcgtggaggggtagttgttgggcggtttttcgggggagggtgacggttttattcgttaacgttgttttttttttgggattaggtcggaggaattttggatcgttcgaggttggtgtttagttttttttttttattttatttttattattcggcgattttcgtagatttgattggtaggttttgtttcgatttttatttttttaggttttcgtttcggtgtttcggtgttcggtttcgggttatttttgtaggttttgtttagggtagtcggcggtgtttggaggcgggttcgtttcggttgttttacgtttaggtcggtttttggtattttagttagtgggagggcgttttcgtcgttttcgtgttttttcgtaggggttgcgtcgcgttttcgggttttttttttcgtcgtggtttggtttgtttgttttagggcgtagttgcgttcgttttagcgtttttcgggtttgcgtggtttgttcggtttagaggtttttattacggttcgttttttgtcggacgtcgcgttgttgtggtcgcggtggttttgtggttgtgagggtcgtttttgttcgtttatatcgttttttttttgtaggtgaggaatggggtttgtttcgtttggaatgtgtttttgtcgggttttgtttgatttttattttttagtcgggacgcgcgagttttttcgtttggttgagttaaaaagggatcgcgcgtatttcgtcgttttttattacgaagcgtagatataggaggttgtagggttagtgttgcggagaattttagacggttttatagtcgtcgttattcgcggggtattcgttcgggttttgtcgaggatgtgggggttttggttttcgtagagttgggattttcgaaggttttattagaaatttaggagtagttttagttttgtagagttcgcgagggtggagacgggagattcgttgtggggtttgaggttgagatgtcggtttgcggtgaagtcggcgggacgttttaattcgtttagattcgtttatttcgtagggttcgggtttatttttcggtttgtggtttgtgttgggttgcgtagtcggcg

SEQ ID NO: 6418 - DNA, 2865 bp, Artificial Sequence
  Description of Artificial Sequence: Synthetic polynucleotide
gcgagttttagttcgttgttcgtttagagtcgtttaggtgcgagggcgtttttattagaaatcggtgttttcgcgcgttttatttttcggggttttgtagatgtcgggtcgggggtcgttagtaggttttttggtttttgttggagatattggaagattaggcgattaggatagcgggtcgggttagtgcggtgtgatacgagggttcgagcggtttcgtagtttaaacgtgtttttattttatattttttacggttgtttcggattcggtgttttcgtgttttttagtttgtttagcggtacgtgggttttaagtttggtttttagcggttgcgttagtttagttgtgtttattttggggtcgcgagggttttttatcggttggtagttggtggatacgttgttaagatcgggggaaaaaaaggaaggaaggaggttagggggatatagggttggtggttttcgtagtttttgatttgcgacgggcgcgagcgtattttcgcgtttttgcgtagagatttttttttaagattggtttacgacgttttttatttcgaagttaagggttttttgtggtaaatttttatacgtttttttttttttcgtttattttcggcgttaggattgacggggagagggtaaggtcgggttagaggggttgtgggtttggattgcggttgtcgttcgcggttttgtttttttgggtagttagacgtggggttagcgtttagtcgtagttttcgggggtgagttcgtagattttcgtacgtgatataggttaggtatggggacggggagtttttcgtcgttcgtttttatttagatgttttttgaggtttcggaatatttcgttttttattttaggatttgattaatttttaagttacggtcggtttcggtttcgcgagacgggggattttgaggattgttttttttttcgggttgggatttttttatagtagtcgatcgtttttagtttagagtggttcggttcgtagcgtttttcgggtataggttttaggtggacggtttcgttttcgcgttcggtttttttgttcgttaagcgtttcggggatttttcggtttttaagcggtcgcggtcgggtggagttagtttcgaagttcgggatttttcgaagggagaaaattcgttttgtttttttgaagcggcgggagaaatcggttttatttaggttcgggggttcgacgttttcggcggaggtcggttttaggggttcgaggttttcgaagttggaggtcggtttcgtttcggcgttttttcgtcgttattttcgtttttatttcgcgggtcggcggagggaggggcggggtcgtttgtcgttcgcgattcgggttcggtttttttagtgattgtttttgtttttttcgcgttagttgtttttagttttggggtaacgttgttaggtgtttagttttcgcgttcgagagagcgtttgtttggttttgaattttggttaggaaggggcgcgaggggaaggtttcgggggaaggcgtgttttcgcgtttcgtttcgtttcgtttcggaaagttttcgcggtttcgtttattttaggggttcgtttagttttcggagatttttttttttgagcgtagtcgtttggtgtcggttttcgtcgagttggagcgcgcgggttacggtttttttggggacgtagaagcgagaagcggggatttcggcgcgcgtttcgcgtttcgttttttttgttcgcgtttcggttttcggttcgcgtttcggtcgtcggtatggtgttgttggtcgggatcgggtcggagggcggcggggcgcgttgtatgattttattatcgtcgtttttatttcggggcgcgtaggtcgaggaggatttcgttgattacgaagagtttgaggatttttcgagtttgttagatattcgtagtatcgtttcggacgattttttttattttttcgaggacgaggaggagtacggcgtcgagagcgcggagagcgtttcggagggcgtttcggaaagcgtttcggagacggcgatttttttgcgcgtcgtttgcgttaataacgtggggttgttgcggacgttggtgcggcgcggggtgagcgtcgaggaggcgtaggagattgatcgtaacggtagggtaagcgggcgttttcgtaggatttgagtttttttattgtttttattttttttttttttattatattttcgcgttttttagtttttggtttcggatcggtttttcggttatttagtcgtcgtttagagcgtttttttttcgttgtttgggagcgcggtgttttgggtggttttttcgttttaggttgggggacgcggtgcggggagggagtagtcgaggtgttagcgcggtagaaacgttagttcggcgtttttatcgtatttttttttcgtttatcggttttcgtggattttttgattgaattcgcgttggttgttcgtgttgtaatttaggatgggttttttgcggttcggtttttttttgattattatttttttttaggtttttggtaggggattatttttttttttttgtaggagatagttttttttgtttagcgttttatttggtttttgggtttttcgcgtcgtttttgttttaatacgttggggcgtagatcggtttttttagtcgtaatgatttggaagtaatagttttttttttcgtcgggatagtttggttttttattttattttcgttgagttttgtggttcgcgtcgcgattagttaacgtgatttttgattggtttgttcgtaggttattttcgcgagttaatgttagtcggggttttttagagttagggtatagggagagttttagagtcgcgggtatttattcgggtagggtaggaggcg

SEQ ID NO: 6419 - DNA, 1154 bp, Artificial Sequence
  Description of Artificial Sequence: Synthetic polynucleotide
tcgttttttttcgtatattagggacgttatgaatgtatcgagtatgtttttagggtggcggggagtagtattgtcggtgttgttttaaatacgttttttttcggggagatgggtggtagggagggggagtacgtagggtagttatttggtaatcgttttaagaaaggtattaatttcggatttttttttaggtatagcggttttcgagggggatttggcgcgatcgcggtttttttcgaggtaggtagaaatttcgtagtagtcgtcgtcgtcgtttgtcggtcgggagtttaggattatttttattagcggtaagaggaggaggacggcgtcgggaggaggttgcgttcggtttcggtcgtttagtttcgtaatttatttaaaggcgcggcgttcggcggttttttcgtaaatatgtatttttcgtcggcgatagttttttagttcgggaagaggcgtgcgcggcgtcgttcggttttagggtaaggttttgattttgtttaattgtagtatttttcgtttttgttgtttgagcgcggtcgcgggataagggatgttggcgggcggtaggggcgagcgtcgcgggcgagaggcggttttcgacgcgagtgcgtagcgttcggttcggcggttttttcgagttcggcgagcgtagcgttttttgtttggtttcgcgggttttacgggtttttgcgggtttttcggggtttcgggcgtcgtcgttagtcggtcgggttgagagagtagtcgtcgcgttcgtagtttcgtttagtcggttgtcgtcgcgggcgcgagtttggggtcgtcgcggcgttcggcgtcgagcgttttcgagttgcgtttcgcgcgcggttcgcgttatttgtgtcgtcgtcgttttagtcgtcgagggcgaggtttttttcgcggcgcgcggtagttttagtttttatttaaatttcggcggtcggttcgggcgttcggttagtgagggagcgttcgtttcgtcgtcgaaatcggtttcgggtgcggagtatgtttagtgtcgtcgcgagagcggcgtttcgtcgcgcgcgttttattttttttggttttcgcggtagtagcggtagtcgcgggagagaggggaggaggtcgcgggttgggagagggtcgagtatttttgggaacgtacg

SEQ ID NO: 6420 - DNA, 1154 bp, Artificial Sequence; identical to SEQ ID NO: 6419
  Description of Artificial Sequence: Synthetic polynucleotide

SEQ ID NO: 6421 - DNA, 396 bp, Artificial Sequence
  Description of Artificial Sequence: Synthetic polynucleotide
tcgttgggaagggaaaaacggtttatatcgaattggatgtcggatggaaatttttttgcgttattagattgcgtttagtatagtagatggtacgagtacgtgcggcgtttagtttaggttttcggaggtagttgagttggaaatttcgacggaaagtatttataagtttttattttgcgttggtttattcgcgtgtacgtttattttttacgcgcgtttttggtttagaagcgtatagatgtttattgtttagagtcggtatcgttggggagatcgagcgatttgcgcggcgtatagtgcggcgttggtagggttttgggttttcggtcgggggttcgagcggttaagggatgggggtgggggcggggagagtggggggagggcgaaagatcgtcg

SEQ ID NO: 6422 - DNA, 438 bp, Artificial Sequence
  Description of Artificial Sequence: Synthetic polynucleotide
tcgcgtggagagaaatgagttggagagttatatcgagttaacgcgggatacggttttcggttcgggtcgggttaggggtgggaggcggttttttatcgtaggcggcgggatttttatgcgtcgagggatttaagtttttattttatttatacgtttattcggcgtcggggcgttgcggtttcgttttacgagtttagagtaggtcgtagtttgggttggggattcggtatttgggtagggtgagtttggtcggatatttttttttaggattattcgtattttatagtcgcgttaaaagcgttttatttttttgtttttcgtcgcgtaggttttttatcgacgttcgttcggaaggcgagagtttttacgtggttcggcgcggcgcggttttcggggatcgcgagtaataaaagttcggttcgtagtttttgtttttcg

SEQ ID NO: 6423 - DNA, 438 bp, Artificial Sequence; identical to SEQ ID NO: 6422
  Description of Artificial Sequence: Synthetic polynucleotide

SEQ ID NO: 6424 - DNA, 411 bp, Artificial Sequence
  Description of Artificial Sequence: Synthetic polynucleotide
gcggtggtgtcgatttatttgagtagttgtttcgcgtttagttcgtcgcgcgtagtggcgtgcgtcggttggatggtttggtttatgattatttcgtcgggcgtcggtcgttttatggttagggcgagagcgttacgtttgcggttttcgatattttattatgttcgtttcgttcgtttcgtttttttcgtttagttttagagggtattggcgtcgttcgttcgggtcgcgaatttttggtcgttaggtggtgggagttgcgagtgagggggttcgtattgttattttaggattatcgcgagtgggggaaaattagcgttttcgggttttaggagaagtttgggaagtgcgcggggagggggttttcgggtagataggtttggaaggcggtttttcgagagtcggagcgcg

SEQ ID NO: 6425 - DNA, 1137 bp, Artificial Sequence
  Description of Artificial Sequence: Synthetic polynucleotide
tcgcggttaaaacgtttagcgtcgggtttgggtttgcgaacggtttagtttaggttttgcgttagagtatcgtattcgggggcggacggttttgtagttttttagttttttttcgtattaattagttgacgttcgggcgtattggtttttttcgttttcgttcgtacgaaagttttgttcgacgtttgtagttagtatcgttcgtattgtttagggagggtttgcgtcgagatttagtggtcgagtgagttatagagtcgttggttttggggacgttgttttttatcgttttttatcgttttttttttttttgtattttatttcggtatttcgtattttttttttcgttcggtttcgcgtattttgtttagattttataagtattttttcggggtatttaggattcgacgtttttttcgcgtcgttagcggcgttcgttatttttggtacgtcggagggatcgttttcggttttttgcgcggcgttttttaggggatttttagtttattttttatttagttgttcgggtttcgacgttttatttttgtcgaattgggggatatcgaggttgagttcgattaagagttagacggttatcgagcgttttatgatttcgtttttcggacgtgatttcggttggttaggggtcgtcgcggagggtagtgtagtcgaggtggtagcgtagggtagtagtagatttcgtttttattaaagaatttaagaagacgttttttttttttagcgttttgttaaataaatttttggagagggcgagagtggtgattaaagagaggagttttttttttttttttgtttgcgtttcggcgcgcggaggtgggtgagtttcggggagtcgtcggcgggtttagtttttcgttgcgggtgggtttcggtagaggcgcggcgggcggggcgcgggttttcgcggtcgtttcgggtttgttgcgcgggtaggtagatttatcggtagataggcggatcgggcgttcggttgtcgttgtttttcgcgcggcggttgcggggtttttgatttggagaataatgaagcgtgagttggaggggagcgagcgggtcgtcgggagcgtattgtgtataaatagaggcggcgtgcgtgtgagtttgagtttggtaggcgcg

SEQ ID NO: 6426 - DNA, 2383 bp, Artificial Sequence
  Description of Artificial Sequence: Synthetic polynucleotide
tcgacgtgttaaggaaagcgcgtcgtaaggtggagcgttcgggttgacgatgagaaggtgagttgtgaattttgtatacgtttttaaataaaaggtttacgagcggcggtttcgacgtggggagtaagtaggtttttttggtttttgtagtaggcggatttaggttcgtttgtcgtcggatatttagaatttgttttcgtagcgcgagttttgtatacgttttgcgatcggtatttttggattttttaattattcgtcgtttaattttcggagagagggtttttcgttcgttgagttgcggggttgggaaggaaaagggggacgcgtttttgggggtttttggatattttggtaaagggggttgtagttttaggttttagttaaagggtttgggacggagtgggttagaaagtcgttaaattgaggattttttttttttttaagtcggagttttaggtgcggagtcgtttgtttatttattttcggagtacgttttgttgttttcgtcggcggacgcggttggttattgcggtatttttttcgcgatattcgggcgttagaaattcgtttttagagtttgttgtagcggatcgaatttgttgcggcggcggttggggtcggggcggtttgggcggaggaggttgaggttggtcggtcgtgttttgcgtttagagtattatatagtttagttataggaagtagagttggagatatagttttcgttttttttttatcgtcggcgtcgaaagcgcgcggtcgtagattcgcggagagggagtgattaaagataaaatttgcgcgttttagaaaagagttagggtttaataagtttttcgtcggtttcggggattttttcgggttcgggttttttgttttagttggagatttcgatagagcgtcggttttttgattgtttgcgaagcgagacgcggggcgtcgggtttagcgtagtgagcggcgaggcgcggcggaggtgtagtcggtagtttcgagcggtatacgttgtataatcggtttaaagtttcgagcgattttaggatcgttagcgggcgggggaggaaattataaaagttttggcgtaaaattttaaaaaatgtgaattttaaaagaaaaaagggtttgtacgtagagttcggcggattttcgtgcgtttcgaagacggatattggaaagttgtaaaagttattagaaagaaataggtaagtaaataaaagtcgtttttagaagaagaggagggtttttttcgggttcgttcggagttttatagggtaacgaagcgcgggtagcggttgcggagtcgggcggaggtgcgcggggtcggggcgtgcggttagtaagagagagggcgggaggttgggcgttggagaagatgcggcggtggagggcgcggcgcgggggttttagaggttcggcggggcgcggggcgggtcggcgggcggcggttgttagtgggggcgcggtcgtttatacgtggggtttaattcggattgagaggtcggcgtagagtgggcggggatagagtaagggagagatcgggattgaggaacgaggggaattagggttgggtgaggggaagaggaaggaagggggggagggcgaagggagggaagaggacggagattggggagaaggggggcgaattcgagaggaaggtcgggttggaagagggatttggaaagagggattggcgagttcgggtgcgagaggaaatgagcgggggatgggggcgaagttagggtaaagagagaagtgggaaaggagagggagggttaaggttcgggcgtcgagaggaggggttcggggggtcggttggagggggcgaggcgttaggcggttttgtttttcgttttcgttaattggtcgttagttttgttttgattgtttgtataaagcgagtagacggcgggggatggggcgattagggatcggatttgggaaaggaggtagtagttttttttttttttttttcgttttcgttcggtcgcggattagggattagggtgtttaagcgcgttaggtttggtcggattcgtagttgaattgattcgtagttgaattttttcgtcggatagaggtcgtaaggttgaggatgagaacgggtttttttgtagggtttcggtttttgatttgggatggggggattcgtagttagttaggaatagaggtttacggggttgttggttgtagttttaatttaagaaggaggagattttttttttgtttttttatttttatcgttttatcgggagcggcgttagtttgcgggattaaattaggggttgggagtttttagattgaaatgcgttttttattattaagagggagtttacgcggtcgcggggggtcgaggtagttagtcggcgtcgcggttttggggagttcg

SEQ ID NO: 6427 - DNA, 2367 bp, Artificial Sequence
  Description of Artificial Sequence: Synthetic polynucleotide
gcgatttcggttttggggttttgtttttgtcgcgggagaataggttttaatttacgaagttggttaattttagaaattcgagattcggtttttgagaagcgattgcgtgtttcgggattttgcgttaataattaaatttgggagaagtcgcgggaatgtttttattggacgttacgaagggaattggggttttttttttgggaagaaaaagttcgatttgtgtcggcgagagtaggttgttttgggttgggggtattttcgagcgttgcggcgggacgtcggggttcggggcgaagagagttagggcgcggatcgacgtttgttgtttttttgcggtattgttgttcgaacgaacgaacgaacgaacgaacgaagcggtttcgtttaggaaaaatatttttttgacgcgaagttacggttgaagtttcgggttacgtagaggggttagtaattttatgggtggtggggttttttatttttggacgtagcggggagtagcgggcggtttttttttttgtttattttttttgggggtgggggagttttgtgttattcgacgttgcgaggggttgttacgggttttttaggttgtgtttttcgcggggtcgtggttcgtgttttcgaggttgttatttttttgaggtgttcggagttaaagtagagggttgatttcgtcggttgggtgaggtagtattcggtgacggcggttatgattgtgttttgggcgtaggaacgagtttttcgcgttgtttcgaaggtttttgatttttcgcgttttgcgttgtttcgcgtcgtcgggtggatttatatacgttaggagtaaattgcgtaggattcggtcgttatttttttgcgtttttttatcgcggagattttgcgtttttagtttagcgttttttattttatttgggtagcgttgcgtttgcggttcgtgggtttcgggttcgttcgtcgcggattttggtttaggtttcggtttcggttggggtttcggatttagttttggttttggtattgtacggtttttcggtttttgttggttcgttatattttagcgcgcgaggtcggggttttttcggttcggttcgtttttttcgtcgtcgtcgttcgtcgttcgcggggaaggcggggatattggtcgggaggcgggaagggtggggggaggggaagttaggtgttcgtcgggatttgcggggagaggggcggcgcgtagtttcgtcggttaggggttttggtttttttcggggcgtaggttggggttcgcgcggttggcggtcgggtttcgaggtcggggagcgcgttttgggattttcgtggaggggttttgtcgtatgcggacgaagttagagcgggttttagtttggttttggggtattttttttttttgggtttagttttttatttgattcgtgaggggttggttttattttcgtttagacgggggttggtggtcgagtttggggttttgagattggattttttttttttttgtttagtttgcgggagggagttggttttgcgtgttggtagggagagttcgttgtttagagcgtggtagttagggaggtttgaggatagattttaggttttttgtgtttgggggtagggggtgttagggtggggtaatcgttcgatttgttttggttgggggaattgtttttttttttttttttaggggttgggttggtgaggaaagggtatattaattttttaggatagatatttttggggttttttgtttaatttttatgtttgtatattttttagcgattattttgttgcgggtttgcgaacggtgacgtttttatttttgtggtttcgtaggtcgtttttggttggttgtcgttgggagacgggttggacgtaagggaattgggagtttgttttttgtttatttttaggttatagggttttttagcgttgtttcgtggttagataattttgtgcgcgaagttttatggtggaaattagttggtcgaatttatttttggtatttcgaagtgtttagtttgagtttgtttgttgttgggattatgggatgggattatagggtaggtcgggttgtggtttgttttttttagggattggagcggttaagtttgttcgtcgacggttacgggttttagagcgatcgttttcggcgtaaggtgtcgggagatggtagcgcggtagtcgggtttgaattttttatgagatgtagttagtagcggcgtttttttgtttggttttcgtcgatagttgttgcgggagaggtcgcgattcgcgttatttcggcgttttgttagttcgtgtttttagggtcgtttggtttgggaacgtagagatttacgattttttttttaattttcgaagcgggaagtcggttcg

SEQ ID NO: 6428 - DNA, 1235 bp, Artificial Sequence
  Description of Artificial Sequence: Synthetic polynucleotide
gcgttagcgcgtgttttgtttagagagttcggcgttagtttatttttcgtgtagttattggttgggattttgtgtgtcgttgtcggttaatgaagacgttggagatcgggtttttgttcgttttttttttgcgtttcgggatgaggtagagattgaatagtcggcgagtaaattaacggtatttagaaagttatgtcggattcggcgtttagcgtttaagcgttaattcgttgaaagttttttagcgaaattttagggacgatttggatttcgttgagaggaattgtttttgagtgagatggttttagaggtttggaggagcggattggtaagtatcgggagggtagtgggagttttgtttttgtttggtgttttgaataaggtttttacggttatttattatgagatttcggaggaaagagagaagggtttcgttgtgggtaacgtggtcgcgaattttggtttggatttcggtagttttttagttcgtaggtttcgggtggtgtttggagttagtcgaagattttttgaggtgaatcgggagatcggagagatgtttgtgaacgatcgtttggatcgagaggagttgtgtgggatattgtttttttgtattgtaattttggagttggtagtggagaattcgttggagttgtttagcgtggaagtggtgatttaggatattaacgataataattttgttttttttatttaggaaatgaaattggagattagcgaggtcgtggtttcggggacgcgtttttcgttcgagagcgcgtacgatttcgatgtgggaagtaattttttataaatttatgagttgagtcgaaatgaatattttgcgtttcgcgtgtagacgcgggaggatagtattaagtacgcggagttggtgttggagcgcgttttggatcgagaacgggagtttagtttttagttagtgttgacggcgttggacggagggattttagtttttttcgttagtttgtttatttatattaaggtgttggacgcgaatgataatgcgtttgtttttaattagtttttgtatcgggcgcgcgttttggaggatgtatttttcggtacgcgcgtggtataagtttttgtaacggatttggatgaaggttttaacggtgaaattatttattttttcggtagttataatcgcgtcggcgtgcggtaattattcgttttagattttgtaatcgggatgttgataattaagggtcggttggatttcg

SEQ ID NO: 6429 - DNA, 3043 bp, Artificial Sequence
  Description of Artificial Sequence: Synthetic polynucleotide
gcgagggtttcggggtggtgggggtgtcggttttagtatgtggaggcgataggattcgtaagattttacgcgtcgtcggggtaggatcgtatagggtcgttatttatttatttggggcgtttttaatgggtattcgtgtattttagttcgtgcggtgagcgtacgtacgtcgtcgttgtcgcgtttatacggttttttaaagtcgggggaggggtcgtggagcgaaggagttgtaggtagatttttttttttttttcgagttgggaaaagggttagtttcgtgttttgtacgtttggttttgttttgtagtttgtcggtgagttaagagtcggtagagtagaggaggcgtacggttcgggtcgtgttattattttttggtttgttgatttggttaggagttggggatggcggtagtatcgcggaggtacgttttgcgttgtttttacgttttttttcgaaagtagtgtttttagggggaaagttcgtaatgttatttgtttcgtcggtaaagttttgggatgtcgggtattttttgaggagggggaagacgcggtatttttattgaggtcggtaggttaggaagagaagtttttcgggcgtagggcgtagtttagtttcggggattttttgggtttttcgcgtgtcggtcgggatgaagcgcgttttgtatcggattcgggattcgggggcgggggttggcgttggtagcgttagacgttgttttattttttttcgattttggggaggatagtaataagttttgttttagttattttattattttgttagtacgtgtagatttcgggttttcggagttcggcgcggatttcgttttgtttcgcgtttttttttgtacgtttcgtgttattttaagagtttgcgtggttttgggtgggcgtttggttttcggcgaaacgtttggggcgcgtcgcgtgggtgtacggtgtttttttttagtagttttcggttgcgggggtatatgtatttatttgtattttgtagggataggcggtttttttgttgggagtttttgttttggggattttcgggtgggttggtggcgtcggtttttcgcgtcgggttaaaggtggttaatattaaagttagggttatgaattggtttagtcgttcggtatatatggtttttggtattaatttttcgtcgggagatttggattttttgtgttttttttttttttttttttttttttttttttcgtcgtttttttttttttttttattttttttttttgttcgttttttttttttttttcgcggtcgcggttcggatagaggttatttagcgttttttcgtagtttttcggagagtatgtgattaggtcgttagtagcgtcgcgagtgttcggtaatggtagggatggtgttttaaatatttttggaagttttggtgttatttgaatgaaggagtcgagtaggtgttgtttcggcggttggattaattcgagatttcggtttttttgataatacggtcgggaggcggggtttgcgtttaattattataggaggaagtcgagcgtcgttgggagcgtcggataaagttgtcgatttggcggcggttacgcgtttgcgtgcgtgtgtatgagtgtgtgtgagcgcggtcggagatgcgtgcgcgtgtgcgggtgttttagggtaatggtcgaaaggattgtataatataagagcgaatttaagttttagttgttgttaaagggggacggtgtgttttgggatagtgtttttggggtttttggttcgcgttatatttatatcgggttgggaaagtttttttttttcgtcgtttggaatttagtgagatttttagtttagaggatttgataaattgaagtagttttttaggtataatgatgttgtgggttaattgagtatatatgggaatttttggttttgtgatattttgtattaaaaagaattttacgattgaagataggagtagaagtattagatatagtatttggtttgagtaattgttttattttttcgttttggtgggtcgtgtaatatttggagtgtcgtttttcgttttttttttaatttagacgtattttaggttgggttgtagggatttaggtgatagttaggatttgtattatttttaggagggtggtagggaggtttaaggtagttttgagttagttcgtcgcggagtatcgcgtgttcggaggttagagtttgaaaggtaattttacgcgtttttaaatatatttttgtatttttttaaagcgttgttcgttatttcgtttcgggtttttttttattttttagttattcgatggaagtggtgagaataaaaataaagataaaaaagttaaattcggggaagttatttttattttttttttttttttgttcggttttttttttaagaatcgtcgggtcgggatagttttcggttatttttttattcggttcgtggagggaaggagaaagttgggcgtcgtttggagcgtttttttttttgttgtgtgtgtacgtgtgtacgtttacgtttttttcgcgtcggggtcggggataggaattgttttcggtttcgttattttacggcgtagttcggggggttcgtagggttgggggagggcggggatacgagcgtcgcgtttaagcgttttagggtacgtattcggcgttggcgcgtattcgttttttttttcgtttttattttttttttggagaataggtgagtttcggtattagttttcgattttttattttcgtttcgcgtttcgttcgcgttttttgcggtaatgcgtttgggaagttttattatttattgtttaggcgacgcggttttgggttttcgcggcggggcgtattgttcgtttggttggggtcgttatgtgatacggttgggggagggggcgaggagatacgcgggtaggttattttttggtcggcgtttgatttttaaagtttttttttttcgtgtttcggttgtacgcgggagtggggaaggcggaggcggggggttaggatggttacggttggtcgtagttattcggcgtgtcgagtttttttgagtcg

SEQ ID NO: 6430 - DNA, 864 bp, Artificial Sequence
  Description of Artificial Sequence: Synthetic polynucleotide
tcgtaggcgcggagttgcggttgtagttattagtttagacgtggcgcgttcgtagtaagtggttggatatcgtagattaggttcgcgtttttagtagcgcggatttcggggttagtcgtttaggtagtaaagttaggcggtcggtttcgttagtagtcgatgagttttattttgtggattgtttagcgttagggattaggattcggagaggtgtttaggaggagtagatttttagattaggtaggttgtgtattcggtgattttgacgttatttaagggaagtttcgttatttcgcgttagtgtttgagttgtaattgtaaattgcgcgttttggtacgagtagcggtgggggcgggtgggggaaggagcgagtgattttttaggcgtttttcgttatttgatattagttaggtagtttttagggttagagcgttagcgtcgaagttaggtttattcgggaagttatttcggtggtcgcggggtgtttatgttagtattagattttttttcggaaggaggagcggggcgggttatacggttaggcgggttttttttttaaggcggggtgggtcgcgcgtttgcgatttttcgttcgtggttttggggtagttcgggttagttaggagaattcgcgagtttagcggcgtttgtatttgcggttttcgggagtcgggcggttttgcgaggtttattaggtttgagaggtcggaggtcgttagtgtcgttgttgaagggtggattaggcgggatcgcggattttgggttagatcgtagatttggtatcgcggattgggatttggatcggggattttgagttggattacggattgggggttggatcgcggattgggggttggatcgcg

SEQ ID NO: 6431 - DNA, 2071 bp, Artificial Sequence
  Description of Artificial Sequence: Synthetic polynucleotide
gcgagagtagcggagagaaaggagttagagaagtgcgtatttattagtttatcgtagttgttgagcgttatagaggaggtttcggttaggtcggttacgttttcgacgtagagatagttttcgagtaggggttttacgcgggtggtgtttttttcgttttgttattttatagtggtttcgggcgttacgaggcgggcgttgggtcgtagtcgtaggtgtaggtttcggttaaagatcgtgatattgtagaagaggtgattgttaggttttttttcgttgttttcggggaagttcggggttcggatcggggcggttttgcgggttcgtatttttgttttggacgtagttgtcgatattacgtgggatattaagcggttttgggcgttagtgcgtacgggtatcgttaggatgcgtttcgtttcgtgttttaggggttcgtttgtaacgggaaggggcgttagatcggcggagattacggagttttagtgttttagagattcgtcggtaagttacgtttttttagatttcgttttattgcgaagggaaggggtatttcgttaggcgattttagaagttagtttgtattttttcggtttttttgtaatcgggaaggggcgttaatagggttattatttcggggtttcgttattttttagtcgttttttttttcggagattttgtttgttaagagttttgttttttgtttcgtttagggttggggttcggtgggaattttttcgtgttcgaagggacgatttcgttagagagtttttcgatttttgtatttatcgtttttggtaggacgtggagttgttcggaagttatttcgggttggtttttttattcgtgtgttacgatttttcggcgggtttttgtcgttcgagtgtttttatcgttagttttcggagcggcggagtttcggttttttcgagtacgagcggtttgttttgtttgtttagttttcgtttagttcgttgtcggtttcgttttttcgagcgttcgaggattgggaggggtggaatagggttttttcgattttcggggattttttgcggggcgttttaattaatttttagggtttaaggttacgcgttcggtagtcggttttttcggagcgttttcggacgcgagtttcggcgtcgtttcgttttggtttttttttcggattcgttggggttgattttgcgtttttggtcgcggggtttttttcggtttttcgtttttatttttcgcgatttaggagtcgttagtgtttcgaggttttttcggtttaaggcgttcgggggcggtgcggggcgttttttgcgcgattaattcggtttcgaagttggttaatttggtttcgggcggggcgcgcggagtttgtttaagttaggttggacgacgtttggggagggggcggcggggtacgcgggatagggttaggtcggcgggggtttcggggagtaggggtcgggtcgtatttatttggggggtcggcggcggcggcgagtttggcgttcgcgggcggcggcggcggcggtaggagcggcggcggtagtagtagtagtagtagtagtagtgcggggtagagtaggcggcgagcggttttcgtcggcggatttatggtagtcggattgtagtcggggtttcgtattcgtagtcggcgcgaaagtttttcgcgagtcgtttagtttatatttgggggtagttggagtcgttcgtagttgtagtatcgtagggcgcggggcggaggaggcgaggcgcggaggggcgggcgggggagcgtggagggaaggcggggagagggaaggagcgagcgagcgagggaggtaggcgggagggagggaggcgagcgagggggagggcggggacggcgggcgttttagtttgcggtgattcggcgtattttggcgcggtcgtcgtcgtcgttcgttttttttttcgcgtcgtcgtcgtcgcggtgtcgggttcgtagcgaagtagagatatttcgaggcggcggtagagaagcgtcgcgggtcgggtcgggggagtttcgtcgttagttattttaggggtataattttcgaggagcggcgtcggtcgaacg

SEQ ID NO: 6432 - DNA, 1170 bp, Artificial Sequence
  Description of Artificial Sequence: Synthetic polynucleotide
tcgggttggcgggtattgagttggggttattacgtttttttagagcgtttgcggaggtggcgaaggtttggagagtatacgaggcggaattcggatcgagtgagttttttgagtcgtttgcgtgggacgtagggagagggcgaataacgtttttaggcgttgaatgtaggggtaaggagttagcgagggtggttggagtaggttttgttagttgttattaagtttttttataggtttgggggtttggggttttttggaaagattttttcgtcgcgttgattagtacggggttcgttttcgtattttgaaggttgtcgcggtttttcgttatttataattaagtttaagattaaggttgtaagttgaggtcggggtattgataacgggaatgaagttataggggaagaggataattgggacgggttggatttatatttgatattcgggaaatttttagagcgtgtggtgtttttgttagcggtagttattggtggagttgaggttatcgttattgtcgtcgttggcgttttgtttttggaattttttagtaagatggtatttattgtttgttttttttcgattagtatttttagtcgcgttttttttttttcgggatacgtattagttatatattgtggggagaagatgggttatgtaaatgtaagttaacgcgtttttttagttatttttgtataatgtaataggaatagcgattcgcgcgtacgaatcgggtagtgtgcgcgtgtgtgtgttcgcgtgtgtgagcgcgtgtgttagcgtgcgttttcgcgcgggcgtgcgtttgggtggatttttgcgtggtttgggaggtaaatcgggcgtttttttaagtcgttttaatatgatttaggtttttaaatacgtgaaagcggtagatataatagggatgcgaaggaaataaaaaataattggggaagtggtgttaagttatttaggttttgaattgaggacgagtagtgcggtcgcgtttggggcgcgttcggaaattatttttagtttgtggcggttattgttttatttaaatttttttgcggggagagttgagcggatttttggggggttggttttgggttagttttaaatttttcggttgtatttcgcgtggttttatcgacggcgcgtttcggcgtagtttttggcgcgggttcg

SEQ ID NO: 6433 - DNA, 2168 bp, Artificial Sequence
  Description of Artificial Sequence: Synthetic polynucleotide
tcgcgttgtagttaggtagagtttcggggtagttcgtttatcgcggaggagttattttggagttttacgttttttttatattttatttatggattggaaaggatgtttagttattcgcgagtttgtttgatattgggatggaaagttatagttcgtaggttggagtgaggcgcgggaagatgtttggtttttgtttcgcggatttggtagtcgcgttttgcgggtttgtttattgaattgttgaggattcgttcgtgtgcggggattcgagtgttatttttcggagcgttattttgcgttttagtttttaggttagataatatttggaaggtagggtagggttgttttcgtttttattttttgcggaaggatggtaggattcggcgtagcgacgtagtagcgggagggtatagcgatttgtatttttagtttttttttaggatataaggttgattttatttttcggatagttgtaaagtttttgttagaattaaatcgaattcgcgtttcggagaggggtttttggggtcgtttcgttgtagggcgtggggagtggagagagggaaggggaagtttggggttgggtgtgcgcgcgtgggagcgcgtttcggagcgtttcgtatttttttattttattttcgggggtagtttgggaaggagggagtggtagtcgcgggaatgagggagtaagagaaatttttttaaagtgacgttttaaataggttcggatttagaattcgaagttaaaggttgttagaaattgggatttttcggttttttttgtagttttttttttttcgtttcgaagttcgggcggtttgttggttgtttgttttttcgttttcggtttagaggtttttggttggcgggcgtttcgtcggtcgtcggttttttttttgaaattcgtcggcgtatatgaggtcgttgttttcgtcgtaggcgttggcggttttttcgcggtgttcgtggtgatgttatgtttcgttattacgcgggaggagaggagggcggcgtcgtcgggttttgggtgaagagcggcgtagcggcggcggcggcgggcggggggcgtttgggtagcggtatgaaggatgtggagttcggtcggggtagggtgttgttgaattcggtagtcgttaggggcgacggtttgttattgttgggtattcgcgcggttacgttcggtggcggcggcggtggtttgagggagagtcgtcggggtaagtagggggttcggatgagtttgttggggaagtcgtttttttatacgagtagttagagttgtcggcgtaacgttaagtatcggcgggtgtagaattatttgtataacgtgttggagagatttcgcggttgggcgtttatttattacgttttcgtgtgagtattcgcgttttttgttatgttcgttgtaggggattattgtttttggttttttggggcgtgtttcgcgttcgcgtttttgggttttcgcgcgcgtgtatacgtggtggtttttattttttcgtacgtgttcgtggttttttttttggagtttttttttttttttagttttattttttttatttttatagtttgaatttttttttcgaggatatttaatgaattgttcggtagttttaggttttcggggcgagagttaggtagacgcgggatttaggttgcgcggataattgggagtaattaggttttaagatacgtaaattttaatcgaacggggcgttcgggagttagggaatgtaaagggaggataggcgttcgtgtgaggtttgagagtatattggagaggttaggaggtgatggcggggtaggacggggagaagtgagggggtatcgagggttaggtttttagttttaggggcggagtaggggaagttgttatttggagagagttgttaggttttaagcgcgttcggaaatacgtttcgttattatttagttattattaacggaaaatttgttagtgtatgtagttttttttgttacggagaaggtggttaaggtttagaggaggttagtaggttaggcgaagtaacgttttcgcgttgtagggggcggggaggtagcggggaatttggggcgtaggaacgcgggcggaggtgcgatagtagaagcgtaaatgggtcgtttttgatagagatcgggtagtgggttaagttttcgtttgtggcgcg

SEQ ID NO: 6434 - DNA, 2053 bp, Artificial Sequence
  Description of Artificial Sequence: Synthetic polynucleotide
tcgacgtacgattcgtttatacggaataagaattttacgaaggatatttggggattatattggtcgtattcgagggggcgggaggcggaaaaagtatttttaaacgtaattttgttaggttttatttttcgtattttttggttttcgggatagaagtttttttggtatttttcgtttagtttaggggttggttgttcgttagaacgaaatattttttattgattacggagagttttgtagggagtcgaggttttcgttcgggttaagggaaggcgttggcgtcgcgggagataagaagaggcggaggcggaaaagaagtggagaaggaaggggtggtagagggagtagcgtgcgggaggcggcgtcggcgtcgggttgttggcgaggcggggtggggtggagtggggtgtgttttcggcgggcggttagtaagttagttcgttcgagcgtcggcgtttcggtttttagcgttcgttcgcgatagcgatcgggattggcgtttcgttgtttcgatcgtcggcgagtttcgtttttttttaggttttttattgggttttttcgcgagtttcgtttggttcggcgtggggtcgttcgttttcgttagttcgggcgttcgtcgtttcgtttcgttcgcgtagtttttgtcgtttttttcgttcgcgttgtttttggttttttttcgttttagttttatttatgaagcgcggttttattacgtgttaatgagtttttgttttgttttggtagcggcggcggtatagatttcgtcgagggaattgcgcggggagggatttgagcgtagcgttcgtagttttaaattttgtttggggcgggggattcgtcgcggcgttagttttggggttagaggggataagttttttcggttcgcgttatttatttttttttttttttttttttttttgtcgtcgcgttttcggaggttttcgttgttatgatttcgttgtgttttcggatatttttatattttgattaggttaagaaggggttggtgtatgcgtcgtttacgatttcggggttattaattatacgttttcgggtagcgcgtatcgttaatatttttcgcgggggttacgtttggggtagcgggttgagtcggaaggggaaggggagcgggagtttagaggtcgaggcgcgtcgggttcgggggtgcggtttcgcgtttttttttttcgcgtaaggtcgttttcgtggtaggcggtagcgagttgggttcggggtcgggttgagttttgggatcgcgttgcgtagttttcgagtcgttcgttatttggttgcggtcgcgcggttatttgtttttcgttttcggggcgtcgtttagtttcgcgttaggcgttttttttagcgttcgtcgttttttttcggcgagattattcgggcgcgtttcgttcgtcggttttcgatgtaaatagttgggtttcgtaggcggttggtttcgcgtttttcggttcggcgcgtttttttttcggttattcggggtttcgtttttcgtattttttcgttggaggaggacgttttattttagggtcggattgggggttttgggattcgggggcggtagcggcgggcgtttggggagtcgcggtgtgtttagtagtcgcggtaggaattaggggatatgttcgttaattgtttttattattagtcgtcgtttgttttttgtgtgtacggattaaattttaattggtttttatatttattatggtgaattgcgaatttttaaataagtttgggtcgtcgtttttgtcgaggaggcgtttttttttttttcgttttcggggttttgtagggtgtgcggcggcggtcgtggttatttagatatttttatttttcgtgagttggatcgggagaggatcgtacggtttttatttgacggagttacgttacgtcggttataagggtttcgtgttgggcgttgggttcggttttcggtcgtttttttgtggtcgttttggcgtttattttatgatattttgtcggtgtttttagatattatttcgtatcgtttcgttttatcgatttttaggttttttcg

SEQ ID NO: 6435 - DNA, 1679 bp, Artificial Sequence
  Description of Artificial Sequence: Synthetic polynucleotide
gcgtttttattgcgtgtttagcggcggtggaggcggcgtttttttgtattacgaatacgcggttcgttaaggcgtcgttttagcggttgatggtttcggtttttttttaaaattttcggcgttcgatttcgtcgcgtttttttaggtaggaattttgcgattttattttttgggttcgttattagtttaggtttgcggtgcgcgggagggtattaagcgcgaggtttttttcgcgttttcggttatttcgtcgattttaggtaagtgggggtagtttaagaagggtaaggagtagttggatcgtgttttggatatgagcggagtcgttcgaggataagggtattttttcggtatcgtgggcggtttttcggcgggggtcggtagtttggttttttatttcggcgtgcgtttagtttttaagttcgtcggtttagcgagggcggcggcggtcgtttacggcgatttttatcgggaggagagtagtagtaagtaaggagtcggtttcgttttgggtaggttgttgggcgggggtcgggcgtgcgggcgtttcgggagcggggagaattcggcggcgggcggcgcgggttattattattattattacgcgtattattattattattttaagtgtttgttcgttggggattcgtcgtcgtcgtcgtcgtttggtttgttttgttttggggttttgcgcggtttttttttgtttttcgttttttcggaagaggcgttcgtttttaagtacgtggagcgcgtttcgttcgtagtcgtcgcgttgttaggagcgcgttatgcgtagttgttttttgcgtcggggttgtttttcgagcgttgcgcgttgtcgtttttcgattcgggcggttttaaagtttattcgggtggtgagtgtagttatttgttcgtcgttatgtcggtttttatagtttataacggggagttgttttacggtttatcggttattatcgtttattattcgtttaaattgtatttcggcgggttgttgaagtattcggagtttattttttattttagcgggtttgtagcggtcgttttaagtttcgtcgagttggggtcgttggttagtatcgatcgagagatcgttatgtataattagtagttgttcgagatggttgtcgggaagggtcgcggacgtttggattcggggacgttgttatcggtcgtcgcggcggcgggaggtatcgggggcggcggtagcggaggtagcggcgtaggtaagtttaagatcggttatttgtgtttttattgtggtaagttgtattcgcgtaagtatgggtttaagatttatatgcggacgtatacgggttataagttatttaagtgtaaagtttgtttgcggtttttcggcgattttagtaattttaataagtatattcggttgtacgtcgagggtaatacgttttatcgttgcgagttttgcggtaaggtatttgtgcgtcgtcgggatttggagcgatatgttaagtttcgttattttggttagagtttgttcgttaaagcgggcgacggttcgggtgtcgagttcggttatttttcggagtttggggattttaagagcgacgatagtgacgtggacgtttgttttatagacgattagagcgatttcgaggttgggggcggcggggagcgcgatttgtaacgagttttttcgggaaggggcg

SEQ ID NO: 6436 - DNA, 1474 bp, Artificial Sequence
  Description of Artificial Sequence: Synthetic polynucleotide
tcgtttttaaaggttcggggaaggaggttgcgggtgggtggcgcggatttcgggtttttagttatcggcgttttttcggggttttttgatttcgttttttaaaggaggagggttcgtggtaacggtttttttcggttaggcgttttcgggacgcgggggtgaggagtgagcgtcgtggtttattttatttttcgagcggggacggagtgggcgatatcgcgcgttcggttgtacgtaggttttgcgcggttcgaggcggttttatagggggcgaggaggaatttcggagattcggcggagagagtagagacggagtttattaaggggtttgtcgtcgtagagcgcgggagtcggtattcggtggggtcgagggttcggggacgttggggttgtttgatttgagcggcggtcgttgatcgttgagggtttttgtggtcgtagcgtttagattcggggagaagggcggtttttaagggtcgggagtttttcgagggcgcggttagcgaggagggatagagggcggcgttttcggttgttcgggcgcgtagaataagtagttgtcgttagggtcgataaagttgtttttcgaggggttgagatttaattttcgtttttcgatttagttaggggagcgcgaggtcgtatataattcggcgcggggggaaagtcggttgtagttgcgttttttatttttattcggttggtttttggcggggagtttgggtagcgtcgattaaagttcggagcggtagtttcggggcgcgggacgcggggtatacgggtttagttgttcgacgggagttcgacgcgcgtttttcggcgggtcggcgggttcggaagtttcgttgttcgggtcgggtttttaagttcgtagtcgttttgattaaaataggtatcgcgacggcggcggtaggcggcggtagttagggttggggtcgtatcgcgtacgcgtatgcgttcgtcgtttcgcgtttttcggcgggcggagttcggcgtcgcggttaggattttttatttcgttttcgcgatttcgttgcgggtttgtatattcgaggattcggtttgaaacgttcgtttatttatttttttgtcgtttcgttataagattttatttttgtttgggtatgagtggggggcggtagtttcgtgggatcggcggtattcgtcgtttttttttacggggataattcgagaagtgcggttcgggtagggagagaaattaggagagaaaatgagaaagagaattttcgtttttttttaaagttggacgatttattcgtatattttttttttgggagattcgtttataatttagtataaatagggaatagttcggaaagcgcgcgagttttcgttcgattgtggcgggggaggttgaacgtttggtttatacgggtgtaggacgcgggggttaggttttttgttgcggaggaagagggggaagaggtcgcgcgggagggatttttgatacgcg

SEQ ID NO: 6437 - DNA, 675 bp, Artificial Sequence
  Description of Artificial Sequence: Synthetic polynucleotide
tcgcggtgcgaagtttcggattcgttgggaatcgtatagttttcggtatttttggtcgtatgtttgttagaggtgggtttcgggaaatatattcgttgtttttttaataagcgtttttcgttttttattggtttttcggttttcgttttttatcgttttttttcgtttcgtagttttcgagtggcgttagtacgttcgtcgggtatgggttttaaatgtttattagcgggagtttaggcgtttttgttttggagcgcggtcgggagtaaaatcgtaggagtgggagggtagcgagttagttggatttcgagtcgcggagcgcgttggttttgtttcgtttgatgattttagagcgcgggtttaagcgtcgtttatgtagtatttttgagtttcggggaaggagagttaatgaaaaaatatttaatcgttttcgttgcggagagttatgagttgtttggatgttatgtattaagtttatggtttttcgtagttttatttcgtagtcgtttatattttttattattaggtacgtgttttttttggggattttgggaaggagtgcgcgtttttcgtttgcggcggtatggtttgtacgttaaggtttgttgtgttttcgcgcgtttcgggcgttcgattacgatcggcgtagtcgggatgcggggattgtcggagtcg

SEQ ID NO: 6438 - DNA, 1133 bp, Artificial Sequence
  Description of Artificial Sequence: Synthetic polynucleotide
tcggtttcgtagtttttcgcgtttcgattttttagattttcgggagtttaggggagttaggtgttgggcggtgcgttcggtgtcgtcgcgttttttttcgttatttttggttttttcgttattcgggtttttcggtcgttttggatgtttcggttgtatttttgttttatgattttagtttttttttttaattttttttttggttttttttttttcgagcgcgcgcgtatatatatattcggttcgttttcgcggagtggttttgggagtacgatcgattttagtttagtaaatcgcggttatgtcgtttagatttttcgtttcgaggtttcggttttcgtcgtcgtcgttttcgcgtcgttttttttcgtttagatatcgtcgtttgcggtcgtttgggcggtagtttttgcggtttttaaagttggttttttgggagggggcggtagggagtaggatgaaggatttgttgtaggaggaggatttatatatttgggcgaagggaggggtagcgtcgttgttgggacgcggcgcggattcgtattattgcgcgtagtagtcgttgtagtagtcgtcggggatcgcggagtcgggacgttttcgttcggttcgcgtttcgtttttcgttttattttcgttcgtcgggtttagtaacgtagggtgtttaggagtcgcgggttgcgtagggaggcgggtagcggttttcgcgcgtttttgtcgttttcggagtcggcgcgcggcgagcgtagggcgagcgcgcgtcgggcggcggtcgcgttggggggcgtgaggcgagcggcgcggagagcggtaggggcgaaatttcgcgggttagatgttcgagggcgcggcggcgttgttaggttgtcgttgttgtttttgcgggtttcgagcgcgttttcgtaggcggtattgttcgcggcgcggcgtgtgtatcgagcgagtgaaggtatgtgtggcgggcgcggttggagttgtcgtcgtcgtcgtcgtcgtgttagtaggttttaatgtttgttattttttaggacgttggtagtagtagtagttcggagttttcgagttttcggtaggtttgcgtgttttttttcgcgatttgattggataaagtgggggttcgacggtggtcgacg

SEQ ID NO: 6439 - DNA, 1808 bp, Artificial Sequence
  Description of Artificial Sequence: Synthetic polynucleotide
gcgcgtcggcgttggggatggggtgggggcgttggggtataagggcgtaggggcgtacggttatcgatagtcgggtgcgtttagtttgaggtcgcggagaggagtcgaattgggatgggtggggggttttcggttttaatattgtttgttagttttagtgcgtttaagttttttcgttagagttgtttttttggaggggtttttcgtacgtattgttttttttatttttttggttggaatttttcggtcgttattgtagtgtttagagatgttgcgttgtagattcgggattttttaggcgttttttttcgtttttttgttaaagcgtaacgtttgtatttttttagtttttttttttttttttgaaattgaaagttattgaggtcgtttagggttgttgttttagtagttttttttttcgttttcgagttttttttcgttttttatagttatttttttttttttttttttttttgttttttttttttttttttttttttgtttttttttttttttttttttatgtggtgttttcgggagtttagtttaatattggagcgttttttgttcgcgtacgttagaagtagttcggggttttttcgtcgttttttggttatggtcgttgtgtcgacggcgttcgtttttttgcgttttaggggttttcgtcgttgtagtcgtagtcgtcgtagtttttgagtttaaggggtcgtcgttgtagtcgtcgtcgtcgtcgttcgttcgttcggatttcgtttgcggtagttgtcgtataatatgttatttgcggtcgtttcggcggtttttggaatttcggttcgcggcgatgttagttattttagcgaagtcgtcgtagtttagtgtttggataatttgaaagtataatagttggtttttttgtttattcgttttatttcgtttgttattatagtacgtttatcggatgtgagaggagaagtttcgttgttcgggtattgtttatatacgtttaatatttatatatattttaaaaatattaaatataattaataattaaaagaaagaggagaaaggaagggaagtattattgggttattatgtatttgcgattgattttttggttttttattattttgaattttatggaatatatcggtagttaaaacgtttttcggggaaggcgttagcgaagaagtaagtgtagggttttttacgcgtttgttttttttcgtcgcgtttatttgtcgggtcgttttgtttgttcggagtcggtttttaattgtagcggttttttcgttttgcgtttcgtagaggagatgtaggttcgggttttgggggtatggacggcgttttttatttttgtttttcggcgtttttgtttttcgtagtattttagtcggtgcgaggggcgggcggacgcggcgttaaggtggttttcgttttatggtaattttaggttcgcgggaaagttcggttttgggttagattcgtattcgggatttgtgttttttttttgaggatcggataggggtatttagtcgaaggtatttgggatttttagacgtaggatgtttttgatcgttgagtaaatgataagggaggcgcggtcgcggtattcgtttatttagcgtaatcgtttcgcgcggggagatttcggttgggtttttaggttggatttcggtagtcgaacgttcgttattcggttaggaagttagggagcgagcgtttgcgcggtcgtattttcgatacgtattagcggagttaaagggcgcgcgaggcgatggggttcgcgtgtttgcgcgtttgtagagttgtcggacgtttttcgttcg

SEQ ID NO: 6440 - DNA, 1323 bp, Artificial Sequence
  Description of Artificial Sequence: Synthetic polynucleotide
tcgaatattcgtattgtttatcgaagattttcgtgttttagttttttttgttttttatttttttcgtttatggttttcgtttttttaagtcgtttttcggaattttttgtcgggtcggcgggaagcgtggatcgagcgggttttggtcgcgtttttttcggttaggtttggtttagttcgcgtagcgttcgcgtagttcgttagggggatttcggttcgtcgggcggtatttgaggagaaagcgttcgaggggcgtggagttagggttttgcggtgtttgtttcgggaatattgcgagtcggttggagttttttagtcgtttcggagaattgggggagtcgggtttttggttcggtaatcggtggtttcgcggtagttagaggcgggttttacgggtgggtgtgttcgttttcgtacgttagttttttagttcgggaagagcgtttgtaagcgggtattttgtttttaaagatgggttttgtttgcgggtgatttgggttttcgaagtgtaattttgtggtcgggacgcggatcggtcggtttgggtttttgtagagtagattttgtttgcgttttttaggaggagtgggtggtaggattggggttttttataggttttggggcggcggcgagattggtacggttcggggtcgtaggcgcgtagttacgtttttggaagttcgtttcggttttcgtttttaattcgttttttcggggttttatggcgtgaggtttggggttgggatttatttggagtcgagtagaaaattttttttttttcgttttcggttttttttgttttttttggacgcggtggcggcgtcgtttgagcggcgatttttttttttttgttcggtttgttgcgttcggtgtttttcgagggtaggcgcgtttggattttgcgttcggatggcggcggttttttgtgagtatcggtagcggcgtattttttgtttcgaggttttcggtgttttttcggcgcgggtataggggcgtttttatttttcgttcgtttgtattttttgttattcgttttttcgtttgatttattcgttcgcggtggtcgttcgagttttgggatggggagggagatcgcggttgttcgcggcggtcgagattttcgttgacgttttcgattttgtcgtttttttcgttcgtttttagaggcgttcgacgtttcgatagtttttggagtgagattaggattgagaatagggagaggcgattcgatttttagggttcggtgtttaggataggtgaggggaaggaaagggtgttgacgggagtggggaggtgggtgggcggttatcgtagtcgaaatcg

SEQ ID NO: 6441 - DNA, 1501 bp, Artificial Sequence
  Description of Artificial Sequence: Synthetic polynucleotide
tcgatagtggtttttcggtttagggaggagagcgcggtcgcgggtttttttttttagtttggaggttgtagtcgttcgagtcggttcgggtgggggcggggtgggggcggcgcggagggtacggagattacggcggcgttattcgggatatttagggtttcgaggttttgggcggtttttacgcgagatcgtaaattatgataataggtagttattcgaggttaaataaaaacggagtgggtttttcgcgcgtcgtcgtttttcgcgtttttggcggtttttttcgaggttttcggcggttttacgagttcgtagtagtcggtggcgacgtcgttttcgttttatttttttgcgtaagtgcgaggttgtcggtagcgcggcgtacgtttcggtcgttttcggttttcgcgtaaaatttttattttgtttacgtgaagttgtcgttgttttagagagggggaaagagttgcgggaaaagtcggggagtgacgattgcggcggttgggcgcgtttttttattttttttttttttttttttttttttgtcgtagttcggagttttggttttttttttttttttttttttttcggagtcggttttttttttcgtttcgtttttttttcgtttgtgtacgttatttgttgtggggtggtcgaaggggatgttttgtttttattagaggtatagcgcgaaggggaaatttcgatattggaaggaacgagaataaatatttaattacggacgtattgaatcgcggttgggatagatatttcgggaattcgaggcggatcgggcgacgaggtgagtgatttttttttttaattttcgttttagggttttcgggggagtttgagttgagagaatttttaaatttttcgggaaagtgcgcgaggtttcgtcggggacgtcgagcgttgggtattgaggacgcgtagttggacggtgcgtgggcgtttgcgttttcggggggcgtttggaggtcgggtgttttacgtttgagggttcgggtcgttcggatcgtagcggtgttttttgttttagaagacgtttttaagttttaagggtttttttcgagtttgtttgtttttttcggggtcggcgcggagtttgcgcgtaacggagtttatttagtagtttagcgcgcggtttttatttgtatttcgtttttatttggtagaggcgcgagtatcggggttttttttatattttttttatgacgtgtattattttttgatgattttttagatggtttaggcgcgaggatgttgatttagagtttttcggagggttataggcgtttgggttttttcggtgtcgggtgcgtgtgtattttaaaggttcgcgttttaatttttaggtattgatcgggttttttaattgcggcgattttattttaatagtttttatgtggcgtggattgaatgttttttgtagtttgttagggtcggtgaaattagaggcgttttgttagagtagtcgcgtttattggttcgagtagcg

SEQ ID NO: 6442 - DNA, 1744 bp, Artificial Sequence
  Description of Artificial Sequence: Synthetic polynucleotide
tcggtgggtcgggggcgtggcgagattttgttttagtggagggagggtttatgtattgtcgagacgtcgattattagattttgattttgtcgtttttagaaaaattattggtagaagattcggattatggttaatttgtcggttataagtttttttaagaagcgttacgtttgggtgtagttggtagggtatattggtgagtagtggggcgggtgggcgggtgttcgcgacgggaaggggttgggcggcgttgacggatgtcggtttttagggagttttaaggcggcgggtattagcgggttgattttgaagcgttgttcggagtcggagcgttattgtttggcgcggttgatggttgacgcgttgcgcggttgcgtgtttgttttttacggcgtggtggagcgcgacggcgaaagttatttgtagttgtaggatttgttcgatggtttcgacggattttgtgtgttcgattgtaaaatgggcgttaggtatgcgtgttttgttaggtcggttggggggattaagtaggggttcggggtcgggatagttgtttgagggggattcggggcgagtgttcgaaggggttttcgtgtgcgtttttttatgttttggtcgttgtttgcgtttttataggatttatttagaggaggagttgattaaggttcgtgagcggtttaagttgcggaaggatatgtataagaaaatgttggcggtggattttgaagtttttacggaggaggagtacgcgtagcgcgtcgttattaagtcgcgttatatgtagtggcgggaaggtattagttttagtattattttcggttttcgtatcgagggtattaaggtgaggtaggcgcgtttcgttggtatcgtcgtagttttattgcgcgttgtttttttcgatttttcgttttcgtttcgtttgttttttcgtttttttttatcgtttcgtcgttttttgtaattgggaggtatcgttgttttacgttgtttttttttttattggcgggttcggggtttttgatatttttgttttatatttagaaagcggacggtttttgtagtatcgattttaagattacgcgaagtcgagagtaggtgtttcgcgtttttgaagagtttgtgtaaggagatgaggaagtgttggtgagagcgggattttaaattttgaggtgttggggagtttgaagtcgaggattgtttttgttatttggtttagtgttttcggttgtgtttttattatggtttttatcgcgttggttcgtaattgttttacgtttttttttttttgggttacgttgggcggggttttgggttttttttttggcggtatttgttaagtatagcgtgggtttcggttttttatcgttagtaggggtttatttggcgtttagttaatttgttttttttttttattttattttttgtagaggcggtatttgaatcgtttgtagtagattcgggatattttggaggtattcgagttttttaggaggtacgaggtaagcggcggttgttcgggtgttcgggtcgcgagggttagggcgggaattcggtaagggcgtttttgggtagggtcgcggtttgacggtgcggggttcgtaggtgatcggtagttcgtttttttttgtgtacgattattgttatcgcgtcggcgtgtggtttatcgatttcggtaagattacgttttttttcgatggttagattttggattatcggcggttttgggaggagggtaatcgcgaggacg

SEQ ID NO: 6443 - DNA, 1801 bp, Artificial Sequence
  Description of Artificial Sequence: Synthetic polynucleotide
tcgttttcgggcgataggggtttttttacgtgaatcgacgtttcgggtttcgggcgaggcgtagggtttagggcgtagggcgggtttcgtacgtagggcgggcgcgcgggtatttttgtggttaggcgatttcggttcgttttttcggagtttagggattttcgaggttggcgcgggttgttcgcgataaggtgttagtagtttcgggttcgcgaggagtagtttttattcgcggttttcgagtttagttttgttttttcgttattttttagtttttcggtatttatttagggagatagggaggtagagagaagaggagaaagcggtcgtgtttgtatttagtttttgtcgtagtattcgatgagggatagtagggaggttggcggggaggtagagattaaattatgattttatcgattacggaaagattattattatttatagtaaaggaggtttcgatgcgtttattcgggtagcgattcgcggttggtgggcgtttttcgttttcgttttttcggtggttgtggaatttatttcgcgtcgtatacgttaggatttttttttttttgattaaggggaggggaaggaataaaagagattttttattttttatatatatatatatatatatatatatatatatatatatatattttttcggtattttattgttggttaaaggatttattttcgtaatttttttttcgaatattttttttatttgagtagtgtatttttttaaaggtaaagagagataagggaggaaatatagtatttaaggtgattagtcgattggatattgttgatggtatatttttttcgtttttaattaatcgtataaaattcgtaatatttcgcgttttcgcggggtttttcgcgtttttggttcggttttttcggtcgtttttagtaggcgtttcgtttttcgcgggaattttgggatttggtcgagcgtttttcggcgggtaggatattcgttcggttttttgtagtagttgagggcggcgagcggatcgcgtttaggtagcgacgcgggatttaatttttcggattcgcggcgcggttttcgttttcgtttagggcgtcgcggttatagttgagattttagcgtcgcgtagtcgttttcgtcggggtatgggcggtcgcgtttttcgtttttttttttttttattttttttttattttgaaaaaaatttatttattggtgtaaagtagatattttgatgttatttatttagtatcgtttgttttggaggtagcgttttattcggtcgtttggaggtgtgggtagcgcgtcgatgggttcgggggagcggggttgggcggttcggttttttagcggagtcggtttgttgttattcgtttaattttagtatttagtgggcgaggagagagggagagcggcgaggatgtagaggagggggagggggaggagggagcggtgggcggggagggagcgagagtcgttcggtagcgcgtatgcgtttcgcgggtcggcgtagtttttcgttcggcgcggtcggaggggtagttttttagtttttgcgcgcggtcgcgagagtttcggtttcgtttttttttcgggcggttttcggtttcgttcgatttcgcgcgttcgtttgggcgcggcgtttatcgtgcggaggggttcggtcgggattttcggtttcggtgacgttcgttcggagtttcgcgggaggttcggagtttcgagagtttttttgggtgatagcggtttttcgttcgggtttttgtaattttattcgttcgtagttcgcgcgttgttgttttgggttgcgcg

SEQ ID NO: 6444 - DNA, 1801 bp, Artificial Sequence; identical to SEQ ID NO: 6443
  Description of Artificial Sequence: Synthetic polynucleotide

SEQ ID NO: 6445 - DNA, 1684 bp, Artificial Sequence
  Description of Artificial Sequence: Synthetic polynucleotide
gcgttgggcggtgagtttagttaggttatttttgcgaggatatcggtcggcggcggatagtagtacgcggcgtttaggattcggtttttttagagtttaggttattgtagtttttaggggcgtttcgagtttatttggagggtcgcgaggtttttaggttggaaggaggaatagggagaaggaggaatagggagatttggggtagtgttataattatagaaaagggagaggcgaggttcgttgagtttttggtttgggtaataaggtatattgaaaattgggttttttttcgattcgtatcgtgcgcgttttagaaatgatagttagacggagtagggtttaaggacgttgaaaatttttgacgtgggcgcgtcgggtgcgggtagggacgtggaaggattgggttagttataggaattatagcgttgcggatcgggtgaggggtttcggttcgagtttttatttggggcgtagaggtgtttttgtaaggggataaagggtatttttcggcgcgatgggcgatttttttagttagaaaatgagagggttagacgaggggaggaatttttttagttatttggttcggtatagcgatcgttttaagtttagaatcgttaagttagttcggggcgtttcggttttttcgtttcgcgtttcgttcgtttttagttcgggtttcgtcgttttcgtcgtttttgtcgttcgggtcgttttcgtcggttttggtttcggtttcgtatatcggtagggggcgttcgagcgtagttaaaaggttcggcgggaggtcggcggttttagtggcggagcgcggttgtcggtgtgcggtcgggagcgatcgtcgcggggtaggggcgcggcgggtatcgcgtagagcgcgtagaatagacggacggcggcggggattcgacggcggcgtttcggtattttttagatttcggttagcgtttttttgttagtcgtaagtatttagtttcggtttatttcgggttttcgatggttttcgaggtcggggcgattttgcgcgcgtcgcgtcggttgttttgggcggcgttgttgtttttggtcgcgttgtttttcgtcgttttttcggcggcggttttaggtacgcgtcgcgttcgggttttcggcgttttttagtttttcgcgtatttttttgcgttcgggtttcgtcgtttcgtttagtgttggttacgggtcgtgttattagtttgtgcgttttcgttattcgcgggtcggggtatttggcgttttgtgtgggtggcgggagcggggacgtttcggtgttcggggatcgtagcgcgttggcgtttaattttgtcgtcgttcgttttggagtcgggaggttttagtcgtttaagtgtttcgggagatttaggtatagcggggaaaaaaggaaaagaaaggcgatttttagcgtgcggattggggtaatgtttttttttgtttagaatttttcgggagcgtaggtggttattttatttttttcgcgtttatttttcgcgaggtaggatgacgggcgtattcgggagatcggagggaggtagagtagggttgttttagaaggtcgtgggggaaaggttgcgagttgtcgtagggcgtcgggtgtttttgcgttttagaggagaagcgttttagtgttagttcggttttaggcggtaggaggttcgcgcgttcggggggaacg

SEQ ID NO: 6446 - DNA, 6657 bp, Artificial Sequence
  Description of Artificial Sequence: Synthetic polynucleotide
tcgggttcggttcgttttgtttttttgttttttggaggtttgggcgttttcgcgtagggattaagggttggatagtcgtaggtaggggtttcgtttttggtttttatttttcgtgtttagtaatttcgggagtaggcggcggtattttttttatgtttcggttttaattacggttttagtttttttaatttcgttttgtaggaataagtgtggtagaggttcggggtcggagggcgggcggtcgtttcgcgggttggacggagtttttgggttgcggagaggtcgttggatttacgttcggataggagtttcgcgcgtttattttcggttcggttattttcggggcgcgttgtttgcggtttttcgcgttatttttatttttgtttcgggatttttttcgggaaagatattcggggagtagtttttttttttttagtagttttttttttttttttttttttgtttttttgacggtgtggggtttttcggtcggaggggcgcggcgttggtagcggggtttagagtgtcgcgtttagcgcgcgttgggggtttcgggtttcgtagtttcgtacgcggtcggtttgtgaagcggcgcgcgggggtttagtcgggcgagggcgtttttgagtttggtttggaatttttagtttatacgaaagtcgtaggttggggaaggggcgggtgggagcgggagacgttttgggaagtcgtgagatcgttcggcgagggttcgggattattagggagcgacgggggatttttcggtttagagttcgagggcgcgatttcggattcgttgggatttcggaggtatatgaagggagagggaaattcgttaaatcgaatttttcgggaatcggaaggcgtcgggtcgtttttacgttttttttttttttcggtcgaaaggcggggggcgacgcgtaacggggagggaagggagggaggggtcggcgattttaggggagggcgagtttttggggacgcggggtcgttaggggttcgacgattttttcgttttattttttcgtttttaagtgtttcgtttttttttcgtttcgtaaacgcgcgttttgcgggttgtgttttggttttcgcggacgcgcgcgtttatagagggtttgatttggggttaatttttacgaggttgtcgggcgtttgtgagtatagtcgtgtttttatttaggggtttattttttagcgttattagggtttcgatttttagattttcggacgttttttttttaaatcgaagtttgggagtttttgggtggtttggggcgggggtagggggcgagcggggcgggttaggaggagggggcgaggtcgttattcggttttttacgtcgttttcgcggttggttttaatttttttttcggagttttttttcggttattttttagtttatcgacgtgcgggtagcgatttcgtttttcgttttttcggtcgttttcgtcgcggttttcgttttttttttattttttttcgcgcgtttttttatatgaaattttttattacgtttagaaagaatgtgttataatttcggcgttgtcgcggtcgttattattgcgttcgcgttcgagttcgagtcggagtcggagtcgtcgttttttcgtttgttcggttagtttcgggtttcgagcgcgcggttttcgtcgtcgtcgtttcgcgttcgtttcgcgtttgacgtagtgagcgtcgtagtttggttttcgtcggtttcgttgggtttcgggtcgtaggtcgagtttagtcgggcgggtttcgggaggggtcggtagggcgggagggggaggagggttgtttggagttagcgagttcggaggaggaagaggaggaggaaggaggggaagtcgtcgtcgtcgtcgtcgtgttcggggaatcggggtgcgcgcgttttgttcgttcgcgatagtgtttttagttcggggttcgtatttcggtttaggtaagaaggggtttgaggggtagggggttgttcggggtcgggggatttttttgtcgtcgttgcgggatcggagggttttcgtttttaggggaggtagggaagaggatgttttttggggggggcggcggggggtagcgtagggtttttagcggttttcgtagttcgggttattttatttttggtgttttgatttcggcgttcgcgttagggtcgagttttttcgttcgcggggttttggatgcggcgttcggggttcgcggttttcgggcgtttttatttatttatttaggttcggaggcgggcgtattcgaagttagcggtcgtcgagtttgggtcggataaattttttttttcgacgtcgcggttggaagggttaggatttcggatttttagggttagggaggcgtcgcggggatttcgaaatttttcggagcgcgttgagagtaaaaagtcggttgggtagaaagagggggagggggttgggcgcgttttcgagtgcgttggggtagtcgcggcgttttaagttgaattatagacgaatttttttttatttgaaatttggtttcggagtcggaggtggggagggagtgggttgtgggtgtttcgatttcgtaaagtcggcgtgggggggcgtagcgtttcgtttcgcgtcgtttgaattttcggagggggtgttacgggattttcgtttttattttagtcggtggttgggttttgtcgatcgttgcggagttttcgggaaggattcgttcgcggttattaataggcgtcggtgattttagtttttttcggttcgggaagttggcgtggcggggttgggttgggttgggttgtcgagtggggcgggatttcggggtttagagcggatttttagtttttttggtttttttttcgtcgtttttttttttttgtcgtttgttttttttttatttttttttttcgatttcggggtgtcggttttttttcgaattttttttttttttaaattgtacggtggttattcggttacggttttgggtcgtattcgcgtaattttagtattattttcgatcgagtttttcgtcgcgggttgagcgcgagttttcggggttaggttgtttagggaggagtagggattttttataattcgcgtttttttttttaatttacggcgagcgtaatatattcgttcgtttttgcggttttatttgagggcggggagaggtcgttgggggtagtttcgggggttgtggagggtaggggggattcgcgaagtttttggagcgtttagggatgtagttcgggcggcgtgtgtagggaggaagtagcgtttcggcgttttttttttagcgtcgttttcgcgcgtttcgagggtttaggagggttcggttttttttattttatttggatatttaggtttgagtttgagtggatttgaggatttgggggacggggaatacggagtttttttttttgtttcggtgtttgtagagtttagtttttaggtagcgtggggatttttgtttttagggttagcgtcggtttcgtttttcgtttcgttaatttcgggatttcgtcgttttttaggttttaattttttagttttatcgtcgcgtttttttttcggttttgggtttgggggaggggtagggggcgtggagcgcggcgttgggtttcggatagatgttttcgcggcggcggcgtcggcgttcgggtaatagtaggtcgttaatcggcgcggttacgggggaggggcgattcggtcgggatttcggggattcggtcgtagtcggacggcgtagttttcgttcggggtggggggggggggcggtcgcgaggattcgatttttgtcgtgtagttcggtttttagttttttgtcgtttttttttttagttttaggtttcgttttttgttggggttttggttttttaggttgcgggatttcgttttttacggtttcgcgcgcgtatttttattcgttttttaagttgatttttgaggtttttcgtggattttagatttcgagtgatcgtagaattgatttttggggttaggtagtatcggttaagggcgttttgaagaggttttcggttttagtttgtatttcgaggaaatggatttattatgtttgtttttgggaagtagtaggacgttttggcgcggttttttcgggtaggcgtttagtatagcgtagggtatacgggggatatttgcgaaggtaaaggaggtttattttagagtttcggttgtatttggttagtataggtttgggggaatttgttggaaatggggatttagtattttttttggggtttatgtttggtaggcggagtggataggttggggttcggagttcggtggttattttttgtataaggttggttaggttagaagttggagggtagtttattgggattttttaagcgtgattaaggaagttttgggggtcgattagtttttttttagtggagttgtagttggggagattttatagataggtagggaggagagggtgtttcgtttatcgtcggtttcgttttataggtttaggtttggtatattttaggtttgtagtatttatttggtgggtaaataaggatttgtttttggtttgcggtttggttttgatcgtggtttaggtcggggtagagggagaaaggttatagtttaggtgttttaaattatcggtgttttttttgtcggtttttggggttgtgttgggtttttagggtttttgttttttagtatttgtatgaaatcgtgggggcgtattggttttcgttttagtatttttttttaaggttttgtatttttattacgggagttttatttagttagtcgaaggaggttataagttttaaattattaaattcgggttagtgttgggggtttgggagttaaggtagtttagagtttatttttcgattttggtttttggagaattttaggattcgggcgtgttaggttttgtagtcgggttaggtcggtttatataggattgaacggcgtcgtgggcgtttatttatatttttttttcggtttttatatattataggatttattttgatttgttgtttttgaattgagttaatttttttgtatgttcgttgaattgtttagttgttggcggcgagcggagagcgtgtcgggggtattgaggtcgggaattagaggcgggcgggggataggaagcggggagggggcgtcggcggggacgcgcgggttgcgcggggattggagagggtttttaggcgtcggtcgttttgcgaacgcgggtttgtttaggtatcgtcggggtttgttcggtttgagcgtggagtttcgaggtttttgtcgggggtttaggttgtttttggggttttgttttcgacgcgttgtgtagggttagattttgggttttttttgatttagtttttttttttgtaatatgcggacgggggttttcgtataggtaggttgttagggtgaaattgagtcgaagagtgttttagaattttttgaagtttttatagaggttggggtgaatgaaggaaggaagcggggttagggttgggtagaggaggttcggtttgcgttttgcgtttttcgtttttaggtttttgttttttcggataaggggcggatcgacgggaggatttgagaacgttttggttttgtttgaggtggtgggagtcgcgggtagtttgtttagttaatagttgtcgtttttattttttttatttatttatttattttttttattttttagatgtgggcggggagggtcggggacggatcgcgaggacgttttttgcgttttttaggattttttttttttttttagtttttgcgcgtcgtcgggagagggaaggagcgggttgtcgcggggagtcgaggagagtagggggttcgggaggttagggagagaaggggagggttagaggtttcgagtcggattcgcggcggaggaagagggggtggaagggagcgcgtaggcgggtgagggagcgagggagggagagaaggagggagggagggagggaaggggggcgggagggggtagggcgagtttgaattttttttcggtcgcgcggcgaggggcggggtcgcgcgcgtagatcgatgggcgaagttggggaggaattttaatttcgggagcgaagttagagtttgaaggacggcggcggttgcgggcgtagtttcggaatcgaggtcgggcgggtaggtaagcggcgagcgcggtcgggcgttgaatttgggggatttgggattcggattattttcggggagcggcgcggttaagtttttcgttatttcgaatttcgggcgttttcgagtgcgtagcgtgcgtttttagtttttgttgcgtttttaggtttggcgcgcgattcgagcgtagcgggtaaagttggaggaatttggcggcggcggagcgggcgtaggtttagttcgataaagttcgggggttcgggtcggggtcgttgtcgtagttcgtacgttgtttcgtgttttcgagaggttttttttttagcgtttttttttttttcgttttttttcgtcgttcgtattttgttcggcgttttttagacgcggttttttgttttttttttttcggaaattagggggttgtttttattttttggtcgagtcgttgatttttttttaggttcgtatcgttttttttgttgggtcgtttttttttcgacgttgcgagttttttcgtttcgcgcggggatcgtttagttacgtacg

SEQ ID NO: 6447 - DNA, 546 bp, Artificial Sequence
  Description of Artificial Sequence: Synthetic polynucleotide
gcgggcgtttcggttattttattttagcgagaagacgaggttgtttgggttttggttttttcgggcgggggttaggggttcgtcgattttttttagcgtttcgggcggcggggttcgagaattaaggtggttttcgcggttttcgtcgtcgcgcgttttttttttttttttcgcggattttcgcggtcgtcgtttatttcgcgtatttcgttttttggaaatttagtagtcggggggcgaatatcgcggcgtttttatgggaatttggtttcgggtttagagcgcgggtagttggtagagtttggggggcgcggcggcggtagtagtaggttggagggcgcgcggcgggggttaaggggatttggtcggcgttcggagtcggagtcggagttcgagtcggagttggaggcgttcggagtcgtcgacgttaaatttcgagtagatggtggcgggggcggggcgggcgggggtacgggggggttttcgggttcgcgttgttaatcgtttaagttcggttttttttttttcgcgatttcgtcgttttcg

SEQ ID NO: 6448 - DNA, 288 bp, Artificial Sequence
  Description of Artificial Sequence: Synthetic polynucleotide
tcgcgagaggaagagagttgagtcgttgtaattttgggtttgggattgcggggacgggacgggtgggaagcggttaaaggcgtagcggtttttggttagagtcgtagaggtttgagacgtgggtcgcgtttcggtttaggagatttcgcggtcgcgttttaatttttagtttttcgattgcgattgcgattcgggaaaacgtttacgtttttggaaaggaagttttattatagggagttgattcggtgttagcgcgtagtacgttttcggttcgtagtgcgtcgcgcg

SEQ ID NO: 6449 - DNA, 947 bp, Artificial Sequence
  Description of Artificial Sequence: Synthetic polynucleotide
tcgtatttgtttcgcggttcgtttttttgtatatacgttttcgagtcgggagagttttcgtagtatttagagaagagatcggaatataaaggatgaacgaatggggagggggggtttggggggttgggagaacgaaaatattagttgcgtttttaatatttaaggaaggaagtggtagcggggacggggagaggatgggaaggggatgttgattgcgagttggggcgggacgcggtgatgggaggggatcgggtcgggaatgcgggaggcgaggggagcgacgggatttgtcgtttcggcggtcgggtagttaatcgattcgttttttttaggaaggagcgaggggagggtggtttagagagaaagcgtcgcgcggtttcggttgttttcggttcgggatatttaaatagattaaagaggattcggagtggagttcggagcggatttcgtagttcgcgttcgtcgcgtatttattcgcgcgttcgttgttgggttttcggtagtcgcgttttttgcgttggcggagtcggaggagtttgcgttgggtcggcggggggcgggcgtttggggagggcggagagagggttcgttcgtcgggatttttgttcggttcgggcgttttagagtcgcgggattggtcgtcggaggttgcgggaggggttcgggttagattttttagaagttttagagagagtcgttttttttttttcgtgtgattttttgggagtcgggttgttgacggtttagcgtttagtcggagttttcgcgcgtttttcgggatttattcgggagatgtcggggtttttcgggaagagtgggttgcgtttgtttttcgcggtcgtttcgttttttcgttgcgcgggatcgtggggtttgagagcggcgttttttcgcggggtcgaattcgttatttatagtggagtgtggattgatatcgcggttttacg

SEQ ID NO: 6450 - DNA, 1313 bp, Artificial Sequence
  Description of Artificial Sequence: Synthetic polynucleotide
tcgtgttatacggcgttgggttttgtaagttgttgtttgcgtagtcgttttcgtcgttgtcgttttcgggcgggtgtattagggttcgcgtgggcggggcggggtcggggcgggatcggggcggggtttgttttttcgacgcgtcggtttcgtttttcgtttcgtttttttttagcggatcgtaatgatttagaagtttaggaattttacgtgacgttatcgggggggtgatgtaatgtattttaaatagaatgtattgtaatttttgtttagtttaacgtggtttttttattcgggtttcgtttttgttttttttatatttgtttggtaagtttttaaaaatacggttcggttatttttggggtttttgtatttagttatttttgttgtatttgtcgtaggagttatttcgggagtgtatttgtttgtaggggttggttttcggtagtagtcgcgaggttatttggtttagtgggtaggttatagggtaaggagtagggaagatgcgatgtatttttttttggagggtgatttgtgtttgtaaatattttggcggattagagggaagttcggtttcgagtgttggtagattgtggaattcggttgtgttttgaggttattttagagatttcgcgtcgcgtgagtgtcggagcgttcggtggtcgtcgcgtcgcgcgtttggagggatgttaacgtggagtcggcgtcgagttcgttcggcgtgcgtgcgtgtgtgggagcgcgcgagttttttgacgcggggattagttatgaatcgggggtgtgtgtttgtttttagagatttggtaaggtgcggagttttttagaagtgcggttaagcggtagcggagacggcgagttaggaattttttttcgcgtttttagttttttagcgtggcggcggaattttcggagaaagtttgtaaatttttagcgggcgcggcgaggacgtcgggttatttagggggcgggtgggcgcgcgcgtagggggttcgtttttttcggtgcggagttgtagttgttatttttttcgtcgggttgtcggttgtagcgggtgggcgcgcgttcggggaggggaggtcgttttcggagggcgtttggttttcgttttaggcgtttcgggttggagagcggcgaggtttcgttcgttttagtttattttttcggtcgttttttgttttcgttgtttttttgttggtatcgttattttttttcggtcgttgttttaaatgatagtttcggttcgagttttggcggcgtttaggtaatttttaagatttggcggcggagtttttttttgcggtagattttcg

SEQ ID NO: 6451 - DNA, 848 bp, Artificial Sequence
  Description of Artificial Sequence: Synthetic polynucleotide
tcgttttttcgtttagttcgcgatgtttagttaggcgcggcgcgcgtttgttcggtattttttcggcgcgtttttttttttgcgtttttagatttcgatttagagcggatttcgatcgcggtaaattatggttttaggtgcgtttcggaggtagttgcgggaattagttatggtttcgggttaatgtttagggataagtatagggatagggatagagatagggattgggattggattttagttttaagagaaagtatttcgggtttattcgtattttttttttatttttaaataaagttatagaagcgattagcgcgtagttaaagggtttggaggtgaaaaggagggttgggtggggaggagagaaagtgagaagggagagaaaagcggcggttgagtaaagcgggagtcggcgcgggcggtggggtttgattcggacgtcgcgtattcggtttcgtttcgcgtttagcgtttcgtttattttttggtcgcgtttgttttcgcgtttttttgtttttttttatttattagtagttttgttgataagcgagaaaattgataagtgagaaaagtcgtttgttagcgttcgggttggtgtttgggttgttatcgcgggcgcggagggaggggcgcgcgggtatcgtcgtttgtcgggtatacgttgggtttcgatttcggtcgggtatatttattttcgtagggtagtcgcggttattatcgatttgcggagttgcgtgggttttcggaatttttattttaataagagttcggtttcgcgcgtaagtaggagggaagggaaatttttattttttcggggttagggtacgtagaagtcgcgaggtttcgcg

SEQ ID NO: 6452 - DNA, 2406 bp, Artificial Sequence
  Description of Artificial Sequence: Synthetic polynucleotide
gcgtagcgttatagtcgcgattgcggcggcggcggcggcgtagggggcgggggaggagagaagcgtttatttcgtttcgttgttttcgtagtagttttggttttagtttcggcgtattagagcggtttttgggaatttttgggtttgttgtttcggcggtcgttagttgggagtttattatcgttcgatggtatcgaatcgattcgtgtagttttataattttagtttaatttcgaggagttagcgtagatcgtttttcgtttttagttgcggcgaggtaagggttggtagcgttcggacgttttcgttttgttttttttatgtttaagcgcggggaattatacgttttcggtgtagaatagacgatcggggttattagggttgggcggtgggagtgggggttgggagtattatttttggttggacgtgtgtttagatttatcgtttttggtttttaggattttatttttttttgtatttttaggtgtcggtttttttgtattcgttttttacggggttcgttcggcgaagggtagtcgtagtttatatttatttttcgtttttaatttttgttttttttgttcgtcgtagttattcgtttggttgggagtaagttttttttttcgttgagggtgtagagagcgtttagggcgttaagagtagaggggttaaagtttaagcgttattagttagtcgaaggttttgagtttttagggtcgcggtcgggacgtagggaggttaggacgcgacgttcgttttatttgtttttttagcggttttttggtcgatagcgtcggtttgggggagggcgcgcggtcgtagacgtagttttttagtaggtaaagtttcgagggtcgcgagttcgagtcgttttcgaagtagaagagtaggttttgtagtagcgcgaattatttggtttgttattttgtgttgttcgaatttcgtttgtttaggtagtttttgcgcgtgtcgtttttgcgcgttagtagttttagggacgcgacgtggttattatttagtcggatttttttttgtatggtgtttagaggttagcgagattttacgcgtttatatttttttcgcgtagtagtttttcgttcgtgcgcgttgcgcgttgtttttttttggcgttcgttcgttcgttttttttagtttttttttttttttaaatatttatattttaggatttggcgtcgagtcgcggttttttgaatttagatatattatttttcgttggaatttttttttcgtttcgtagagttttagtattcggaagatgtcgttcgattttttttcggtgtcgggtaaattgagggattggcgatttgcgcgttggcgaggggtaggcggagttatgtgacgtcgatttttcgaagagttcgttttagtagcgcggatagggatatacgtacgtagtttcgtcgaggcgtagagtcgcgcgtaggttgtaatttggtgttttttttttttttttagatatatatatacgtatacgtatacgtatatatttaaattttgttttttttttttttatttttttttttttttttcggatgttaaaaagtaaattagattaattttcgtttaatttaatgaaatttcgaaggttcgttatttcgggagtttgcgtttttgcgttttatcgcggcgtattgtagatttggggttaagtgttagttgttatttttttttttaaaggttcgttttttttttttattttatttttaatacgaggtggaaggaggaaggtgggtggcgaaatagagttgtaaaagcgtttagttttagtttttgtatagttagtcgggttatattgaattttagtattcggttgtattttcggcggtttttttagttatttgaggatagtatagggggtgagatggggtggtggttggtgaacgttggttattttattttatattattttattttgagagttgttataattatcggcgttatttttcgtgtattttgaggtttggttggcgagtcgttgttgggagttttttgtaaatattttttaaagtttgaaggcgggttttaaacgtaggcgtcggggattatgggagtttttaaatagttgcgttggcgtaatgatattttaatgatagatttttcgtttttatttttagtttttattcgtttatatagttatacggtatttattcgagaacgttatagcgttcgtatgttgtatcgggagggcgcgcgggtcgtcgggcgagtcgggagttggggcggggagcgcgtatcgttgtttgtcgtagagggtagcgagttcgtttcgattcggagtaagtcgcgtttggttcgggcgttttgtagcggggatgggtgttcgcgtagttttgtgaaggaaagatattattttttcgtacggaaattgcgtatatttttttttcg

SEQ ID NO: 6453 - DNA, 1218 bp, Artificial Sequence
  Description of Artificial Sequence: Synthetic polynucleotide
tcgcgtttgtagttcgtgtattttttttcggagttgcgttagggaattacggacgaattggaaggggtcgagaagggttttggttattatttttagttttaagttttttcgtttttttagatttgggatttttttcggggaggattttttggcgttttttggtagtttttcgtcgtttagggtcgatttttttatttttagttttcgggcgggggaggtttcgtacggtcgtttagacgggttggggcgggaagattgtagcggttttgggtttattttttgtttttttataatttttagtggagttgggttaattttaggtatagtttattcgagttaggcgaggtttagaaaggtttgattcgtttggtagttttaacggatttgttttcgtagtcgttgattagtcgttgacgagcggatttttcggtcgttatggcgattgtgaaatgtagggtggagcgtatgcgttcgaagttattcgcgcgggtagtttttgcgtgtttttttgcgtgtttttttacgtgttttttagcgcgcgtagtatttcgtttttgcgttttttcgagcgtgtagttttcggtgagggtagttttacgtatagtttttaatattttttttagcgtttgtagttttcggtgcgcgtagtttttaagtttatatgcgtagtttttattttgcgcgtagttttacgtatagtttttaatacgtttttagttttattggcgtagaatttattatcgtttgttttttacgcgttttattgggagtgtagtttttatttcgagcgcgtagttttacgtagtttttttatattttttttagcgtttgtagtattttttagtgcgtatagttttgttagtagtttttcggcgcgtcgtttttgtatcgtttcgggttataattttgttggcgattaagtttgaagaattttttgtggttttatttttttttttaggtttagttttagttttgatattttaattaaaaggttatacgttaattaacgaggtattaaaggggaagattttagttgaaagaaatgattgtaggaagtgtgttagggaagttaacggaatcgttggttcgtcggtggtgcgttcggtattaggaaagtttttacgatcgttgaggtatcgggtagttagtgttcgttgttaacgcggagggaacgggcggagattgcgggtaatacgtggtagagtcggcgtgagttcg

SEQ ID NO: 6454 - DNA, 1848 bp, Artificial Sequence
  Description of Artificial Sequence: Synthetic polynucleotide
acgacgaaggcgcgtttttttttattcgtttatattatattttcgtttttcgaagtatagttcgggttggagaagttttagcggcggcggttttcgcggcggaggttttcgcgcgtatttattatgtttttcgttttttttcgtttatttcgagcgtcgtgcgcgttcgaagttcgagtcgtagagcgttatcgcgtaaaggaaggagttaggcgcgtgcggggttcgcggagtttttttgaattttttggatgggggcggaggcgaggggcgtcgttattattgcggtaaatttcgtttttttttcgggaggtgaaattttttaattcgttttcggtcggttcgcgggtcggatttttcggaaaggattttttaggaggagggagcgaatgtaagttttgttcggacgttttatcggcggttttttaaatttgggcgttttttgatagttatttttattttatttcgtttttacgttggggattatttttggtttcggaggcgcgggcgcggtcgtaggagcgggttgcggggttcgcgaaataaagaatttcgagcgggacgtatttgcggcggtagcggttgttaagttttcgaattttttatagattcgcggacggggcgtaggttggcggtttttcgtttcgcgcggtcgcgggcggttacggttattgcgagcggtcgggttgggcgcggggtgcgttcgtcgcgggtatggtgcggcgcgggcggtcgcggggcgcgcggggaaggcgggagagcggcgcgggtgagtgggagcggcgggtgtgcgcgagtgcgagtgtgcgagcgcgtcggtggcgttgtttttgttcgttttttttcgttcgtgtagtttcggtattagtttcggggatcgtgtaattcgattttttttgatttataagttttgagtgatagttttgatttggtttaatcgcgggagggaggggaaagagaaagaaagaaatttttagtcgtacgttttttttggtatttaatcgattttttggaaaaaggttttatttcggtttggtgtttcgtgttgggtggagaagtttttcgtttcgatttggtatcgtttgtattatttacggggtggaaaagttgtttttcggtttcgcgtttttttttcgcgcgttttttttttttttttttttttttttttttttttttttttcgcgtttttttttttttaagttttaatagatgttgtcggatttttttcgttttttcgtatttttttttttttcgtttcggttttcgtttagtttttttttttttagttattttcgggttcggaggggacgcgttgagtagtaggacgtttgtcgtcgtagggggcgaagttgggaaaatttggagtgttgttcgttttatttttgttttttcgttttttttaggtcgcgtcgggagttttcgtttttttcgttcgtcgggtttttaagttcggagtgggttttagttgcgaggcgggcggcggcggttgggaggcggcgcgtcgcgggtcggggtcgggggttgggggggagttcgggcgtcgcgagttacgcgcgcgtttttttttcgtttttcgtcgtcgtcgtcgtcgtcgtcgtcgttttttttttttttttttttttttttttttttttttttttttttgttttttttcggtttttatatagatatatttatgtttgtttttttttttttttttatttgatttcgcgttttttcggcgcgtcgaagttttatttattcggcgaggggaagggggttcgggcgtgatgttattcgcgtttttttttttttttttttatatcgttaggatattttttaaatgcgcgttttggtattcgtgttgcg

SEQ ID NO: 6455 - DNA, 2119 bp, Artificial Sequence
  Description of Artificial Sequence: Synthetic polynucleotide
tcgtcgtttttttagtatagttttcgtagttcgtattcgtttatagggttttcgcgattttagagtttagggaagaattgtcgaggggcggggggttttttatgcgtatggaagggacgtacgttttaggtttttattttttttttgatttcggggatttttggacgtcgatttttcgtttcgtaggggcgagggttttgggttcgtagttagacgcgggttttttttaaatttagtggtttggttttattgagtgggggaaggtatatattttttaagattaattgtttcgtaatagggaatttcgtaggattttagtattttcgattttttaggtgacgttaagagggtgggttttattgtgtacggtggggaaattgaggttcggaggggataaggaaggtattcgaggttacgcggttttttcggcgggcgggaacgtaggacgcggagttggggcgcgggttgtgcgcgtttaggttcgcggttttcggggttcggttgtcgtagcgcggtcgtcgtcgaggattacggtcggggcgcgggcgggttttagtgcgtaggcgcggcgggcgggaggggacgcgtttcgggcgcgcgcgcggggtagtcggcgttttaatttcgttcgtttcgcgtttcgcgtttcggcgtttcgtcgttcgtcgttcgttcgtttcggcgtcgtcgttcgcgtttcggcgtttcgggtcggcgaggggcgcgttcgcggtcgcggtcgttgtatggcgttgagatggcgggggcgtcgcgcggcggaggcggcggcggaggcggcgcgggcgagttcgggggcgtcgagcgggcggtcgggataagtcgtcggcgcgggtttcgggcgtgcgacgaggagttcgtttgtttagagttggaggcgttgtttcgcggttatacgttgcggttggagtaggcggttacgttgaaggcgttggtcgtttttagtttgttggcgggcgcgttggcgttggtcgagttgttgggcgcgtcggggttcgcgttcggtttggttaagggtttatattcggtgtattgcgttttttttttggcgttgttcgtggtaattaacgttcggtttttgtaggtgttttagttgtagtaggtcggttagttggcgttgttttttagttttattttcgcgttgttttgttgttttttcgcgttgggcggtttcgttcggggtttcgtcggggtcgttggggggttagcgatcgtcgaataaggggtttggtagttttttttggttattttcgtgttttatgttttgttgttcgtgcgtagtttgttggttataggttttgggttcgtggtggttgcgtcgtatttgttggttatagttattttggttttcgttaagcgtttacgtttttggaggacggtaagtgtagtcgcgtattttttatttggtttcggatatatttgttgggacgatgttgggaatgttcggagtcgggcgcgtttttttttatgcggcgggtggggatattgaggtttcgagtgggggtgtgtttaaggttatttttacgagttggggacgtagtcggggttggtatttttcggttagggttttttttagagttataatttacgaagcgtttttggcgtgaagtgtggagaggggagataggtgtggagagagaaaggtttggttaaggttagggagttgatgagcggttagacggcggttagaggggttcgtcggttttttgtcgtatttatttttatagagggattgaaagtgggcgaggagagtagatttttagggtaagttttaaggtcggttttgcgcgtagcgttgggttttttttttgcgtatttagagcgcgtgttgggttcgttttttaattttgcggattcgagggtggtatatgggtggtgggaaaggatttcggtttttttagttttgttggttatttttttgtggatatgttttcggtttagaaagagtggggtttgttaaggttaaatatagtttagtttttgtcgttgttattcggcggttgttttgattttgttttttttgcgttcgaattttgttattgtttttttagtcgggcgggcgagatggttgtaaggacggggacgttgtttgtttttcgcg

SEQ ID NO: 6456 - DNA, 562 bp, Artificial Sequence
  Description of Artificial Sequence: Synthetic polynucleotide
tcgtagggcgaaggggtgcgttgttagatgtggtattttcgttttacggagatatacggtgttttatacgttagggagaggtttgagacgtaaagagtcgtcgagcgggttgcgggattgtttcgttgttattttcgtttgtagttattttttcgtacgtatttgtgtgtgtatttaggttaatatggaaggcgttattttaatttttgtcgtgagtaggtgggagggaagagagacgagaggtattttattggttgtttgggaaaatgaattgtattttttttttttttgcggaggattaattttttttattttttcgggtgggtattcgtattttggggtcggagtttgaattcgggagttaaggggttttagttttagggacgtgaagttgagcgtatagcgggcgtttttagatattggggaaagtgttttacgatgtttcgagtttttttagtttcgttagcggggcgagcgtgagggtgtttcgatcgattagcggtttcgggtgtagggtggcgggttcggcggcgcgcgttttttttttttttttggcggttcg

SEQ ID NO: 6457 - DNA, 1404 bp, Artificial Sequence
  Description of Artificial Sequence: Synthetic polynucleotide
tcgtttcgttcgaggcgaaatcgttgaaagttcggttatttaatttttgtttttataattcggaatttcggatattagcggttttagttgttggcgcgcggtttttttttagttttttggattttaaagttttttgttatagcgcggcgttttttttttttgttaatttttttttttgtattgtgacggaggtaaagtaatttagtttaggaggttgaattcgagttattagagaaggagaaatagtgtcgaaaacggttcgtgcgttattagggtagtttattaacgtattaattttaggttcgttgggtagaagtcgggaggaaatattttggggatcgtatttttggttaaatgtttagtacgagttaaattcggtttttttaaagcgagttaagtttattattataaagagatttttcgagtgttttgttttaattatattttagatagttagttttgtggttgttgtttgattttaattttttttttaaatttaaaaggatgtatatttttattagacggaacgtcgcgatttttcggcgaagaaaaaggcgtcgtttattttttttttaaaacgttataataaaaattattacgtttttttttttttttttttgtttttttttttttttttagattaataaggaaaggagcgagcgagggcgtagatgttttttggttaagtatttttcggatgttttcgattaaagcgtttttaaatgaatttgtagtttgcggaagtcggggatatatttatagacgttttttgttgtttagattaggaggggtggtgggggaattaggaagttagggagagagtaaagtttttggacgcgttttaggaggaaaattttgtgtagtgttgttaggcggaggttcgttagaaggtttcgtagttgttgaggcggggtgggattgcgttttaggggtcgcgttgaagttggcgtcgcgattattgcgtatcgatttcgtttattttttgttcgttttcgggagttttttttgttttaggacggttttttattttttaaattatgttcgttttttatttcggatttatagttatttttaaatttcggttattttcgtttagtatcgcggtttttagtatatttttttattggagtagtaggtgatttaaattagatttatttgttgtgaatttttttttttttttttttttttttggtgtttttttagggagaggggaacgggatgtaggttgaggtttagcggcgcggtaattcggggtatcggcgcgcgtttttttgagtcgtagttttggttgagtaagcggagtcgtcggtagttttggtagagtcgggaagttgcggtcgtaggggttaggtcgggaggtagggggcgttgttgtttttttcgagagtcgcgttaggataggcg

SEQ ID NO: 6458 - DNA, 819 bp, Artificial Sequence
  Description of Artificial Sequence: Synthetic polynucleotide
gcgagacgtgggaaattggcgaagttgttattagtcgtcggcgtaaggagcgcgagagttttgggtgcgcgtagggtatttattttttattttttagtaagtatcgtcgtaagttttttaggtgtagaaattgttggcgttgttttcgtagttttcgtataggaattggcggtagttttgcgtgtatttgtcgtagtagtaacggagaagtagggttcggtagggttcgtagtttaggggtaggagatagattttcgcgttattttttgaagaaggggtagaaggagagtaaaagagagggaaagtggttaggcgtagtttttaggaggaaagaatatttcggggagttttgttttttttcgagcggaggggtttttgtagagaaagtgtaaatttgggagcgagttttttttgttagcggagcgcgcggtagggatttggagaaagcgaggtttggagggcgtttatacggggttttatggttcgttgcgtttttttcgtcggttggggagagaagtttttggagcggttagatatttgttggtttttgagtagtatcgtttagtgtagttttcgttaggaaaagtagtagaatcgatagttttagggggcgagcggggtttatggtgtagggggtcgggcggttcgttgggtaaggcgttcgagaaagcgtttggcgggaggaggtgcgcggttttttgttttaggcggttcgggtgttcgttttatgcggggcgagcgttcggtcgattttcgtcggggcggagtttgaggggtggttgatttatgtacggggattgttatttcgtcgttttcgcg

SEQ ID NO: 6459 - DNA, 1128 bp, Artificial Sequence
  Description of Artificial Sequence: Synthetic polynucleotide
gcgttggcgggcgtattcggcggcggcgagcgcggaggtgttgcggtatttattatggtatttttgtttcggaacgtagtaggtggggttgttcgtaatatgtagggaaatgagtatttcgttttgttttttatttttttttagtttttcgtggtgggtgtataggaaaaagaagggcgaaaagcgggggtaatagttagtcgtcgcgcgcgtttttagcgtcgtttttagtaatagcgttaggaggaaagtttgtcgggtttagttattgcgttttatgtcgtcgtcgtcgtcgtcgtcgtcgcgcgttttacgcgtcgttcgtttatttagttttggagacgtcgggacggaggagttacgcggagagaaggcgagaagaaggcggacgggagcggaacgggttcgggagcgggtttgggagcgggttttcgtcgagaagtttcgcgggagacggcggtttttaaagttattttgggtcgcgggagcgcgggatcggggttgcgggcgtcgagagcgcgtcgtttgtcgttttcgtgcgtcgtcgtcgtttttgcgcgacgtttttcggttaggtttgggaaagcgttcgtttcgttttatatttttttaaagtttcgggcgtcgcgtttttttcgtcgtcgttatacgtgtttcggtcgttttttcgttttcgcgcgtcgtttcgttcgtttttcgttttttcgggttggttcggcggtatttcgcgcggcgaggggcgtacgcgttttcggagttttcggttagcgttcggttcgtattcgggaggatagggaggggcgttcgtcggggagcgggacggggacgttgtcgaggatcgttgagttcgcgatttttttgcgagggacgttaaagtttcgtagagggtatttttcgtttagttgtttgaaggggaaggttagtttttttggtcgttagtgtgttttgttttttttgggaggatgcgtgagggaaggagaggggcggtagggacggtcgttggcgtcggtttttttgtttgagtcggttgcgtttcgcgtttttcggggttcgtagtttgttagttcgggcggttcgtattcgttttgggaattcgttcgaggtcgcgaatcgttaggggttttcgcg

SEQ ID NO: 6460 - DNA, 1128 bp, Artificial Sequence; identical to SEQ ID NO: 6459
  Description of Artificial Sequence: Synthetic polynucleotide

SEQ ID NO: 6461 - DNA, 1128 bp, Artificial Sequence; identical to SEQ ID NO: 6459
  Description of Artificial Sequence: Synthetic polynucleotide

SEQ ID NO: 6462 - DNA, 1921 bp, Artificial Sequence
  Description of Artificial Sequence: Synthetic polynucleotide
tcgcggatttgggtttggcgtttattttatcgttaggattggatagaaaggttttggtcgaggttattaacggagaggttagagcggagtttttggtttagaatggaggtagtagcgagttttcggcggtttttaggagtattaaggtggaggcggtggaggagtcggaggcggtttttattttgggtttcggagagtttgggttttaggtttcgtcgcggacgtcgtcgtcgcgtagtttcgtttcggttagggttaaggtcgagttgtttagttttacgtcgggttttagttcggtgttcggcgagttgggtttggtcggggttttgtttttttcgtagtacgtgttcgggttcgacgcggcgtttttcgtttcggagattttggttaagatgttcgagttggtgtatagtcggttgtagtagggcgcgggcgcgggcgtcggcggcgcgtagatcgggttttttttcggggtttttaagggcgttacgtgtttcgagtgcgagattatttttagtaacgttaataattattacgtgtataagcgtttttattgtttaggtcgtcgtgcgttcgaggacgcgtttgtcgcgcgtaggtttaaggcgtttttcggttcggttcgcgcgtttttcggttagttcgtcgaattcgacgcgtcgcgttcgttttcgggtttcggagcgcgcgaggagggggttgggggcgcggttacgttcgaggacggcgcgggcggtcggggtagcgagggtagttagagttcgggtagtttcgtggacgacgcggaggacgattttagtcgtacgttgtgcgaggtttgtaatattcgttttagtcgttacgagatttatatcgtgtataagcggtattattgcgtttcgcgttacgattcgtcgtcgcgtcgatcggtcgcgttttcgggattttttgggtcggtcgcgttttcggttttttttttcgtcgcgtttgtgcgtacgcgtagacgtcgtaagttttacgagttgtacgcggtcggcgtttcgtttttttcgtcgttcggttacgttttcgcgttcgagtcgtcgcggttcggaagcggaagcggaagcggtttcggtttcgtttttgcgcgttcgttcggtttcgcggtcgacggttttatcgatttgagtaagaagtcgcggcgttcgtttttcggagtttcggtatcggcgttggtcgattattacgagtgtacggtttgtcgcgtgagtttttatagtttcgaggtttatttggcgtataagaagtattcgtgtttcgttgcgttatcgttcggcgcgttcggtttgttcgtcgtcgtttgtttttattgtttttcgaacggttcggtgcgcggggatttgttggagtattttcgtttggcgtacggtttgttgttcggcgcgtttttggtcggttcgggggtcgaggttcggacgtcggtcgatcgcggtttttcgttcgttttcgttttcgtcgttttttcgtagttcgggtttcgtggttttcgggacggtttcggttcggagttttaggagtcgtcgttcggttcgttttcgttttcggtcgtcgcgttcgaggtcgtgtcgttttcgtcggcgttttttttttattcggataagggcgtttagatttttagtaagggtacgtcggcgtcgttgtttaacggtaattatcggtattgtcgtttttgtaatattaagtttagtagtttgtttatttttatcgtttataagaagtattattgtttttcgtacgtcgtcgagtacgtgaagtgagcgtttatattatagtcgtagacgttttgtacgtttcgttgcgatgcggggagggggtcgtttttaggtcgtacggattgtcgtttttgggaatttcgttacgtataggtttcggcggagggggtcgtagggggtagcgttcg

SEQ ID NO: 6463 - DNA, 2872 bp, Artificial Sequence
  Description of Artificial Sequence: Synthetic polynucleotide
gcgtttttcggaacgttacgttttgcgattgatttgcgagtaaagtagcgggtttagtttgcggcgcgcggaaaaggcggtcggcgaagagtcgttcggttcgcgggtaggggagggatcggagggagacggcggggagggagcgttggtttttttttgggttggggtttcggaggaagtttttcgttaagatttcggtcgtgcgtttttttcggggttcgtttttttttttttcggttttttttttgttatcgttttgggttttaagtaggtcgtttagtcgggttatattcggtggatagaagtcgggatttagggttggcggttgggttcgtgtattttttacgcgggcgtttcggttttgaagtgcgcgcggagtaggttttgatcgttttttttttttttttttttcggttatttttgttttttttagttattgataggatttttttcgaaaattttagattttttaagttttagtttggcggttttttttttttaagtcgcgtttcggtgatttgggttgcgcgattacgaggaagttcgagaattttttggtttaagtgagataggaattagggtaataatgaagagaaagatattcggtttttttttattttaggtcgtagaggcgtatatcgtgaaaagaaaggttaattagcgttttaacgtacgttcgggttttttttttcgattattatgtatttttaattttttgttatcgagggttttggattttttcgaggttttttgtattttaagtggaattttttgttttatttgttagtagtttcgtttgttgagaggacgtattttggggattgttaagaagtagtagatataattcggttttgttaatatagtatacggttttgttttcgtttttttttttatttttttttttgattcgtcgtttggggcgagttggagaaggcggagtaggaggtggggagaagggtgggggtgggggaaggtttggcgtagtataaataagttttttagcgggttgtttatatagtaggtggatttgacgttagttaggaggtttcgttgtaaattcgaataatattttttttcgcgtttttttttttttaaagaagttagggaacggggggagataggtggacgggggagaaaggtattttaattagttggttttaaatttattaataataataacgataataataatgtaaagtaaaataaaataaataagtggttcggcggtattttagaattttttgcggcgttttgttttttatttcgttttttcgaggagaggtagtttcgcgagtagtgtgtgtatagttcgtattgttaataatacgcgcgcgcggtcgggtgcgcgcgtttgttagcgtatatttatatatatagatatatagatatatatatatatatatatatatatatagattcgggtggggggagcggttgcgcgagatagcgcgagttttcgagaaagcgcgagatacgtcggcgcgtgtagtttcgcggtcgtcgtttcgttttagttttagtttcgcgttattcgtagttcgttcgcgaacgttcgtttcggttatttatgcggcggtcgcgttcgttggttgcggttttttcggtttttttttttttcgggcgcgttttttattcgcggtagtagttgttcggattcgcgcgtgggtgtgttgtttgggggtttttgtttcgtcgtcgcgggtgttatttttcgggacgttgtttacggcgttttcggtcgcggtaagttttttggtttttattttggcgcgttatattttcgtattttattttgttttagttatttttacgttgggtcgagttgcgattttattttgtttcgcgtttttttcgcggtggcgataaagtttcgttttaaaggtagcgttttgtttgtcggggcgagtgtgatatgtgttaaatttgggttcggcgttggggtcgtatttcggatttagtattattatttgttgtttttttttattttgttttgtgatgggggaaaaaggggtggagaggggagatttgttgttggtttacggatgatttttagtttggataatgtaaaatgttgtttcgttcggagagatttcggttggaggagaatgtgtgtcgaaatattagatgtgtgtttgtttatttttttttttttaattgtttgttgttttttttttttttttttcgtatttttatttttaatttcgggaggagaaataatagtaaaaatatttggcggttagaagtatatattttattgatttaattgttgatttttatttatttagttgggtaagtgtacgtttttcgcgtttaagttgggtattttagcgtttattttagaagtatttttttaggaaggagagagatggaaaggggatatttttgtttttggagttaagaaatttttgggttttattgacgtttcgggataatcgtgtatagggatgattgttgttttgatcgcgtttttttttttgtttacgcgttagtacgatcggtttttttcggtgtttggtttggttttatttttatttcgttttagagaggtcgtttggttgtttgtgggtgggtttggggtgaaatcgtatttcgcggtatttggtgaggggacgtgggaggagcgtagatatttttcggtgatagggagggttttttatttggttgttatttggaagtttatagtggtttcggcgggtaggcgggcgggtagagcgcgggttcgaacgtttttcgcgtttgcggcggcgtacgtgcggcggcggcggcggcgtcggcggcgcgggcgggatttattgggtggtcgcgcgcgttattcgcgcgttttttgcgcgtttttgtttattcgcgaggtcgtaacgcgttttgatattcg

SEQ ID NO: 6464 - DNA, 2906 bp, Artificial Sequence
  Description of Artificial Sequence: Synthetic polynucleotide
tcgcgggggtgcggttttgcgtaattgggtgattcgcgtgttttttcgtattttatttgtattaagggagcgcgtgttagacgaagggaattttttttttttttttggtgattttgttatttttttattaattgtacgaagtttaagggatattcgagttttttggttgggcggatgggtttcgcgtttggtatggttgagcggtttatttttattttttcgtttttatttttattataatagcgattatttagttcgttaggagtttttgttttttagcgtaggtttttttttttttttagttttttgggttgttgaagtcgggttttgggtagatagagattggggtcgtggggagagcgttaggttgtttttgtttttttcgcgtttcggggtatttcggcgcgttggggatgtagttttcgttttcgtcgtatttggtcgttcgagcgttcgcgtttacgtttcgcgcggggtcgttcgaaattggggtcgcgttagtcgcgggagttatcgaggagttgttggggtgcgtttgtttttgttttttaaataagattttcgagattttttttttatttttttaatttttagtaggatacggaatttcggcgtttttcgaaagttataaaagaggggtacggaaattttaagttcgtcgtgttaattcggagaacgtaaattcgaggtagagcgtgcgtcgtgcggggatgtgggtgtcgaggatttcgaagcgttcggtttttttcgcgatttttattttttttagattttggttagatatttatttagtttacgtttagagggcgggggttatttcgatttatttcggaagtcgttaattttagaaattttttttgttaggttcgcgaaacgaaggtatttcgttatttcggcggggtaagttcggattttattagggtaggttcgggaggttatttagggtagacgattcgaggtagagcgttttaaaattttgtcgtcgtacgtttagttagagcgtcgagcgcgtttgtttttttttcgttattttttagttttttattcgtcgattaaatttttgggggattatatttttaagttttgggagtttcgggtaaagttttttttttttttgaatttttttattgtaatgtaattatgggtagataagaggggtggttgttttgttttttgtaacgtaaaattaatagatatttaattaagttttaatgttcggttagtttttcgttttttggtgtttattttttttttttttttattttcgttattttcgttcgttattttttttatagattacggatatgtagggttatttatttgtgtttaggaaaaataaattattagagtgatatgagaaggaatggtgtatttggttgttcgttgaaaggttttagagaagaaaacggaaaggggaataaaacggggggattttttttttttaataagtagggcgttttggggaagtttgggggttaggggttttttgtttcgtggttcggtatttgtttttttcggagtcgttttttgttgtcgggcggcgagttttattttgtttttcgtagagggcgcggtgaggaagttcgtcgggggttcgtagttttatgttagcgtcgtcgtcgtcgtcgtcgtcgtcgtgtgaggcgagtatagcggtcgtatttgtggttgatttttgggttgagggggttgagttggtttagtaggcgttaagttttttttatgtgaataataaatatttttatcggcggtcgcgattggtttgcgttcggcgtttttcgatttttcgttcgcggttatttattcggcgcggcgcggggagtcgcggttaggatcgcgttcgggatcgttaatcgtttcgcgttaattagttatttcgggaagcgggaggaggaattttcgaggggcgggagtttttggatttcggtgttatttagcggttttggcgcgggtagggagggggattttcggttcgcggattttttttcgttttttagtttgaagcgacgaggagattagaaatgttaatagttttgatttttaaaaattattttttttttttcgtttttaagaaaaaggggaggatttaattatagagtgagagggtgggaagaagcgggagcggtagaagaaggaatatggttgtggaggagtttagcggtttcggttgtttggcgagttcgggatcggcgcggggaggcgcgacgttcgttcgagtatagcgggtagtattcgcgagttcgggttttcggtgaatatagttttagaaagcgttatcgagaataatatatggtagatgataagtgtttcgttatatgtttttttttcgggaatgtttaaagtagagtcggtaagtcgcgcggtttttttgtaaagtttgtttggcgtcgcgcggcggtttcgttatttgtttcgtttcgcggttttggcgattgtttttttatttttcgttttcgagggtttgagggacgcgtgtaatagagtttttagggttcgaggtattatatagcgcggttcgttgcgggtattgcgtaggaaggggtatgggtggttatcgggacggttattttattgagatgatttaaggagtcgtagacgcggggtaggaaatttcgggggagtcgtgttcgggttttgtagggaaatttcgggatttttttcgtatgtcgtatgcggaaatttgtcgggttcgacgtgtatagtttagcgtttttttttattagttattgtttaggtttttcgattttgtattcgtcggaatgagagaaagtagtttttcgtcgtttagttttcgggtagttgtttcggtcgggttttgcgttggtgagaaagttttatttagaggcggtcgcgcgtaattgtaggcggcgttttaggttcgggcgagttagggagagcggggcgcg

SEQ ID NO: 6465 - DNA, 2906 bp, Artificial Sequence; identical to SEQ ID NO: 6464
  Description of Artificial Sequence: Synthetic polynucleotide

SEQ ID NO: 6466 - DNA, 1696 bp, Artificial Sequence
  Description of Artificial Sequence: Synthetic polynucleotide
tcggagtcggagtcggcgaagtcgcggagttgaggcgcgtttgggagagttaaggttcggcgggttatgtaggtgtatgttttttttttcgtttaaggagcggcgttattagcgtttttcggttttgtttttggattttggtatcggttcgttttagtcgcgggggaaggcgttttatcgttaaagtgcgtttcggcggtttcggttcgttttgcgggtcgtcgtcggagggagtgcgggggcgtttcgaagtcgtttaggtcgtattcgttggatgttgcgttttttttttcggcgtcggtcgtttcgggtcggcggtagttgattgcggtcgtgagttcgcggagcggcgagagttaagaggaggtgttcgcggcgttttcgttttttttagatatatatttttttttttttcgttttttttcggagggtggaagagataaaaacggggggttagttttttagttcgtcggttgtcggtacgcggggcggcgtttcgttcggttttcgaggattagcggcgtggcggttgcgttcggattcggttcgtcggtcggaggagcgcgcggcgttcgcggtcgcgttcgtatcgtaggtttttttagagagttcgggggcgggcgcgggttcggcggcggcggcggtcgtagttttcggcggcgcgtaatcgttcgtcgtcgttcgtcgttgttcggttttcggcgcgtcgtcggtttcggttttgtgcggagggagcgagttcgcggtttcggttttcggcgtttttagtggtcgcgtcgttagcggattgttgtagcggcgtgagtagcgggggtcgcggttgcgggaaacgtttcggagtttaggaatatagttttcgttggttagcggcggtagtagtagtagcggggtttttgcgcgcggcgtttatcgtttttttttcgcgtcgggttcgcggtgttgtaggcggtagttacgtagattgtttttttatttttttgttttttagttagaacgtgaatgtattgttgacgtatattgttttgggagaagattagcgtgatgtagtgtttttatgtattagcgtcgtttttttttcgtcgtttgtttcgcggggttaacgtcggcgttttttagcgtcgcgtcggtcggcgtcgcgtagtttcgcgttttcggtcgttcgtttttttttttttttttttttttttttttttttttttttttttttttttttttttttttttttcgggtcgtttttttttcgttttttttagacgagcggagcggggttagggcgagcgggcgagcgagtcggagtgagcgttaagtgaggggtcgcgcgtaagtcgtaggcgttcgtagttattttgggtcggtcggagggagtagttgggtggtcgttgataggttggagcggcgcggggttgcggcgggagagttcgcgtcggttttcgtttttcggttcgtattcggggttttttggttttgaagagcggggtttaggggttcggcggttcgcggcggggttgttgtatttggtttgtttttcgttcggttcgcgttatttttattttcgttgattgttgacggggcgcggattcgcgttcggagttcggaattgcgtggtggggattcgggggacggcggtcggggttacgaggtttttaggatcgagagttcgggtttcgttgttgtattgtcgttagtttttttttcg

SEQ ID NO: 6467 - DNA, 2054 bp, Artificial Sequence
  Description of Artificial Sequence: Synthetic polynucleotide
acgcggcgatgttttaagtcgttttttgtttgaaatttcggcgtattttcggggaagtagtgttacgttttagaaaggcgtttgtgttgttttttattggggaaacgtagtgtttgttttatatgcgtcgttttatagaattgtagttttaatcgtttatttggtttttttttcgggcgttgggttattattttttttaaatatgcgttcgaatatttgtgggtttgtttttcgttgaaattttagggtgtttaaaggttacggggtcgcgatgatattgggtaggttttcggaaattttttaggattttttttattttaaagtttagttagggacgaaaggggttgggagttgaaaaattgtttttttaattttttcgggtgggaggtagagtcgggaatatatagaattttatttcgaaagtttcgggaaagagaagtttgagtttaggagcgtgagaggagaatatattcgggaaatttttgtttcggtcgttgtattttcgcgggcgtttaggtgggacgtgggtaggtgcgcgagcgtcgtgtgtgtcggtgtggatttgtgtgtgtgtttgcgtgtgtgcgtgtgcgtgtgtcgcgggttggtttcgggatattgaggattttcgggtcggtttaggtttgttcgattttgttgttttcgtcgttcgttcggttttatttttcggcgggtcggttttttatttggacgcgtcgcgttttttttttttagcgggagcgtcgtattgatattgtagatggagtttatgtcgttgtttttcgtttttttttgaacgtgtgcgtgtgcgcgcgtgtggttgttttttttagttttagtttcgaacgtaaatattttatcgaggtatagggaagtcgggagtagtcgaggaacgcggagggcgtcgaattagagtttgcggggtttgatagttttttttgcggcgtttaaggtgggcgtaatgtttaataaaaaggtcggaaaatggggatcgatttcgaatattttttttttttatttagtttcggagttcgagtagcggcggcggttttcgggggttgcggtggcgacgtcgggttgttttttttcgtttttattttcgcgggttgaatgtttttgatgttaagcgggtatagcggcgttatttcgcgtcgtttatgttcgttcggtcgggtcgttgttcgggcgcggcgagtgcgcgggggattcgtcggggagcgttttcggcgtttttgcgcgtttttttgggtagcggcggtcgtttttcggtagttcgcggtcggtcgcgtcgcggtagtttttatttttgtcgagatattcgtcgggtagtgttttggggtcggggttggggggtcgcgggagtcgtcggttgtttttcggggaggtgcggggttgcggcggtggtggttgcggcggttggcgttgcggcggcggagagttcggtcgcgggtcgagtcgggtttttcgggcgcgttttcggtttttcgggcgggttgttcgtaaagtttgtagggggtagggagcggggtcgtcgttggttcggtcgtcgtcggagttttcgggttgtttgttgtcgtcgcggttcgttgttgttgtgtattgaagttcggttaagcgttgtaaaaattttagttgtttggcgttttttgggttttttttttttttttttcgttttttttgtttttttttttttttttttcgtttcgtttttttttttttttgtcgttcgtcgttcgtcgtcgttttttttttggttcgttttcgttggttcggagttcgcggttgatatttagagcgagggagagcggtcggtagagggggtagggggcgtttttttatatgtttttattcgtcgtcgttcggtttgtcggttttttttcgtattaacgtttgtcgatatttttttgggttttttcggttcgtacggagttattttggcggtggcgatgtggggcggagagaggggtatatatgggtgatcggagcgtacggcgcgcgtttagagggaggcgtttagtcgtttcggaatttgtagttttgggcgttggtcgtcg

SEQ ID NO: 6468 - DNA, 1258 bp, Artificial Sequence
  Description of Artificial Sequence: Synthetic polynucleotide
tcgcggaagcgttttttgttgggtagaagagtgggtttttcgtcgcggcgtatttgtttcggttgtcggtttttcgtatttatttgtacgagatttgttttcggaaagttaagttttttagttttttttttagcgtttcgtttttttttttttggtcggcggtcgcgggttcgtttagggtagcggttttcgtcgtcgcggttgattttgcgtttcgcgggttcgcgtcgttttcggcgtttaggtagtagttttcggcgtcgttttcgttgttgttgttgtcgttcgtcgttttttttttttttttcgtcgaggagttggggtttatggcgttcgtttcggcggtcgcggagggagcgtaggcggcgtcgttgtaggggtcgggcgggttggcggcggcggcggcggcggttgtaggagcgcgggtaggttcgcgcgtcgttggtaggggtagtaaatggtagttttttttcgtagtatttattcgcggttgtatcgtatcggggtattgtgggaaatttcgtttattttttcgtttcggttaattagaggtcgtcgtttttcgtttttcgcgttttttcgcgtcggttcgtattttttagtttcgttggtttttttttaaatttcgagcgaaagtttaagttgaatatgaattttgttcggaggcgacgggttgcggcggagggggagagagaggaggataggttgcgatttcgggttggggacgttagggtagggatagcgagtattaggaaggagagcgttcggggaattcgagtggtcgcgttttgggttttgtatcgtgaggttggggggattaggatcggcgggcgtttattttggttttgagtttagttgtcgacgttgggttagtattttttttatcgtcgttttttagtgagtagagttgggtttaggtagtagtttttgggcgcgggaaggtagcgggagttgtatttaggggaggggggaggtagtaggagtttcgttagtgggaattttggagtgaattcgtcggcgggtgttaagtcgaagcgtcgattttttgtttttggattggggttcggatttttgcgtttttaaattgcgttttcgttttgttcgtcgttcggtgttttttttaggcgtagtagattttcggtaaatagcggttaattcgatggaatcggattatagggttttcggtgaagtagaaaggcggaggaaatttaggaggtagaagtgaggattttggcgtttggcgtcgttgcgttgttcg

SEQ ID NO: 6469 - DNA, 628 bp, Artificial Sequence
  Description of Artificial Sequence: Synthetic polynucleotide
gcgtggaggttgcggttcggcggggtaggcgttgagcgtatcgcggcggtattcggcgtagaggttttagcgcggggagtcgggtttagtttcggtttgttagcgtcgcggttttagtttattcgaggtcggtttggggggttcgtagggcgcgcggagcgtcgagtgcgcgtcgggttgggtttcgtatttcggtgtaggagcgcgggcgcggcgcggcggagcgtttcgtatggagtcggttcgggagtttttttcgcgggttcggtcgtcgtcgtttttcgtcgcgcgtttcgcgttcgttttcgtcgtttttaggtcgcgttcgttcgtagaggttgaggttcgcggtttcgaggggttgttgcggcgattcgggtcgggttacgagggtagtattagttggaaggcggttttggagggtaagcgcggagcggttttttttttttggtttagggatttttgtttaggttcgattcgcgattcggaggcggttagagttattttggtcgttgtttcggaggggagcgttgggagcgcggcgtcgggacgcggcggagttatttattttagggcggttagacgtcggttcgtggggtggggtgggagggaatcgggggttatcgcg

SEQ ID NO: 6470 - DNA, 1075 bp, Artificial Sequence
  Description of Artificial Sequence: Synthetic polynucleotide
gcggtttttagggcgagtattttcgtttttagcgttttttggttattaaagaaaaattagacgtttgcgacgggtttttttttcgttcgggttttttcgtttttcgtttttcgtcggttatcgggcgttattatcgcgggtagtagggcggggcgttttgggagtcgttgggtgtttgggttggcgtttgtaggggtttcgcgggattaggtcggttgtaggggcgcggcggcgtagtttattttgttgttgaagagtcgcgagaggttgcgtatgggcggagggggtcgcggggtatttcggagttcgcgtacgttttagaggcgtagggcgtcgtcgtgcgaggcggtgtagagtatttggtcgtgtatttgcgggcgtaggggcgggcgttatcggtgacgcggtaggcgggggggatatcgttgttcgcgtggatggatcggggcggggtatttttttttttacgggcggcggtttcgagaagggtagagggatttatttggatgtagttgatgatgaatgtgtggtttcggaatatttttcgtagttttttagattgcgcgtcgaaggttcgggcgtaagcgttttcgttgttcgtgaatattgcggatatatagcgcgcgttgggtttttttttttgttcggtttttcgtaagtagggatggggcggcgagagcgtgatttggggcgttttcgagatttcgttttacgggggtattttgaggtttatatgggaagtggatagtgtttttttagagaaacgggtttttacggttattttgttttattttgtagatgtttgcgcgttagttggttttgtttttgttttgttgaatatcgttcgggtttagtttttatttcgcggtttggtgaagttggttttcgtgtttgtttgggaagtttttgtttggggataatcgttaggttttcgagtcgttttttttttatttttcgttgcgtcggtaattttattttttcgtttttattaacggatcggtatttaaattaaagtttagttttttggggtttatgattacgtattttcgggatttttagcgggggcgagttttcg

SEQ ID NO: 6471 - DNA, 5566 bp, Artificial Sequence
  Description of Artificial Sequence: Synthetic polynucleotide
gcgtttttttagcgatcggggtagaattaggacgtgtaatgcgattgttttttttttttcgtttttcggtagagtttttgttcgcgttaatttatttattaggttttgttcgcgttacgcgcgtttttggtaggtttggggcggggaaaggcgaagcgttgggtacgcgagggtttgtgtattttagtttttacgacgtttttggttttttttaggttcgtcgttgtcgtatttaatttttttttttcgggggttattttgaagaagttttagattttagatttagttttttagatttcgttttcgagttcgttcggtgggtttgtaggtcggttttttttcgtttagaggagagcgtagatacgtaatgttcgttcgttggtttcgttcgttttatttttgtttttcgcgttttttcgtttcggtttttgtttataggtcgggtcggaacgttagttttaggagtcgacggtggttttttgttcgtttcggggaaggtgttgtttttttatcggttttaatttttcgttcggcgtttggggtttggttgcggggttcggtttttagtcgagggcgtagggttggttaggtttgttttggttgaggtggagatttcgtttttagggattgttgggcgtttttgtttcgcgagtaacgagatcgtcgcgagcgaacggtttttattgagtttatttttttaagtgttattacgttaagttagagaagcgaggcgagtggaggggacgtagaggggtcggaaaagttatttttttttggtttcgtttttagataaaaacgggagtttggttcggtattcgggcgttcggtgttttcggggcgttttattgaggttttgtttgtaaaattagcgttcgtgttttgaagcgtacggcgtttggaagttgtttttttgttcgtttttttcgaggtttttttttgtgtagcgagtttgagaaatatggaggatcgtttttcgtaagcgggtggtcgcgggcgtttttcgatttttgggtgaagttagagggaaaacggggttttcgggttagtgttttattttttatttcgggagaaattaatgttcggagagggttcgtttgattcgtatagaaaggtcgattttgagggcggcggtcgttcgggggagaaagcggaggttttgggttcgcgggagcgcggtagtcggggttggtatcgtagaggagagatacgttattgtttcgtatttttagaaagcgcgaggcgtcgttttagttggggtaggcggtcgaggtcggtttttatgcgcgtttttcgaagttttttgaaatattttgcggagtttcgtgtgtatagaatttagtatcgtttagtttttgggtagtttaattttttgtagttttattttagttttttcggttttttgaacggtgattttttttatcgtttttttagagttgtttcgtgtttgggtttattttggggggttcggtattttttagttatttttttttttatttattttttttttttttatttttttttttattttttattttttttttttttaggagagcgatttacgaatttttttttttttagttaattttagggtttagttcgtagattttgcgagggtaggtttttgtttatcggttcgttaggcgttttggaggtgacgttttgttttttagagtttttgttgtagttacgaattggggtttgggtcgtaggaaagtatagggttgaagtttagcgttttggggttatttatattgaggtagttagaggtaaagagttttaagaatttagaaaatattttttaggaagtcgtttaattggtttttatgggataggtggagttattaatttgggatggttttgtaggaattaaagagtttagggttttttttttttttaatattatgtttaggagatttagagtcgttggatttttttttttttgattggtgattattagagtttttagagttgtagaaaattttttttttaaaaaattaagtaagcgttaataagattttttataaatttttattagttttattttttcggggggtaggtagattgtggggtttgattttttgagattcggggaggatttttggtagatgtgtgtttagttagaatatttggtaaggatttttttaatgaagaaaaagtggaggaatttagttttagcgagaagaggtttttttattttgttttagatatatcggatagagggtatattttgattagagttacgtttagtggttaggaggttagtttagtatttttttttttattattttcgttttgggtgggggggtaatttttttgggagtagttgtgggaattgtcgttttttattttagtttagttagtattttgaagtttgtaggggaaggatagtacgtgggatggatattggggaaggagtttcgtaaggttagggtgtaatttttaggttttaggtggtttggtaggttacgttgtttcggagatgtttgttagattttttaagtttatttagggtttggtagtaatttgttggttgtttttgcgggggtttgggttgttgagtacggtgtagttgtttagggttaattagttttagggtgttcgtgttaggttgcggttttttcgtttttttcgtattgagggtatttatggcgtgtaaatgttttcgtatttttagagttgttttatcggatgtttttaggaatttatatatttttataaaaatgtattttaaatgatggataggcgagtttggggtaataacgggtgtttggtgggtagataagagtaaatgggaaggagttcgagggaggagggggaagagaagaggaaatagaatttttagttggatattttgataatagttggaaggaaagtttagaaaagatgaagagagaggaggggagaaattaattggggtttttatttttgtcgttggatttttaattttcgttttaaatgggttttgtttttcggtaaaattagtttaaaggattttaaaataaagaaaacgagatgatcggtttgggagttttttaattagagtagagaagttagaggggggcgggcgatttggttttgaagttttagttgaatagttattttttttttttttggtaaaaaggatttttttagaattttcgaggtttttggattttttttttcgtaaatggagtcgtatattgtattttttcgttttttcggatcgttaagtatgttttatgagggtcgttgttttcgggtggaatgcggtcgtatgtacgcgtttttttgtatacgtatatatacgtatatttataataagtgtttgtaggaggagtgttttgcgcgttagttttgcgtttaagataggaagttgtcgggttatcgagttaaatgggagtgatattatttttttttattagtaaggaaagcggattataaaagtttttttgtatttcggtagtttatttaatattatttatgtattttgtgtaaggaattgtgggatttcgttttacggtaaataatatggaaattttaaaaatagcgatttttttgtgcgtgtttatttacgcgtttcggggtgatttggcggggttgtcgtcgggtgatttatatttttgaatcgcgaagcgatagggaaagcgcgggcgagcgtaggagacgcggtcgggggttttttcgggtttttgggttttcgtattcggagcgggggacgcggtcgttttaaggggaggaggggcggcgggttgtttttgttatttagcggcggtcggagcgttacgtgggcgcgcggcgtcgcggttattggttcgaggtacgtgtttaggagatcggtttgcgacgttattcgagggggttttgttaaaaataagaataaaaatttagagtgaaagtgttttaggttgcgtcgagtggtttggaaattttcgagttcgcgcggaggtcgaggcggcgagggcggcggacggtcggggagcgcgggcggtttagttcggttcggtcgggttttggtttcgcgttttttatttatgcgattcgggtcgcggagttttgcggggttcggcgggggcgcggtcgtacgtcggtggggcgtttcggttcgtagcggggcggcggtcgcgaggagggggtttttatgtgcgtgcgggcggtggcgggcgcgttgatcgcgggcgttcggtattttcgagggtcggttagggcgtgcgggcggggacggtcgggcggcggcggcggtcggagtcggttcgggcgggcgtgagcgtcggggaacgcgttgtttgtatgcgcgtagttttcgtttcgggcggtttaggcggcggcgtcggagttcgaggcggtcggacgcggagaggagcggggagttcgggaggcggttcgcgttttcgtcggattattgcgattgtttagatttcggttgcgcggcgaagtcgaggatttggttttgttgaattttttatcgtttgggcgagcggggcggttcgtggtgtttttaatttagttcgtggatttaaaggtggtttcgcgtcgagcgcggtcggcgatttgtaggattttagttttggtcgcggtcgtcgcgtacgttttcggaagattcggcggggtgggggcgcgggggttttcgtgtgcgtcgcgggagggtcgaaggttgatttggaagggcgttttcggagaattagtgtgggatttattgtgaatagtatggaggagaatgattttaagtttggcgaagtagcggcggcggtggagggatagcggtagtcggaatttagtttcggcggcggttcgggcggcggcggcggtagtagttcgggcgaagcggatatcgggcgtcggcgggttttgatgttgttcgcggttttgtaggcgttcggtaattattagtattcgtatcgtattattaatttttttatcgataatattttgcggttcgagttcggtcggcgaaaggacgcggggatttgttgtgcgggcgcgggaggaggaaggggcggcggagtcggcggcgaaggcggcgcgagcggtgcggagggaggcggcggcgcgggcggttcggagtagtttttgggttcgggttttcgagagtttcggtagaattcgttatgtgcgttcggcgcgggcgggtcgtttttagtcgtcggtagcgatttttcgggtgacggggaaggcggttttaagacgttttcgttgtacggtggcgttaagaaaggcggcgatttcggcggttttttggacgggtcgtttaaggttcgcggtttgggcggcggcgatttgtcggtgagttcggattcggatagttcgtaagtcggcgttaatttgggcgcgtagtttatgttttggtcggcgtgggtttattgtacgcgttattcggatcggttttttttaggtgagttcgcggggattacgcgtttcggttcgtcgcggggaggttcgcggagttggggggcggtgttggcgcgggaatttatcgggaggaaaatatttcgaatttttttcgcgtatacgtataaagatttacgcgatattgtgtgaagttgacgtcggttcgggtagcggttaggagtttagcggtaggattgattcg

SEQ ID NO: 6472 - DNA, 5566 bp, Artificial Sequence; identical to SEQ ID NO: 6471
  Description of Artificial Sequence: Synthetic polynucleotide

SEQ ID NO: 6473 - DNA, 1164 bp, Artificial Sequence
  Description of Artificial Sequence: Synthetic polynucleotide
gcgatttgtttagcgttaaatcgcggttttagttttttttagttttcggtttagtcggtttattagtcggttcgcgttttgtagtttttttagagggacgcgtttcgagatggagagtaaagttttgttcgtgttgattttggtcgtgtggttttagagtttgatcgtttttcgcggaggggtggtcgtcgtcgatcgtaagttttgcgcgtaaatttttttttatttgtagattcggcgggtggttattgttattcgaattgaggatgagaagaaggaagttggaaggggcggtggatgcgtttagggatttttttagtttgggttttagtttcgaaacggttttcggagtgggatttaggaggggtcgggagggaattttttttcgatcgtgaagcggcggcgtttagttttcgttttttttttttgtcgggttttcgcgttattttttttattttggttgggatcgcgttttcgggttcgtaggtttcgtcggggaggtttcggggtgtgggggtcgggacggcggaggcggggagtaagggttcggttggcggtgatttgtagttatttttttgtcggaggggttttggaatgaaaggcgcgcgggttaaggtgatttcgttttggttggtattgcggtttagttttcgttcggggattcgcgggtcgattgtggttttttttggggaagtcggggcgcggggaggcgtttcgggtattttagtcgtacggggtacgttcgttttcggcggggtttttcgtttcgttgtgggagtggtagtgggtgtcggggtggagaaagtacgcgtggcgcggagttttggggacgcggcgttttattcgttttggggagtttcggattttttttagtttttaggttcgtatgtttttttttttttagtgttttgagaatttagcgaggggttgattttttcgaaatcgtggcgtagttattagtaatttgtggtcgtcgattcggggggttgttaggtttgcgtttggttattttttttgttttgggggttgaggttagtttcgggcgttcggtttcgtcgcgcggttgcgagtacgtggggttgacgggcgtcgcgtggaggtagcgagtataacggtggttatcgtcgttagggaatcgttcgttcgttggggtttaggcgttcg

SEQ ID NO: 6474 - DNA, 1495 bp, Artificial Sequence
  Description of Artificial Sequence: Synthetic polynucleotide
tcgtaaatttttttttgcgtcgttttttttcgcgtggaatgggacggagtagtttttttaggcgttgtttggttgcggaggggagcgggtagcgagagtttcgggttttcgtttgggttttcgggttttcggggcgttggtttcggttttcgcgtagcgtttagcgatttttgtcgggggttttcggtagtcgcgtcgttatttttcgttcggttagcgcgggaggaaaaggggttgcgttcgggagcgtcgagtttaggtttttttcggtggcgtgttcgcgttttggggtgggggtgtggtggggaagagggagggggcgaggttaggggagggtgcgaaggaggcgtttgtttttaatttgcgggcgggaggtgggtggttgcggggtaattgaaaaagagtcggcgaggagtttttcgaaatttgttggaatttcgggttcgcgcggaggttaggagttgagcggcggcggttgtcggacgatgggagcgtgagtaggacggtgataattttttttcgatcgggttgcgagggcgtcgggtagaggttaggacgcgagtcgttagcggtgggatttatcgacgatttttcggggcgataggagtagtttcgagagttagggcgagcgttcgttttaggtggtcggatcgttcgtcgcgttcgcgtcgcgttttttgtaggtaacgggagacgttttcgcgtagcgcgagcgttttagcgcggtcgttcgttttttttttcgagggataaattttttttaaattcgattcgagtttttggattaaattcgtttgcgtcgagagtcgttcgcgtagagcgtttcgttttcggcgagatgttcgagcgtaaagaaggtagaggtaaagggaagggtaagaagaaggagcgaggtttcggtaagaagtcggagttcgcggcgggtagttagagtttaggtgggtgcgtagcgcggttcgggttttacgattttttttttgttttttttatttttttttttttttggatgtcgtggtttttttttttttttttttttcgtttgtttttttcgttttgcgttttgagcgttcgttgagtcgcgcggtgtttttttttttgggggtcgtcgtttatttgggcgtcgagttttatcgggcgtttacgtttagagtttagggtaagggatagtagtttcggtcgtatttttttagagtttcgggagcgtttcgttttttggtacggtttttttttagcgttttagcggttgagtttagttcgggagtgggatttgggttataggagtcgaggttgcgtgcgcgcgtgtttcgcgttataagcgttttgtacgggggtcgtgtgttttttagcgggaaacgttggaatgggtcgtttggagggagagtcggttttttcggtgtgtttggtagcgtagaagtgggtggtcgagtaagaggtcgcgtgggaagttagtttcggcgttttggggtatagggtaagcgatgtagagtgcgcgtcg

SEQ ID NO: 6475 - DNA, 352 bp, Artificial Sequence
  Description of Artificial Sequence: Synthetic polynucleotide
gcgtttttggtagtagtcgtttacgttttcggttttgcgtatcgggtttgtttcgggaggggcgcgtgacgttatcgcggggtagtcgagaggggatcgcgggtttcgggtagggtaggcgttttcgtagttttagttataatataagggagagaaagtaacgttttggttttagaaatttttatcgttaaggttagttttggttagacgtatagttaaagagtttttttagtttagcggatgaatcgttcgcgagtggtattttttaaaattttggttttattttttaagatgtttttttattgcgtaatttagaaagtattcggatcgtcgttatttattagcggcggcg

SEQ ID NO: 6476 - DNA, 1141 bp, Artificial Sequence
  Description of Artificial Sequence: Synthetic polynucleotide
tcgtttagtttttagcgttgcgttgttttcgcgtttatcggatgattacgaatatgattagcgagttgtttattaagtttacgacgaatattacggagtagatcgtcgtgatgatgatcgggatggtcggggagatgtgcgcgggttttagttgcgcgtttttcgagtcggcgttgtcgttgttgtcgggttcggtttagtcgggaaattaggcgttgttgttggggggtaggtaggcgttcggggcgtaggtagggttcggtttttcgcggaagatttggatcggggagtttatggtggggcgattgtagtaggaaggcgaggataggcggtatttgcggcgttgcgggagcgaaagaatcggttggacgcggagaggtaaattttgttcgcgttttggttagcggcgttggggattcggagtttgcggatttttattcgggtcgtaagtcgtcgggggtaggatagggagaacggatttttcgttgttttttcggttagtaggcgcgtcgttgggtgttagagaggggcgaagagcgttcgtttttttttttttagtttttgaggtgttttttttattaattttaggtatcggtttttggtggaattgtttttagattgtttgagtttttagggttaagttttttttttattttttagtacggagttttatttagaattgtatttcgaaagtttaaagtttatttatggtttttagagataggcgaaggcgaggttttttacgggacgttttggtaggtgttgaatcgcgcgtttacgagtttcgtttagtttttggtattatttgttttcggatttcggtttcgtttttcgttcgagggttgttgtttcgtcgagcgtagttttcgttttttagcgtacgttttttattattggcggcggttttgcggggcggggcggggcgggatcggcgggacgtagtcgggacgcggttgggcgttgggggtttgcgggcggagagttcgtttggtgcgttcgttttaggtcggtaggtttttgtttcgtttcgttcgttcggagttagtttttagttttttagttttttagtttcgcgttttttttagtttcgtaggttcgttcggtttattaattgttcgagcggtatatcgtttggttttcg

SEQ ID NO: 6477 - DNA, 3297 bp, Artificial Sequence
  Description of Artificial Sequence: Synthetic polynucleotide
tcgttcgtcgtttcgaagttgttcggttttttttttagttcgttttttagtttcgtaaggttttttttttatttttttcggcgattttttttcgaggtttttcggaggcgtttggattttttttttttgtttttcgttttgtcggtcgttcggttttcgagggggtacgaggagttgtcgggtcgtttttcgtttttgttcggggcggcgttggtattgttcggtcgattttcggggggtcgttcgttgaggtttttttattcggtagttaagtttagggaagaagacgttatcgttgggtagagttcgtttatgtcggtgagtatcgtggtttttattacgttttatatttagtttttttaggatattagtttttttcgattttttttaattttaattgattcgtttcgttggggttagtagtagggagggtggtaaggtcgggaaggtcgggacgtggttgggtaagttttaggacgggatattggcggttttcgggatatcgttttttttcgcgggaagatattttaagttatttttttttgggttattttttttttatggtttaagaaaacgggagggagttttcgttttttttcgaggttgttttttaaatttttagcgtgtcgttttttttcgtttatttcgagttttttttaaacgcgttttcgtttgtttttagcgttcgtttttttatttttttgttttttcggtaggtaagggaggaaatgacgtgatgttatttttgtgttaggttagtttttagttttagtttagtttttcgggttttagggaattaatttcgcggttttatcgggttttattttcgaagggacgttgcgggttacggggatacgcggtgttgcgagttcggagagttgggcggttgggttttttttttcgttgttttttggtttattttttttttcggatttcggagtttttggagaaggggacgcggagggcgattgtcgagggttttagcgggatttggagttaggggttagtttttttttttatttttcgttcggttgttgggtggggttttcgcgttttggttagttgggagggggcgagggtcgttttttagggcgggaagatcggaggtttaggttgcgtcggggtggggcggggatagagtttagagaggcgtttcgggtcggggagaaggtagggggttgttttttagagacgcgtagtttatagacgcgaagttttggggattaagcgttttttttatgtttgtcgtttattttcgtttttttttttcgttttttttatttacgaggttcgagtacgtagtttagtatattttagtttcgttcggtttcgcgcgtcgaggggaggcgatgatatagagggtttcgcggacgttttttacgcgcgtttggtttcgtatttatatttttgggatttgttaatgcggggttggagtagtggggttgcggtcggggtggaggtcgcgtttcgcgtggggtttcgggggtatttttagtattcgcggcggtggagtgcgtcgtcgttggagggaggcgagacgtgggattgttcggtcgggtaaaaggagtgagggggcggggaggaggtagagtaaggggaggaagaggtcgggagaagagggttagagtaaagatcgagagtcggagaaaggcgaaaggcgcggtgagtaatcgtcgacgtagagagggtagtttttcgcgttgtaatattgagaaggtattcgcgggacgtatgcgtacggcggacggaggcgagtcggtcggggtttttttttcggtcggtagggtggacggtgggttcgtgagtattttagtttttcgaatttttttttttcgtttcgggttcgttttgaggtttcgtgttggaaagtggtcgaggttgggaggggcgcgtcgttcgttcggattttagggtgtcgtcgttgttgcggggcgggagtcggtgcgagtcgggggttttttttcgtagtgcgagtttgggggagtggggttgcgagtgcgttcgcgtgcgaagaggggtatcgcgttattaggattaatatgtttcgggtttgttagggcgttcgcgattttatttttgcggtttcgcgtcggtgttttggtggggaacgcgggagtttagtttttagattttagaaatcgtattgattattcgaagcgtatttcggaaagattaggcgggtggaagcgtcggtttttttacgggatagggagaggataaggaaggggttgggcgttcggggttggtggtttgagcgtcgttgggaagggtaaggagatagagttttttggaatcgtagcgtttttttttaggagaagtgtaattagggtaggggtatcgaggggtagggtgaggaagtggacgttttacgcgtggattttagaagatcgattaggtatgggcgtttattcggagtttttgtttacgtttttgaaaatcgaatgaatagagaagtgttttttatttttcgtttgcgttagggtagttaacgtgtaggcgtcgtcgggatttttttggaataaattcgggtatttgatttttcgtattttcggagttgttttgggaagtcgaaataagtttgggcgttcggattgcggagattggaaagtagggggcggagggcgggagattgggggcgggaagtggaggtgtaggttgtagttggggatcgcggtgggcgttggaggggagggtttgtgtgcgcggttgttttttagcgttgggggagcggacgggttaggggtttttagggaagcggcgtttcgggatcggggtggttttttcgtttttgtgtgcgcggcgatttttatatttagttcgggcggaggagttttgagagaagcggttagttgagagtggggtgggcgttttggggaaaggtttgcgtgcgttgcggttttatcgttgttagagaagtggaagagagagagtgggcgtcgggagggggtttataggcgtcgcgatttattttatttttttttacgtttgtgggggagtgagtggggaaggggttttgggagaggcggcgcgcgggtattgaggtgtatcgtgagtttttcggatttgatagtattaaaggaaaattttggcgagtagttagggttagcgagcgattttagtagtagggacgcggtcgtgcgagagttcgcggataggcgagggggattttaggggagtagttgttgtttacgggttacgggcgatgtacggagtggagaagtgaacgtggtttataggatttttgttcggaaggtggagagcgttataggggaattttttcgatttttgttcgtttcg

SEQ ID NO: 6478 - DNA, 2213 bp, Artificial Sequence
  Description of Artificial Sequence: Synthetic polynucleotide
tcggttttaaacgtttttttagttatttgtgaatcgcgaaggagtcggttttcgcggcggggattttgttattagtattttcgcgggtcgaggtcgttttttcggtcggtttttcgttttattcgaaaaggaattagagtatttatttaagacggtgattggtagggtagattaaggtgttttggtttcggttttagtttcgcggtgcgtttcgttcgtttattttgatcgggtgtaggtagttatcgtcgcgtagggcgtttaattcggcgttcgtcggcgtttcggcgtcgttttgtaggttgcgggtgagatgcgcgatgtaggtggtggttagtagtagtacgtttagtttggatagtttggtgtcgggcggtacggacggtagcgtgcgttgtagttttaggaaagcgtgtcgtagggtttgtattcggttgcgttttcgcgtcgtattcgtcgtcgtcggtcgttcgttttcggaacgcgagtcgtttttagggttcgtcggtttcggttcggttcgttcgggacgcgagtcgcggatggcggcggttaggggcgcgggttcggcgttggcgttgagggggttgttcgttgggcggtcgcggtttatggtagtttttcgcgtcgcgcgcgttgtaaaggatcgaaggtgcggtgaggtcggggggcggtcgggtttaattcgagaggcgtagttttttggtttttttcgtgcgtttattagtagtttaacggggttaagggcgtttttaagcgagttcgttttgtttgggacgcgatttgttttcggacgtttggggagagttgcggaatttcggagtttttgggttttttagaaggataagaagaggcgtagtgtcggttttgttttttaggggtaaattaagtaaaaggtttattttattcgggaagaaagatttcggaagtatagtttaggattagtattcgttcgcgtttgggtgattttatttaattcggtacgtacgagaggtggcgcggttttttttcgtcgacgtcgcggaaaattacggtttattagtcgttttcggttttttacgttaggggggatttttgttcgaggagcgggggatttttagttttatttcggggtacggtattcgttatcgtttcgagttcgagagttgcgtagtacgcgtttgacgggttttttattttttttggagcggttgagtggagtttcgtttcgtcgtgagggcgggcgaggggcgtggagtagggtttgtgtggttagggtcgcgttggttattttattttcgttcggtcgatgtttaagtcgacggttgtttttaattttcgttggttgtgatttttatgcgggcgtttcgcggttaggcgtgtgtgtttcgatcggttaaggtaggtcgggcggaggatttggtttatcggagaggttacgtcgggggttgaggcggtttagagggttattaattaaatttttcggcggggcgggttcgggggcggggcgtttttttggtttcgtttttcggtttattgttttacgttgtttttttcgaggcgtttcgttgagggcggcgtgtggagagtttggggtgtttgtcgtcggttgcggtggggtcgggttggaggtcgcgggtgaggtttgtggttaatttcgcgttgtcgaggttttattttttcgagtttagtttgattttaggtcgtttttaggtcggtgtttagttgaggcgggaacgttgtagtttggttgagcgtgatttttaggttttgtgaggaaaagtcgagcgcgttatatcgaggcgttagtcgtttattttattataaggtaaaagatttatgttgttttagttattttaaagttgggagatatattgtattttttattagatttcgaatgtttttagtgtttgtaattttttaagaagtttttagagtagatagtttttggatcgtgggtattttttttcggggacggggattttgttgatcgttttcgttgttttcgcgggggttatcgttttttaattatttgggcgaaatatttttttttggttttgtatttgtggatttacgggaagcgtgatttgtagcgaggtaggattcgattttaggtttttttagaaagcggacgttgcgttttaaggtttgtttagagtcgttttaggaagtcgtgggttttcgatcgttttaaatcgtagcggtttttgtaggttttggattcgtcgttttcg

SEQ ID NO: 6479 - DNA, 363 bp, Artificial Sequence
  Description of Artificial Sequence: Synthetic polynucleotide
gcgtttagtacggcgggtagcgtcgcgttgcgtatcgtcgtcgattatgagcgaggatagtcgcggagatagtcgcgtcgagagcgttaaggatttggagaagtagtttcgtttgcgcgtgtgcgtgtttagcgagttttagaagatcgagcgggattatgtgggtacgttggagtttttggtgtcggtgagtgttttcggtagacgtagggggacgttcgggcggcgcggggcgcgggtttcggagtggttgcgggaaggacgcgcggtattgtttgtgcggggattcgggacgggtcggggtattataggcgcgggaatttacgtgtggattttgcgttcgcgggcgcggtgattttcgcg

SEQ ID NO: 6480 - DNA, 960 bp, Artificial Sequence
  Description of Artificial Sequence: Synthetic polynucleotide
tcgtttttcgacgttttaattagttattattttttcgaaggaaaataaatcggtttttgatatatttttttacgtgtagcgttcgacgttacgggttttgggcggttgtattttttttttgtcggttacggtttaaggttttattattgcgcgtatttagtttttttttaggtgattttcgcgtatttggcggcggcgttttaggtttcggaggttgttcgggcgggttggggttcgggcggcgttcgttgagagtcgcggcgttttttagtcgtttttcgggcgtcgatcgtcgtttttttgtttcggggtggggtttaggggtattagtagtcgcgggttttcggtcgtcgtttgggaatttagggttagatttagttttataataacgttttttcgttacggtaatttaattggaggtagaagtcggcggggcggtcgagcggggcggggcgggagcgcggtcgtcgcgagttacggtggggagcgggcgcgggggattttggcgggtttcgggtagcgcggttgtatttatttgtgttataattgcggcgacggggggttgaggaatcggtttttttaaaagtaaatcgaaaatgggtaatagagaggtcggggtagcgttaagaggggttttgtttcggtgtttagggtaaaaaattcggtttcggtttttagaaattcgagttagcggtggtttttttttttttttttttttaaacgtttttgtgttttcgggtcgaggggcgtttttcgcgcggtttcgagtgtatagcgatattagggttggcgttggagaggggagttttttttttagtatttttcgggtttttttcgtatttttatttatagttttttttttgggttcgacgttttttcgttttgtagtcggagtttgggtttggtgtttattgtttcgcggggtgtttcggacgtttggtttttgtagcgttttttacg

SEQ ID NO: 6481 - DNA, 1404 bp, Artificial Sequence
  Description of Artificial Sequence: Synthetic polynucleotide
acgcggggttttcgggaatcgtcgtttttttttttcgttttcgcgttcgcgttttttttttcggggtttcggtttatttatttttggtgcggtttcgtcggatttaggagtttcggtcgttcgggttgcggggagggggcgtttcgggtcggttttagaagttattttgtaaagaggtagggggcgcggggtcgcgcggggcgagttcgggattcgcggggaagaagtttttcgggatcgcgtttcggtcgttcgagtttttcgcgttcgtcgttttttatttcggtcgggggtttatttgggagttcgttgttttcggttagtcgttcgcgtgtgtttagggttagtagtacgtataagtgttagcgtacggtcgtcgcgtttatgtttaatgcgggtttcgttgggcgtgcgggcgtgcggggcgcggggattcgatcgatcggtcgttttcgtaggcgttgttcgttgttcgtcgtttcgttatcgttcgggttttcgagtcgtttagttagttcggttgatgagttgatagcgcgcgtttattggttcgtggcgtcggaggggcggggcgtcgtttagggtcggttaatgggcgtcggttttcggtttttcgaggaagaggggggttcgggcgtcgtcggggggattttttttttggggcgggcggtaggtggggggtgtgggtttggtcggtcggttcgttaggcgcggggtttaggttaggttggggttgtttggaggttgcgtttttttttgttcgcggcgtttcggttttcgtcgtcgagagtggacgtttttttggggtaatttttttcggtttagaggtagtttcgggggcggggattttgcgaatcggggatttcgtgaggtcgttcgttattcgtgggtagtgaaacgcgttagcgcgtagagtagattcgtttgcgttgtcgtttgttggacgttttttgagtatttattggggatcgagtgcgggcgaggtagtagcgaaggaatcgggaggggaaatttcgtgaagattatttgaaaattgacgtttaaaataaacgaattttttagtattcgttaaaggatagtggttcgttagtgtgtttgttacggggcggtcgtaggatttgcgtttggaatcgggcgggcgttcgggacggataatgtcgtttggcggtcggtttcgcgggaggttttcgtacggggttaatttcggtcggcgaagttcgttgttcggaatgcgaggtcgaggtttttttttgtgatagatcgggcggggttaggaggaggggtagggcgggtatttcggttcgaagatttaggaattgttttggtttggtttggggtttatatttgacgtttggcgagggttggtttcgggtttggttttatcgggtttgggagggacgggcg

SEQ ID NO: 6482 - DNA, 1247 bp, Artificial Sequence
  Description of Artificial Sequence: Synthetic polynucleotide
tcgtggggtattacgcgcggatttttgtttggcggtttttgcgttcggggttgttgagttcggggttcgttttgaggtcgcggttgtggtttttggttttttcggttcgcgttattgtcgcgcggcgttcgttgtattttgttttttttgcggtttcgtatgtttttggtggaatttagttcggcggacgacgaggaggatgagatggaagtttgttggaaatcgggtaaattttatagaaaattgatgaggaagacggtcgagagtaggattttgggagtatttatggcgggtaagtggttgcgtttttttaggaggcggtggcggcggcgtaggacgcgcggggtacggagcggttggatagcggtcggggttcggtttttcgggcggattcggagtgcgaggagtcgggttttagttatataaatttcggtttcgttacgttttttttcgtttttcgttgggaggggaggaatggggagggagggtagaggaggggtggggagggtgggaggagagtcgggtggtgcgggtcggaggtgtgggggagaggggtcgcggtgcgtcggtgtggtaggaagacgtagcgttttcgcgggacgcgcgcggggttgtcgggcggtgcgcgcggcgcgggtcgtaagcgttgatcgggggaaggcgggcgttgtcggttcgtggtcggggagtaaaggttggttcgtcgcgttagggtttttttcgaattttcggaggtgtggttttttcgtagcgcggtttcggttttcggttttcgttagtcgtttttatttttttgggagcgagcggtttcggaggagggaagcggcggcggcgtttttaagagatagtttggagtaggcgtttttgttgtaggttgcgtgttgtttcggggcggtggtatttttttttttcggttttaatcgttaggtttgtcgtttgcgttttttaggggttagttcggagttagagaagtttcgttttgggttaggcgtagggtttagttcggaatagttttattttttcggttgggtatcgttttttataaagataggcgtttattttcgattttcgaggttaggtaaaggttacgagtttttagagtttggatcgatgttaaaagttgttgcgtttttttgtaggttttagttttttttttcgtagtttttaattttttttgacgtagattttagttgttttattttttcgtttgttttcgggattttttttttttcgcggtttgtttttcg

SEQ ID NO: 6483 - DNA, 1861 bp, Artificial Sequence
  Description of Artificial Sequence: Synthetic polynucleotide
tcggtgagtagagtcggcgtagttatagcgcggagtcgcggcgtttattggttttcggagttgttaatcggcgtgtaattttgtaggaatttttttcgggtttatttgggagttatattgtcgttttttttttttagtcgtttaggggagtttggagaagtaggtttaggagggagggagttagaggaaaagaagaggaggagaaggaggaggattcggggagggaggcgcggcgcgggaggaggaggggcgtagtcgcggagttagtggtttcgtttggacgcgttgttttttagatattttcggagttttagtcgcgcggatcgcgcgttttcgtcgttttgtttttaaatttttgtcgtagtttttttttaagttagcgaatttattttttaaaattagaaattgaatttcggtacgggaaaggagttcgcggaggagtaaaattatagtagagtaagaagagttttagagagtagttttttcggagtattaatttcgtgtcgggagtgtagaaattaataagtgagagggcgtcgcgttttcggggcgtagttgcgggcggcgggagtaggcgtaggaggaggaagcgagcgttttcgagtttcgagttcgagttttcgagtttgagtcgtaatcgttgcggtattttgtttcggattcgtgtgcgcgggttgcgtcgagcgttgggtaggaggtttcgttttgttttggttgtaagtagcggttgggagtagtcggtttttggggaatatgcggcgcgcgtggattttgtttattttgggtttggtggtttgcgtgtcggcggagtcggtgagtgggttaggcggaggatgcgcgcgtcgtttagggtgtttgaagttacgagaggagttcgtagggaataggggagcgttatttggggaatttttagtttttaagtatatatcggagattcgttgggataaatgcgttcgttcggttattttttttttttttttttttttttagaaaagcgttgttcgttggcgttatttcgcggttcgcgggaatgggggtatcgagaattgcggtttggtttagtcgtagaggtttttgaagttatttttaattttttcgttttcggcgggttttgttgcgtggtttgggaaggacggaggggaaagggtggtaggaggggggagtttgggtcgggttcgcgagggaacggttttatttcgcgcgtttttcgagattagggatgatttggaaatttcggggttttttttttcgtatattatttttttcgcgttagtttttttgtttgattgtatgtaagttttggggagatgggggttagatttaagagattcgcgagtgtttagagagaaaagtttgtaaaagtttttttgtttgatgttttttgcggttagggcgaggtaatcgatattacgtggaatcgtagtaggcgattttttaaggggatattgggggaggtacggaacgcgttcgaaaatgttgggacgtcggttattggatttttagttttgcggcgatttttttttcgttgaggggtggaggttgtatcgcggggcgttagggacgggaggatatttttataggagttatacgggagtgtcgtaagtagggcgaggcggggtacgtgtgatacggcgttcggtttcgggtcgtttggtcgttgggggatagaggtttttttttcgttacgttcgttttttttggttttggcggggcgtttttggggtcgggaggagtttcgttttcggcggagcgtttgtcggtatttagtttttttttttcgttttggcggtgggaatttgatttttttttttggtcgcgtttcgggggttggagtttgtttttttacgtcgtttaatgagcg

SEQ ID NO: 6484 - DNA, 3044 bp, Artificial Sequence
  Description of Artificial Sequence: Synthetic polynucleotide
gcgcgcgtgtggaaggttgggtggggtgcgtatatacgtttatttgtgtacgtatatatatatatatatatatatatatataggtatatatattcgagtttagttatttatattgtttgtttagggcgtttggaagagttggcgagttcgtttagttttgtttattcggtttcgtttcgtttttttcgggagggtttttcgggcggcgtttagtttcgagtagagtaaaggacggcggcggttattttcgtttttcggtcgttggtttttcgttttttttcgtttttttattgaatttattttcgtgtttcgaaaatttgattttaattcgattttttcgcgttttcgttttttttttttagagtgagcgttaaaaagggtttgatagatagaagtttttggttttagtatcggtttagttcgtttttagacgatttttgttttttttatttttatagtttttagtggtcgttttattttcgtattttttcggttaattttaatttttttcgttttttttcgcgttgtttcgcgttttttttttaggattttttcgtatatttttagcgtttagcgcggttttttataatttttttacgtttcgtttttttcgttttgttttcgttttcgatattatttgcgttttttattcgttttaatttttttttttcgttatttttatttgtgggtttttagttttttgttttttttttggtttttatttttgatattttagggattttttttttttttttacgttttttttttttttaggatttcgtttcgatatttcggggttttttcgttacgcgtattttttttttttaggttttgatatttgggcgttttttttttgttatttatttttagttttagttttgattttcgggcgttttgttatttttacgtttttcgtttcgtttcggtttttcgggcgtttttattcgtcgtttttatttttttatttgttatatttggtatttttgtttttatttttgtttatatttttttttcgttttcgatatttcgggcgtttttttatacgtttttattttttatattttcgttttcgaaaattcgggcgttttttttttttacgtttagtttttttttttttttcgttcggtttcggatttagtttggagatcgcgttcgggaggggcggttgtcgttcgcggggcgttcgcggtgttcgggtttgggtagcgaggaggtgacgtcgttttcgcgggatgagttcgggaggcggaggggcggaggaggtgttggcggcggtattgagcggcggcggcgtagggcgcgcgggtttttcgcgtcgattttatcgatttaaggggcggcggcggtggcggcggttgagcgattttgggtcgggcgcgtgatgaggaggggtcggcgttagatttcgttgtacgtcggagttcgtttggattcgggcgttggtagtcgaagggttttggtttcgggatttttcgtcgttagttttcgttatatttttttcgttttcgtttttttattttagtcgggggtggggtgggtggggttggggttttcgcgggggttttcggtttcgcggttcgttttcgggtgtgtttggaggagttttttttttgtggcgcgcgggagttttgtgatgcgttagtcggcgggacggatgagttgttttttcgggaaatcgttttcgtttttttacgattttttcggttttcgtttgggtgtttttcgggtcggtagtatttcgttttcgggcgttcgaagcgagtttttcgggggtttgttcgtaggtattttttttttttcgaggcggcgcgcgcgttttcggttttgatcgcggtcggatatattcgcgtttcggttcgtttgtcgttttttcgtttgttttttttagttattttatttttagttgttttcgttattttattttattattttttttcgttttttcgcgtatttcgcgtttcggtttttagttttttttttttttgaatcgtttattttatagtttttcgttttcgggaagaagaaatatttttcgaagcgtattttttagttttttttttttacgcgttcgtttttttttttttttgttttttttgggggaggggggttgtcgttttggattgaaggttattgatttgtatgtatttgttttagcgttggaggttgttttagtcgtcgcgtcggtgtcgtcgttgttagtggagttgttttttcgtttttttagggtggttcggttttattaaatatgtcggtttttgtcgggtttcggggtcgtttggtttttatttcggcggttttttagtcgtttttgtagttcgagatgtttgattttagttattttacggaggaggagaggaaaattattttggtcgttatggataggtagaagaaagaagaggagaaggagtagttcgtgtttaagtaaggatttggttttatattttcgtttttttttttgtttttcgttttttcgtttattgttttgcggtcgtttgcgcgttttagttcgtcgttttttttttcgttggcggcgtttaggttacgagggttgcggttagcgtcggtcgttcgggttgttttaggggtgtttgagagtaggggtgtgtgtcggggagggagggcgttaaggtcggttgaggtgagggtggcgagttttaggcggtgtgattttttttggcgttttttcggattttttcgttggttattttggtttcggggttttagcgggattggggttgaatttaggttttgtgcgtatttttttttttttcgtcgcgttgaggtagtgattggggtatagaatttaatatggtcgtgtataggtgttttttggacggattcgggcgaaggcgcgttggtaggggatgcggacgttattttggttttacgttttcgcggggcggttttattagtaacgcgggatagagtagggttgtttatagtggttgcgagtagcgggcggcggcgcgggttaggggtttaagttttgtcgcggtcgggtgggtgtgcgttcgtcgttattttttagtttttttttttcggcg

SEQ ID NO: 6485 - DNA, 1603 bp, Artificial Sequence
  Description of Artificial Sequence: Synthetic polynucleotide
tcgtatttcgttcgattaaggtcggggtcgtagtttgtattcggattggatttggatgtagttaatttttttttggttgatggaatagttttttttttttatagtttcggcgcgtttttttttcgcgcgtttcgtcgtttttcgtcgtagaataggagttgcgcggttcggagcggcggcggcggcgtcggagtattcgtttcgtacgtcggggcgaggggcgagcgagcgcgttttttttttcgcgttttgcgttttcgcgtttttttttttttcgttgttcgttttttcgtttttttttttttttttttttttttttcgtgttattttttttttttttttttttttttttttttttttgatcgttcgtttgtatatttttatttttttttcgtcgttttttttttttttttttttttttattgttatattttttgtgttttcgtttttttttttttatttgtttgtttattttcgaacgtgaattcgcggttttcggaggagtttagcgttcggagtatttggagttcggtcggcggcgggtcgagtttggttagcggcggcggcggcggcggcggcggcgggagtcgagggagcggtagtcgcgatcgcgggtatcgcgggagttttagcggtagtagtcgtcgtcgagatgtttcggcgaaagtaaagtaaatttcggtagattaaacgtaagtttgcgcgcggggtcgggagttggtgggattattgtttaggagcggggtgcgcgggacgggaaagcggtgggtgggtggcggggttaggggagattcgttttcggttttttagatgttttaaattttgtttgagtagtcgaagggataattagatagttatagatagatagacggttagttcgagtttcgggtaggagagaggttgcgaggagtagtttatgtttgtttcgtttagttttcgcgttttcgggttgtttttttaatttcgattcgcgtacgttgcgagttttcggcgttgtcgtttagtcggaggggtagtttcgtttttttagacgtttattattgttgttgttattgttttgtgcgattgacgtgggattatttttgggaattatttttagtaattagggtagaaattttttagaaaagttgggcggtcgagatttcggggcgagggaggtaatttttttacgcggtggaaaattagagcgttagggtttcgattttgggcggtgttagagttatattaaattcgaagcgaaataaaaagtaggtgtaaaagttcgcgtttttgcggcgggcggtcgtgcgtttttgttttgcgggcgcgggttggtggttggtaggtcgtgttttgggatttcgggcgggttcggtttacgtcgttaggacgtttagtcgagcggggattcgggtggtgtttggttttggtggcgcgcggagttttttttgggaggggtcgttagttattttttagcgcggaagttgtgagtttaaggcggtgggcgcgtaggggagtgtatggttttgagttttcgggtgttcgggggtttcgatggtgtttagaggatacggcgggttaagagatatttttcgaaataggtacgttcgtagagattaagtcg

SEQ ID NO: 6486 - DNA, 1365 bp, Artificial Sequence
  Description of Artificial Sequence: Synthetic polynucleotide
gcggcgaatatgagtgcggatcgtacgatttagttttgagcgttcgattggcgttcggttcgtcgagtttttagcgcgtttcgtttcggtttttcgcgtttttagggtatagaaaatagagtgttttgtagagttttagggttttaaaggtggggattggggattcgtaaaagttggggtggagagtatagttttgattatttgagttttcggagttagggcgtgagtgagcgtttttatacgttatttttgaagtttattacgtatttttggtagagagggatttatttcgtttattgcgtttttatcggttgttttggtagtggttgtaatttatgtagtttagaatgatgagggtaaaggagaaaaggcgaaattgtatttgggcggtcgggcgggggagagacgttttttaaagtttaggaattggagggttcgtttaaagagtcggcgtcggtcgcgttgttggggaggatttagagggagattcgttatttattttcgggtcgtatcggttagtttagcgcgattagtattttttcgttacgaatttgagagataagaagcgaaaatagggtgtgtgggggatggagagagtttcggggaggtagttgcgttttcgtacgttttaatttaaagaagagagggaaggaggaagcgaatttattgtttagtacgagtcgcggagcggtttaatttagagcgggtagttgcggacgagttggagaggaaggtgattataattagtgaattagtaatttttgtcgagttttaagtttcgatttagcggtataatgcgttgtgtcggcgtttcggggaaaggaaagaattttaaaggtattgagagcgtagggttaaaagaacgtttttaggttatttggagtttacggcggtgtatttaagcgtcgtagttgcggttgttttggtgtgggttgtttatcgtgcgtacgtttcgggcggcgcggtttttttaggcgcggtgttttatttcgggttcgggaagcgagtcgtttggttagtacgtgggttggggaaaagtttgtcgagatcggttgggagcgtttggtagttttggaattttagcggtcgtcgcggggttggcgacgttaggtaggagcgcggagcggcgggtgtagttattgggatgtttcgttttcgttcgcgagcgcggtttttaggtaaggggtgcgttcgtttatattttttgtttttttaattaattgtgtcgttttttgcgttttttttacggttattttatagttaagattttttttttttcgagttgtagaaggtagaacgttttcgggaggacgaagtgattcgaagggatgtggtaagcgtatttttcgatggagatgtagatcg

SEQ ID NO: 6487 - DNA, 419 bp, Artificial Sequence
  Description of Artificial Sequence: Synthetic polynucleotide
tcggggaggcgatttttggatgcgttttgtgcgagtaaagtcgggagagcgagttttaagtatttggtagcggtgtttttagtaggcgtcgaggaattcggttatttatttttggtgaattttgcgtttattgaggtattcgaggtacggatgtgttcgtttagtattcggagacgaaggagagagagcggggatatgcgttttagttttgttaggttttagggtttttatttttgtatttaaagtttttattttattttatttttcgttatttattttttgtttcggttattcggtgcggttttagtatcgcgcgttttttcggtacggttttcggagaaagttttttaattattagttacggtatttgtagtttttgtacgtcgttcggtttcgtcgggtgggtagcgttcgttacg

SEQ ID NO: 6488 - DNA, 3675 bp, Artificial Sequence
  Description of Artificial Sequence: Synthetic polynucleotide
tcgcgtagtttagttcgcgtcggggcggtgggtgggtgggtgtttgttatgggattatttttagcgttttatttttttcgtaaaagtggcgttttcgttttttcggtttaggtatattcgttcggggttcgtacgttcggtttagatattagcgcggtggagagtatcgggtggggttttcgaagggtgaggttcggaggcgtcgcggagggggggttttttagagaggagggggcgttgcgggaaggtttttaagggaggttgcgtttaattttcgacgttttgtatttagttcggcgcggcgcgtttagtcgttttttcggatttttttcggggcgcgggagtttagcggcgcgtttagtttttatttatggtggtgatgatcgtgatcgtaaagtagaaggagtcggcgaatttttattggacgtcggcgcggtgcggtttcgattgtaggattattagttttagttgtcggtagttttcgttgttgatgttgtatttttttttgattcggattttttcggttttgagtttttttttttcgcgtatttcgtggttcgattcgagggcgtcgaatacggcggcgtttattagtaggtaggtgaaggtgtagacgatgagggatagagttcgtacgttttgtttttttatggtcgttagtaaggagtcggcgcggggggtatgtttcgtaggtttatagtcgcgcgcgttttattgtagcgttcggcggtcgtcgtcgttttttttttcgtcgtcgtcgtcgtcgtttttaagttgtaagcggcggcggtagtagtagtagtagtagtggggaggcggggggcggggaggttggggggggtttttttcgttggggtcgttatagttatcgttatcgcgaggcggttggcggggtaggggcggcgcgggttcgggtttagtcgagaaggcggataggtataggaggttgttcgagcgtcggggttaggcgttcgggaatttcgatattttgcgttagattcggtcgaagtagttcgttttattgcgtagggttatgtagggcggtttcgttgggtatcgcgcgggttttgttgtttttcgtatttcgtttttcgttttcgcgggaaacgtagggacgggaatcggagttagaaagcggtcggagggcggtcgcggggttcggtatttttgtgggtttagttcgcgggtggcggtgtttagtaaggagtttgtaggttcgcgcgtttagcggaatttgtttttttttttattttttttcgttttttttcggtggtggggaggaaaagtttgcgaagtggcggtgtttttggagttttttgtaagcggggagggggtcgagtaggtgtagcgggaggggtagttcgttttttaaaggttcgcgcgtttagcgtttattcgggcgcgcgggtgcgtagcggggttttcgtcgggcgtcggtcggtgcgcgaagtttgttcggtttaatttttaaggcgcgggagcggggcgcggttttaggacggtagggatcgcgatggagcggtttcgggggcggtcgggggacggcgcggtggcggtcggttagttcgttttttcgggggcggcgggcgcggcggcggcggcgggaggggtttcgcgggtttcgcggagtagcggggcggacgcgggcgtatgagtcgcgcgggggtcggggtttttcggcgttcgggcgtttcgggaggcggtcgtcgcgttggtttgtttcgggcgttacgtgcgtgcgcgtcgttgggagttcgaatgtgtgtgtgcgcgtgtgtatgtgcgtgtgtgtgtgtgtgtgtgtgtgcgtttggtagtttcgtttcggcgggagggtttcggggagcgggggtcgggttacgtcgaggtcgggttttttttttttttttttttttgtagtttttagggcgcgttatttttcgtttggtttttagttagttggcgaggttgttgtggtagttttcgttgtagatttagcgcggcgtagggcgtacgcggagggagttcgggaggggcggtttgagtcgttagggagggggcgggggcggagtcgtcggcgggttttggcgggggatgggaggataaacgcggttttttgggtttttttagtttcgttttttaagagcgtaagtagttttggcgggtggagagtttgagggattcggggttggaggaggaaaacgggatttagttagagatggtaggttgatagttttaggtagattgggtagagagtggggagtagaaggggagggggttatgggtatataggagagcggtagtagcggtttacgaagttttttttattttttattttttatttagttattcggcgcgggagcgtgttattggttagggatatggtttcgtggagtggtggggtttcgagggttgtttcggttttttcgttttttagcggtatagttcgtttgggttagtatttgtagattcgagtcgtttttttggagagcgttaaggatagtatgggtcgttatttttggagttaggatagcggggaaagatatcgtaatttttcgatttagtaatttttttgttgttttattgaaggaaaaaaaaaaaatatatatatatatatatatatatatatatatatatatatatatatatatatatatatatatatatatatataattattttttgatatatataattattttttggttttttatagttgggcgtaaggtgcgtcgtggatgtagttttgagttacgcgatagttttttcgagattatttggggtaggaatacgaggttcgggttggggcgtatttattttttgtttttagatgagttttttttaggttttattttttttttattttggttttttttatttttttttttttttcgttttttttttttaggttatcgaggggtttttttttgattttcggttttttgaatttcgtttggagttttggagttttaaaaggatagatttaagttttagagatttttgggttttttttttttttttgattttagttaaggaagggatggagatgggaaagagttgtttggcggtaggttagtagttggttaaggggtggttggggaattagatttaattttcgggtagttcgcgggttttaggagattagttttttttgtgggtcgttttttggagcggtgttcgggttttttggttttagggatttcgggtttagagggtttgggattttagtgatttatcgaggttttttagttgggacgttttgtattttatttttagggattacgggtgtttattagggaaggggagttcgcgttgtgggttacgtttgagtcgttaggttttcgttgggtttgcgggcgttttggggcgagggagcggggagttttatttcgagtaggtattttttttagatttattttggaaattaaggttttcgcgttcggtaagtgagtttggttgtcgggtgagttatcgcgagcgggcgataaggatttttagtagttggtaattaattgcgtcgtggtttagtttacgacggaattttagttaggtttttcgtcgttttggtagcggcgttatttttgagttatagtcgtcgggttttcgcgcggttcggaagtcgtttgttcgtttcggcgttattagggggtattggatttcgatttacgcggcggtcgcgtagtcggtttcgttgcg

SEQ ID NO: 6489 - DNA, 3675 bp, Artificial Sequence; identical to SEQ ID NO: 6488
  Description of Artificial Sequence: Synthetic polynucleotide

SEQ ID NO: 6490 - DNA, 3378 bp, Artificial Sequence
  Description of Artificial Sequence: Synthetic polynucleotide
gcgagcgcggagtcggagagtcgggagtataggcggtcgcgtcgcgttttggttcggttcgggttcgcgcgttagtatcgttcgtagcgcgggtattcggatttttcgggcgttcggggggttttagtaggcgcgggggaacgggagggggtttgcgtgcgtcggcgggtgttttttagggggcgtttcggcgaggtttagagcgggtcgggggcggcggcggttggaggagttttttttattttcggtcgggcgttcggtttagtcgtcggcgacgcgaggcgttcgcggggatttgtaattcgtcggatcgagttttcgtcggcggggtcgttgttgttggggaaggtaaggaaggttttggcggggggttgggggcgcggcgggtgggggcgtagcgagggtgggagggggtcgggggaggggcgggcgtttagattttttaatttcgtcgtttggggtttcgtagtttcgaggttttgcgtttagagtttaggagtttggatttttattttttatttttttagttttttgttttttttagcggtggcgatggaatgtggtaggttttcgcgagttcgtattgggtaggttgaggagggggcgattttggacgtaggagaggtttttcggcgtcgtcgttttttttttatttatatattatagtttggtatttttttttattatatgtatagggtaggttggggagggcgttttcgttgtatttttagtatatatagacgttggcgggggtttaagggagttttttatggtttttaatagttatatatagacgtagtaggtttcggagagttttcgagcgtgttttttttttgttaattacgtttagggttttttatagatattgtaagggttcgagacgttttttttttacgtatagagttcggggtaggtaggagaaaattttagattttttttcgaagttttcgttcgtagaagttttcgtttgtagatttggtattggtagtggagattttttggaggtatttttttttatttcgggcggagggttatttttgcgttttttatttttacgcgaacgtttggtttttttttttttgtttatttttttattgggtcggataggtcgcgcggataagtcgtttttaattttgggtcggttttatgtcgttttcgttttaagcgtcgagtattttcgggcgtcgagtattttcgggttcgcgtcgtcggtgagtagaggtcgtcggttttttatcgtcgtcgcgttagtttggagtcgcgcggagttgtttcgaggaacgagtacggttttcgtttttttttggggaggttgggagttttggattcggttaggagttttttttttaggttttcgcggttttttgggcgaggtagagagttttttcggtttcgggagggggcggcggagttgagaattatcgcgaagcgatgcgatcgggagggtttgacggaggttgcggtttcgagttcgcgtttttttttttggtcgcggcggtttttgtttggttatttttcggtagtttgaagagaacgtttaatttggtattttagttttaggtcgttgggtattttatttttttttatttttattttgggtttttaagttttttggagcgtaggcgtttaggttgggattcgaagagttttaagttagtttttttttagtattcgttttcgtcgcgattttttcgtttttttttcgggtttggggcgtagatttttgggttgtaatttcggagtagttgaaaggtaggaaggcgtgtgggcgggtagggggtttgtattttcgttttagaggagtcgtttgtcgtttgtgttggggagggagttgggaggtttgttttttcgttttattttgggaatttacggagattttcggtattttttttatagatataaatatacgttttttcggagcgagagtcgtcgcgggggaatagtagaggtcgcgcgggcggaggcgggggaaaggggagttgggttttttttttatttgggagggaggtggtatacggtgtgtggggtttggggaggcgattgttacgttttttagaatttttatgttttttattcgtttgcgatttcggttgtcgaggaggtaacgagggaggtcgagtcgttttttttcgtgggcggtagcgaaattttgcgttcgtacgtcggggtgtcgtcgagttcggttttgagtatttagtaaggttaagtaggcgaaggagggggcgggggtttttgggcgcgttttcgttcgcgtatagtcggggttttggaagggggtgtgcgtagttcgtcgagttagtttcgttcgtttgtcgttcgcgttcggttttcggaggcggacgttgcgcgcgttcggggatttcggagcgttcggcgttttacgtttttttttcggttcgttagttgttttttggcgttgtttttagatttgttgcgtttcgatttggggggtagaaggttggttcgggagattcggcggttgagggtcgagtcgcgaagtttagggatgcgttagagaggcgcgcggtttcgcgggtgggcgttgcgttggggggttcgagtttggggtttgtcgttttcgattttagggacgggcgtttgtttttgtcggggtttcgcgtaggggcggatagagggcgattcgtcgtttcggttttaggtagtatttattcggatttcgggttagggagggggcgtagttaagttgtggagttttcggaggtttttttttttttcgtaggtttcggtttttttcggatttcggtggtcgcgttcgtgaaatggggacgcgggttttgttttcggattttttttagttttcgatttttcgtatttgtttcgagatttaacgtgttcggttcgtagcgtgttgggtttgcggcgttagggtggttcgagtttcgagattatttgcgtttgcggatatagtcgcggggtttggtatgaagggttttagggagggtttagtaagcgttcggggttcgagtagttttttgcggcgtttttcgttttcggtcggttcgatttcgttttcgggagtgggtcgtggggcgcggagttcgtttttcggggacgtcgcggggttttaggtttaggcggtcggcgcggggtcgtagtggcggaaggcggagggtcggcgcgttgtcgttgattgtcgggagagggcgttcgtatcgcgttcgcgcggttttgttcgtttttttcgtttttttcgcgtttggttcgcggtttcggttttattttgggtagtttcggtcgttatttttttttcgttcgttcgttcgttcgttcgttcgttcgttcgttgttcgttttcgtcgtcgggtttcgtgacgcgtttcgcgtttcggtcggagtttttttcgtcggttcggttcg

SEQ ID NO: 6491 - DNA, 1108 bp, Artificial Sequence
  Description of Artificial Sequence: Synthetic polynucleotide
gcgtgtttagatgaaaagcggggtagtcgcggttcgtagatagcgggcggttgggttagatcgtagagggaagtttttagcggtaagttttttcgcggggaaggttgtgtttgttttaggagatgagtcgtaggtattaggggtgatgaggttcgggggaggtggatgtgggggatggagcggttttaaggtcgttagttttagtcggcgttttgggtcgcggggtcggagagtttcggagcggattttcgtcgcgtttcgaattcgtttcgcgtttttaggttatattcggttcgtatttttttcgttttacgtgcgtttacgcgttttttcgggtttttttttttttttcgcgcgggtcgggggcgcgggtttcggaggagttgggggcggcgggggcgcggggcgggcgattgtcgggtttcgggttagttttcgtttttcgtttcgttttcgatcgttcggttttttcgttcggcgttttttcgggttgcgtttcgcggtttttggcggcggcggcggcgggcgtagagcgcggtatgggcgttcgggtcgcggggtttggcggcggcgggcggacgggcgcgcggttgcgggcgtaggtgcggggcggcgggtcggggtcggggtcggggcgcggagtcgtcgttcgggggtcggggcgttcgcgttttcgtcgtcgttgacgtttcgtttgtttttttttcgtgtttcgttcgtttttagatttttttttttcgttttttcgtagttcgggttttggtcgtggcgcggttgtcgtacggtgtttttcgacgtttttcggacgcgttgtttttgtgatcggttttttattttcgttattttagtttagtttagcgtcgacgcggtgagatttcggtcgggtcggcgggaggggcgtcgggtaggggcgcgggcgggggttgtcggcgggtttgcgggtggggagggttcgtattcgttttgtttcggaggggtcgttgtggttcgtagtcgtcgtggtttggttcggtcggcggggtttatgcgtttttggagagggtgggtgggcgtcgagcgggtggtagtgtggagttggagacgggtttgggaggagtcgggattttcg

SEQ ID NO: 6492 - DNA, 1700 bp, Artificial Sequence
  Description of Artificial Sequence: Synthetic polynucleotide
gcgcggggtgggcgttttcggttttttagtttttaattttttcgcgtattcgggacgggtgaaggcgtttagttgtcgagtatattcgcgacgcgggtttaaatttcgtcggtttttaggtatttttatttcgttatagcgcgggttgttttttttttttttttcggaggaattttttaattttttagtatttatattataataaaggaggttcggtttattaatgcgcgatcgtagtttatagggatttttaacgaatttcggtttagagaatgtatttggtcgtgttacgcgcgattttcgaggggtaggcggacgggtttaggcgcggataaaggggtttttcggggcgtttaagttcggggcgggacgtcgggagcggagttggtcgggaatttattttcgtagcggttcggttgtgtttttcgtggagtagaagggcggcgggtagtagtagtagttagacgttgagtcggggttttatggtggcgcgttcgaggcggcgagggacggttgttcggcgtgcgggggtcgcggcggatagttagttttcggaaggtcggatttttagcgttacgtatcgtttcgggtgcggcggttttaagcggagatttgagcgcggcgggtcgagttttttaatttgttggcgttgttttttttttttcggcggtgcgcgggcggcgttttaaaggggaggattttgcggcgcgggtaagaggcggcgggagcgcgcggttcgggagtgtggttgtagtgcgtcgggatattagggtttcgcgtttcgtatttaagaggttttcgcgttttaatttttcgcgttcgcgcgttcgcggatttaggtcgaggatcgaaaggggtcgttcgagttttcggggtcggcgtttagagagtttagtaaggtcggtcgttttgtcggtgtgtcgtcggcgggtgtttttggaagggttaatgcgttcgggtagtagtttttgaagtcgagttcgaggtgagagcgattttcgagcggcgtttagattttggttcgagagtatcgatttggagcgttttgtgtaggttagggttgtacgtttttttgtttgggagtagaaagggggagggtgggagagcgaagatcgagtttttcggttaaggagtatttataggggtttaacgggaggtttttttttttttcgggtcgtgggggggacggtttttcggttatttttgtatgcgggtcgcgtatcgcgttgttttcgcgtttcgcggatcgagatcggcggtgaggatgggttgttttttttattttgcgttaaattcgttttgtttgtcgtttttaggttaagtgggattgatcggggtttagagtggacgaatcgttagtatggggagagattagcgcgcggtggtcggttttgttttacggcggtaagcgattttttgtttggttttcgtgggttacgcgcgtatggatttttcggtgtaattttcggggattgataagtcgggttcgtacgtttacgttttttttttttttttttttatgtaggtggttgttgttggggatagtgatcgtggggtttttcgtttagagcgttttggcggtaagttttggttttcgcgtttggatttgcgcgttcgagagtggttgggacgtttgagtggttttggagaaggtagttcgttcgtgcgttttcgagtgtgtgtgtgcgtgtggatgttcg

SEQ ID NO: 6493 - DNA, 692 bp, Artificial Sequence
  Description of Artificial Sequence: Synthetic polynucleotide
tcggcgattcggttatttttcgagggttttaggcgttttatttaacggtcgtttttcgttttttgttcgttattttttcgtttttttacgaaggcgcgaacgttttagattttcgtcggttttcgatagtatttatttagttttttttttggagattttaggttgtattttgggatagaaaagaaggcgggtacgatcgcggtgtcgggttttattttagtcgtttttttttttgagggagttaggcgggagagaggggaattatcgaggtttcggttttttcgcgttttagagcggtcgggcgagttttattttcggtttgtgattcgttgatttgtttttgttttattagtcgggcggtgaattggattgattggtgatttttggtattaggtttttttatgggtatcggagtaggcggataggggtggggtttcgcgagcgatacggaagggttagtgtggcggagcggattttgtggaggcggggttattgtgtttttgagaagggttttcgggggtggagtttattaaggttgcgggggcgtggttacggagcggagttaataaaagcggggcgtgtacggtcgcgggttagtgtttatgaagggcgaggggtgtggttatagggcgggatttacgaaggatgtaggggcgaggtcgggtttttgtaggatgtgcggtcgcgggtcg

SEQ ID NO: 6494 - DNA, 1924 bp, Artificial Sequence
  Description of Artificial Sequence: Synthetic polynucleotide
tcgtcgtttgtttaatgttttcgttagttttgtcggtttttatcgtcgtttgattttattgtttttttcgtggtttttgttgtttttttaaattgtttaacgatcgttatttagtaaaaatgaatgaaacggggtcgtgtgatttaggtagtttggagatgagattttggaattataagttatattttaacgtataaatcgattttattcgttttggatattcgatgtacgcggaatgggcgttgtaaaatgcggttgtttcgtcggaggtatttgtttgggatttgttggtagtcgtcggttttttttgtttgcgattttcggtttagtcgtcgggattttggtgtatttgtttttgggcgttttttttattttttagtggtcgttagttttatttttagtttgtggtttcggattcgtcggtttgagcgttcgtagagggtcggtcgtcgttatagtttcgcgtttcggttttcgcgttttttggattttcgttttaggtcggcgtagtttagtttttcgggtaggttttacgttatcggggtttagtgcgcggcgacgaagcggagagttgtgtttagatttcggagagaaatttcggtttcgcggggcggcgcggggcggcgcggggttcggagttgtttaatttcgtcgtttcgggaaggcggtttcgggttcgtagggagtttcggggagggttttcggtttcgtcggtagcggcgtcgaggggtgtttgggtttttggggatcgcgagaggaaaaagaacggaaatcgtatcggggaggaaggacgcgtagaacgttttcgtgaagcggggtgtttcggttaggcgtgcgcgggagcgcggttcgggggagttcggcggcgtcgtcgcgcgtattcggtagaggtttcgcgggagaacgcgtagttcggggcgtggggcggggaattgttcgcgcgaggttttcggcgcgtttgggtttcggcgagagtaaagcgcgttttggtatcgggggcggcggcgtagaggtcgggaggaagaaattcgggttttggtttaggtcgggtttttatttttgcgattcgcgagaggtttaggcgggaaaggcggcgagtggcgttagcggtttcgaaagtaaatttggttcggtgttattgttcgagggtcgtcgggcgcgttttttaattttttcgagtttggaaaacggagattttcgtagcgttttttttagtgcgtgttgcgagtgttgaaggaggattcggtgtttggacgattcggagtaggggaagtattcggtcgacgttgtcgttgttatcggcgttattggcgggtaggatagtggggcgggtaaggggttttttcgcgtttttcggtttttcgcgttcggcgttagttttttggtttttttttttgcgtagttttaggtttagtttttagttattttttaagaagacgatttcgagggtcgaaggtcgtttttgatttttgattacggatttttcgtgtaattcggaagagtcgtgattttaaaattcggtttcggggttatagaagttcgagatttgggaggcgttcgggattttttttttagaatcgtagggattcggtttgggatttagggtgtggtttttcgttttgcgcggtcgggaaggcggtcgggttcggttatcgcgttaagtattgcgtatttttgggacgcgtcgttgcggggggttggggggttggggcgtttttacgacgtttggtttgttcggttagtgtttggtgtcgttggtgggttcgtggttgcgacgggtaaacgttcgtttcgcgagtcgggtaaggtaatttttgcgggtcgcgttcgaaggtcggatttttttaagtcgtttgggagtttttaaataggtggattcgaagtttttgtttgatcggagaataacgtttaatttatttcgtcg

SEQ ID NO: 6495 - DNA, 1991 bp, Artificial Sequence
  Description of Artificial Sequence: Synthetic polynucleotide
tcggtgtatcgtgttttggtaatcgggttttggcgttttcgagagcggggcgaggggtgttacgcgatttttaggtcgttttgtatttttcggtgcgtttgtagggattttgtagtaaagttttggatgtttgtagtcggtgtaagtttgtaagtagttggagagcggtggttggagtcggggggcggtgggcgtggttacgtttttttttaggtagtttcgggaatgttttgaaaagtattcgaaagttttgagtcgcgcgcgcgttaaaagaaaaggtataattttttattatttcgggcgtggcgtgtttagatttcgttattttagttgcgttttcggttgtagcgtatacgttttttgcgttttttttttcggagcgtcgttgttcgtcgggtttatttttcgtagtagtttttaggcgagagagggggttagagtgttcgtattttttttaggggtattatgtttaacgacgaggtatttagtaagttttttatatcgtcggaagttttttacgttttcggggtatcgtcgtagggtagagtcgggggttttggtaaagcgtttggggcgttagtgggggcggttagcggttcgagcgtcgggggtagtagtagaggaggcggtttcggtttcggggcgtcggatttgggtgtcgggagtaagaagttttcgcggttgtttaagtgcgtacgttgtaggaattacggttacgtttcgtcgtttaagggttataagcgtttttgtatgtggcgcgattgttagtgtaagaagtgtaatttgatcgtcgagaggtagcgcgtgatggtcgcgtaggtgggtgcgggcgtgcgggagttcgggtttagttttagtttttttttttttttttttttttagatggagtttcgttcggttgtttaggttgtagtgtagtggcgcgattttggtttattgtaattttcgtttttcgggtttaagtaatttttttgttttagttttttaagtagttgggattataggcgtatattattatgttcggttaatttttgtatttttagtagagacgggggttttattatattggttaggtcggtttcgagtttttgattttaggtgatttattcgtttcggttttttaaagtgttgggattataggcgtgggttatcgttttcggtggggttcgagttttttgaatgaagtttttttagtatggtcgttgttatgcgggttttgggttgtggagagatgcggcggtatttgtcgatagcggcggcgtttggggttttgggttttcggttacgttatatcgtcggtttgggagcgtcggagacgcgtttgatttcgttcgtcgggtagagttgcgggtttcgttcggttcggggttttttacgattttttattttgtgtttcggcggagttgcgggggttttttttgttttcgggtttttgagatttttgatttcgtttttagggtagggaatttcggggttcgtttttttgggttttttcgcgattttagagttcgcgttttaatagaattgggagggtttattgcgttagaggagtttttaggattttcgttttcgtttttcgaggtgaggttagaggggagggttcgattttaagggaattttagggatttttagtttcgtttttttagtagagaattaaggaatttttttcgttttggggttttaaaaattttcgatcgcgttttgggagtagagggtttcggggttcgattttttcgagcgtttttagaatttttgattttttttttttgttgagttgtatttaaattagaaaggattttggagggcggtagcgttggttgttaggttagcgggaaagggaggttcggtcggttgttgtttacgcgggtaatttgtcggaaagttttgtttgtttttttggaaaagtcgttgtaatggatatagcgttgcgcggtttttttgcgcgtttggggcgttttttgttttcgtttttcgtggatggaggttgagcg

SEQ ID NO: 6496 - DNA, 1667 bp, Artificial Sequence
  Description of Artificial Sequence: Synthetic polynucleotide
tcggggtgtaatcgtaatattttcgtaggttcgagttttttcggagttgagtttttgcggttaaatgtcgggataaaagcggttttgggttcggaaaaacgcggttagatttggattggagggaggagaagagagagaagcggagcggttattttattcgtttataggtatttttatttttattttcgttggtttttttttttttcgtttcgcgagtatcgtcgcgttttggagcgtcgtagtttttagtcgcgggttggggtagcggagagggtttggaggagggggtcgcgagcgttttcgcgagagtggtttggttgtaggtggtaaggaaggtgaagtgtaggtattcgaggggcgtaaaggaggaggaaggcgtggggcggggagtgtaaggagatagggattttaggggcgggggtggcggtgggaaggaggaggggttgggggagggcggcggaggtgttgggttcggtcggtttacgagggagttgtagaagagttggtttagattttaattagagttgtcgtcggttttttgtagtcgtcgtagcgttttcgcgaaggaggacgtgtcgattcggttgcgcgtttaaggtagaggttcgcgtcggcgttggttgggcgtgagttgggaggtcgagttgtgagcgcgaagggagttggagagacgattgcggtattttcggtcgtttcggagtatatacgattatcggggttgcgggattaagggtcgcgtcgttcggaggtcgtttttgagcgggtttcgtagtttcgtcgtttagcgttttttggttttttttcgtagttaggttgttaatttattcgggagttcggggtatgaacggttacggttttttttatttgtatatgggcggttcggtgtcgtagtcgttacgggcgtttttgtagcgtacgtttaagtgcgcgcgttgtcgtaattatggcgttttgttttggtttaagggttataagcgttattgtcgttttaaggattgtatttgcgagaagtgtatttttattatcgagcggtagcgggttatggttgcgtaggtggcgttgcgtcggtagtaggttaacgagagtttggagagttttattttcgattcgttgcgcgttttgttagggttttcgtcgtcgggggacgtcgtcgtcgtttcgtagtcgtcgttagttttttagtcgtcgtagtcgtagtcgtcgcgttttgttgtcgagttggtcgcggtcgtcgtgttgcgttggattgtcgagtcgtagttcggggttttgtaggcgtagttcgttaagttaggtaagagcgtttgaggtgcgggagtttggtcgggcgcgggggtaatttcggagtgttagttgtagttttatttgggaggattggaggtaaagttttgggacgtgggtttgtcggggtttttttttttatttttcgttaggtcggggttttttttttcgggagaagtcggttgagtttggatttagcgcgagtggtattcgcgttcgtagggaaggcgttttcgggtagttaaacgacgggattgtgcgttagtatcgttaggtgtttttttaggttgaagggttcggaacgtgttagattgagtagggagataacggagttgagataggataaaattaaaatttacgtgcgtatatttattacggtggggtcg

SEQ ID NO: 6497 - DNA, 433 bp, Artificial Sequence
  Description of Artificial Sequence: Synthetic polynucleotide
tcgcgagataaatggtgattttttttttgtaggtatcgttatatttcgggtttagattttggataggcgagtcggttgtatcgaaggttcggtaggcggattttggcggagcgttttagagagaagagtgtagatcgcgggaggcggagggttttttgttagcgtgtttcggttaattagtatttatatcgtttgataatcggttaattagaggacgtaaagtttcggggtttgagcggatagtattaggaaggggagcgtagtttgtagattgaagttagtggcgttgcgttgaatgtaattgcgcgcgttcgtcgggtgagttagcgatttgagttaggcgggggcggttcgatttttttcgtttagtttgggttagaggaagtcgaaagcggttttagtaaggtgaggcgttcgaggttgtagaagatcg

SEQ ID NO: 6498 - DNA, 896 bp, Artificial Sequence
  Description of Artificial Sequence: Synthetic polynucleotide
acgaggattaaaggtacgaatttgtttttacgttacggttcgggatttagggtgcggggattacgcggagcgtagtagagtttagggtaggagtcgggaggtcgcgtaggtagagttcgggtagggcggaggggaggtcgcggagggtcgggtggaggtttttatcgttagttttaaggtttgtagtatttttttttggtttttgtttttagggtcgatgtgttttcgagcgaagtcgtcgtgtttgggtagaaggcgttttaggaggcgcgaggttttagtcgcggcgttgttttcgtcgttattgttgttgtttcggtttcgcggcgtttagtacggtttcgattttttagttaggcggcggtcgttttcgatttcgcggtttaggcgtagtttttacgttttggtataggattgtatggtcgcggttatcgttttttgtttcggttcgtaagggttagtcgcgtttttggttttttttttggtttcggtttttcgggtggcggttgcgttcggtttggagtttttttcgttggatagtcggtcggatagatggatggacgttcgcgggtaatgaatgggcgttgcgtttaattaagatattcgcgtaaagttgtggttttatttaaggtatttgtttcgtatattttaagcggcgttttggaggcgggaggtgggttggggttaggaagtttttggttaatgaaagtagatagagggggagggggcggaatagttttcgttttcgttttttttttttattttttttttagttttttcgtggagtttcgttttttttggatcggaggttgttatttttagttttatttatttcgacgttggttggtgtcgggggtcgggacgtttcgtacgtcgttcgttagggtgtggagtcg

SEQ ID NO: 6499 - DNA, 1494 bp, Artificial Sequence
  Description of Artificial Sequence: Synthetic polynucleotide
tcggggtttttttaagcggagtattttaaaagtcgtatcgcgtagtagaggtttttaggggtttttattcgtttttagtgattacggagcggtttttatttttcgtcggcgtttggttattttttttttttcgtagttttcgtttgatttttatgtgattgtaggtaagaatagtttagtttttgtgtttttgtaaagaacgtaaataaaaatgtatattattattatttaataaacgcgtaatttcgtaagatataaagcgttttttaaatatcgtttttttggtaatattcggtattttggggttgttaaatcgtagataaagacgtttattagcgcggggggtgaggagattaagggagagataagattaacgtgtttttattaacgggagcggcggttaaaagggcgtcggtgttaggggtgagggacggggtatcggtattaattagcggttcgtttcggggttttcgcggttaaggcgagaacgtaggattaggagtattgttgtttattttttatcgtaattcgtatatttcgggattacgtaacggcggatggggcgttcgggagcggtttttgtaggggagagtaataggttttcgcgttttggaggtttggtttgcgtttcgggtttttaggttaatattttatttttagtttttcgatattaagattgtgtttttttgggttaaggaaaaggaaaaatttttaaattttttagttagcgagagtaaaagaaaggggtggcgggggtgttgaaaggtttaggattatttatcgcggggttggggggagtggagatttgcgagtagtaaaggaaatttttagattttatttttttaaaaaagttatagtagcggttttcgcgaagcgtcgggtcgcgcggggtggggtaagcgtatcgttttatcgttttacggttcgtcgttatttttatttttatttttatttttatttttattttcgtttttatttttatttttaagcgtcgagtttagggcgttcgcgtatttttttcgtcggcgcgcgcgtagggcgcgggggcgcgtttcggtttttgggtcggggtttaagcgtcgtttattcggttcgcggcgttcgtttagggtcgcgacgcgagggggcggaggattggggagtaggggtcgtcggggtttttggatgtttcgtttcgtttacgtttattgtttttttttttgaagtaacgattcggcgaggagtttcggattaaaacgtatagatatttacgcgtgattgagaaatttaatttcgcggtggttcgacgttagtttagcgtttcgtcgcgtttttttttttagcgcgcgtcgtatttgcgtcgatcggggttgtcgcggaggcggtggcggggtttaggttgttggggttgtcgtgacgtttgcgatcggcggggcggcgggcgcgttttggttaattaggggacgcggtcgagtaggtttgtgcggggttttaaattcgtttttgggtcgttcg

SEQ ID NO: 6500 - DNA, 828 bp, Artificial Sequence
  Description of Artificial Sequence: Synthetic polynucleotide
tcgcgattttatcggggaaatatcgcggatagtcgggttagtagcgttcggagtttattttaggtttttaaatttgtagtattttttagagcgcgcgcgttcggagcgggatttgtttgttttagtgtacgtcgcggagcgaattatcgggttggcgggggtggaggggtgtaggcgtgggggttgcgggtcgttcgggttttgggttttttttgtcgtcgtcgtcgtttttcgttttcggttaggagtcgcgcgtgacgcggttcgtcgtaggagtttcgaaggcgcggcgtcggcgagttttttttcggtaggcgcgtgggtggtagcggttaatttgatagtttttcgggtcgggcggttagcgcggaggcgttacgttcgggtcgggggcgggttgacgtcgtcgtcgtcgcgggaggagggataaaggggtgggttttcgcgggtcggtatttcggcggttgggttgcgggttagagtattgttcggtggtgtttaggaggagtaggagtaggagtagaagtagaagcggggttcggagttgcgcgtttacgcgggatttgtgttcgaaatgtcggtgcgaggagatcgcgggtttttatttcggcgggagttgttaggttggtttcgcgtaagtgtttttttgtgtcgcgcggttgggaggagggtcgtgagcgtgagcgtgggagcgttgggggttttgttcgcgtgttgttttgaagttgtttttcgatgcgtcgtaggaagttgggatttttttattcggacgtgggacgtaggggaggggtaggttttatcgttcgggttgatgattcgtggttttcg

SEQ ID NO: 6501 - DNA, 2705 bp, Artificial Sequence
  Description of Artificial Sequence: Synthetic polynucleotide
tcgtgtttggtggttcgggtggggcgtagttgcgggaaatgtattcggagttgtgttttttttcggcgaatagtttgcgttattcgtcgtatcgggaggtggttgggggttgtcgagcgagtggtgaacgcgatgggtggagagcgttcgaaacgaggtggaaaagggggcgggggcgaggtacggcgtttttttgttttttttttagttatagacgcggcggcggcggttgagttttttagtttcggttatgtgatagtttcgaagcgttagttgcgggggtttcggcgtttcggggattattataaaacgtagttaggagagcgcgtcgttgttattgtcgtcgttttttttttttaagataagttcgggagaaaggcggtagttgcggcgcggacggttgagttttttcggttagtatttatttagtattcgtagacgttttttttagttcgtcgttcgtttttagagttttgcgttttatattttttagtagaatttgcgggcgttgtcgttttagaaattattaaagttttttttttttagcgatagtttagggttgcgcgttttttttaatttcggcgacgttgcgagtttcggagaaaagagaggcgttttagaagttaattttttttttttttattttgattttttattttaggaaaaggagaattttagcgcggtttggttaagtgtttggttaggggtttgcgtttagggtattggaagttttgttgttattggtttttaggatagtaggcgtaaatttagatttaaagggttagagtttttattgtttagattttttttttagttattttggtttgggtttttttcggatttagaaaaagtaaagaggtcgggaggaaatacggttttttgttatttttttttgtagttagttttagtatttagtttttggttattcgggggaagacgtagagaaggcggcggtaaatttggtgtatttcgttcgcgattgtgcgcgttagtcggtaatcgtcggggttagaagttgttagttttcgagagttgagtaggttcgaaaggttaaggtcggagatattaggtaattcggagaaggtaggagagagaagtagagagggtttggagggcgagagggtaaagtggcgggattggaggggtcgagtgggaattagtgggggtagttaggttttaggaacggagtgcggagagattttgtggtttagtgcgggtcggagggcggtggaggagtcgggggcgatgtcgcggtcggggaagagttcgtatagcgattaaaaatcgttttatttttatatttcgttgatcgttatggtaatttagtattcggtcgagaagatgttgtcgttgagcgatatttataagtttattatggagcgttttttttattatcgcgagtatatatagcgttggtagaatagtttgcgttataattttttttttaacgattgttttattaagatttcgcggaggttcgattagtttggtaagggtagtttttgggcgttgtatttcgattgcggggatatgttcgagaacggtagttttttgcggcgtcgtaagcgttttaaggtgttgcgcgtcgattatatttatttgtacgcgggaagtattaagagcgcgtcgggcgtcggttcgggagggtatttttatttttattattattattatttttattattattattattattacgttgtcgtatattattattattattattatttattttagtcgtcgtcgtcgtcgttttcgtcgtcgtcgtatatggtatattatttttattagtaatcgtttattgtttcgtagtcgttttcgtatttttcgttatagttttcgtagtaatcgttttagtagtcgtagttttagtagtcgttttatttcggtaagatgtaggaggcggcggtcgtggcggcggcggcggcggcggtcgcggtagtcgcggtgggtagcgtgggacgtttgttttagtttttattttacgggttgggttcggtcgtcgtcgttgtcgtcgcggtcgtggcgtttacgttaggttttaagtatttttttgttattgagaatattattggtcgggattataagggcgtgttgtaggttggagggttgtttttggcgttcgttatgtattatttgggttatttcgtgttcggttagtttggtaacgtcgttagtttcgtgtggtcgtacgttggcgttatggattcggtggtcgtcgtcgcggtcgtcgtagtcgtagtcggagtttttgtaggttcggagtatggggttttcggggtttcggttaagtttttgtgttattcggtaagttagagtttgtttgttatgtcggtgtttattaagtttacgtttgcgttgtcgttcgtgttcgcgttgtagtcggggtttattgttttcgcggtttcgtagtagttttcggcgttatttatcgtgtgtttcgcggtcgcggtttcgttcgttgtttttttgttggagtttatagtttttatttcggtcgaaagtaagggcggttttttgtattcggtgttagtgtatttttaggggattcggcgggcgtggggagattagcggggtgagagacgtcgggttcggaatcgtttaaattattcgacggggagagggcgttttggttaggtcgggtagagttggcgagttttagtttttgttggaacggaaggtatttaaatagacgaataatttcg

SEQ ID NO: 6502 - DNA, 704 bp, Artificial Sequence
  Description of Artificial Sequence: Synthetic polynucleotide
gcggaatgtgggcggggcgtagttggggagtttgcggggaatgtgggcggggcgtagtggtgggagggcgtaggagtgtgggcggggcgtagttgggggagggtgtagagatttgagggtttgaggttgtttggttggtttcgtttttagaggcgggtgtcgcgttgtcgtttaggtatttggggtttttggtgtttgagtgttttattgtcggcgcgaatataattgttttagttataggcgaggtttggttaaggtgtgggcgtatttggggtaggttttgagaggtttagcgttcggtggtgcggatagaggcggggtatcgcggcgttcgtcgtcgttttttcgtaggtgattatttttttgtaggtgttttcgggttttaggtggttgcgtgtttgcgttatggttgatattttgggcgagcggtatttggtgatttgtaagggcgcgacggtggaggtcgaggcggcgttgtagaataaggtggtggtattgtatttcgcggcggttcggtgcgcgtcgagtcgcgattttacgtcgttgttttgcgatttttatacggcgttggtggtcgaggcgcggcggttcgcgtttttcgaagtggttttcgtgttagtcgacggtagtttttaggagatgttggattttatgcgcgagttgtatggcgtttggttggcgttgtttttttacgatttttatcg

SEQ ID NO: 6503 - DNA, 950 bp, Artificial Sequence
  Description of Artificial Sequence: Synthetic polynucleotide
tcgggacggagcgggttattcgagtggtaaatttttttttaatggatgcgggaaaagcgtatttgtagttttttttttatcgttgttaagcgagttgattgttaaggagtgcgtatttgtttgtttttaacgtgatagtcgcgggagcgtttcgtatttcgggttttagggaatgaaggagtttgtttcgaattggttttagaatttttagtttttagggcggttcgcgttcgtatttattttgattacgtaggtgatttcgggttttagtatttggtcgttggcgtgcggcgtttttcgagggggtttgggtagcggttcgtcgtcgggtcggttttttttggcggcgtttatggtcggggcgcggggcgtcgagggcgtattgtcgttcggggcggttaggttgggcgcgttgtagttgttcgagagtcgcgcgttcgttcgttttcgggcggtcgacgataggtcgcggaggttcgagttggagagttttaggtgggatattttgtggagtaggtggtttaggttgtcgggtttatcgtcgggcgttttgcgtagcgtttcgtcggatattaagtagggagtcgtcgtcggggtcgcgcgcgtcgtcgaaattttgttttcgtcgtcgtttatcgataggttgtggagaaggttatcgatcgatgttatcgagttatttttgaagcggttatatttggtgcgtggaagtatgttttttcgtgggttcgttgtattcgttcgggcgttgttggtgtcggtttcggcgcgggttgtcgcgtatagtaggcgagttattgttttcggagcgggacggagagtgggggtttcgggatagttttttggagaacgagagtagagtaagaggatggtgtttttttatcgttaaaagttagtatagcggcggtcgcgtagtttcggttcgggagatcgttgtttggggttgtacg

SEQ ID NO: 6504 - DNA, 4861 bp, Artificial Sequence
  Description of Artificial Sequence: Synthetic polynucleotide
gcgtcgtcgttttgagtattttgcggaaaatgtgagaattttggggagttattgttgttgtaaggattcgcgggcgggttatcgcgttggtgggggggttttgtttaaattttgcgttttcgattttttattcgttttataaagggttggtgaagattattttaaggatcgtacgaattggttttttaagttttaggaaatcgaaataataatcgaggcggttttttgttcgggttattttcggagcgagttttgcggcggatttttggttttcgtttttttgggtattcgcggtgcggttagatcgtttttgttagcgattttttggttggtaagggagaggaggtggagtttagattggttttttacgtttagagtggaagcgatttttaggattttgtagttatcgagtcgttcgtcgtgtttagttcgggtttgatggtgaagagtatagttgttttcgatagagtcggaggaaaggaagtttaagaagtaattgttcgcgtttcgtttattttgtcgagtttatttttatttttatttttattttttgcggatttagaagttgttttatcgagttcgattgtgttataaaatattttattggaaaaaaagttatcgttttcgtaagagggggtaggggttttagcgatatcggggattcggtttttaggtcgagtcgacgggttgtttcggggtaattttaggtcgttgtggtttgagtttaatcgttgggttttcgacgtttagaagcgggtgtgtgtttggaggtttttcggtcgggagggtaggttttagacggggtgggggtgtaggcgaggagcggggcgtgaatacgcgtggagcgttttgcgttacggagtttagggtagagattgtagttttcgtcgggttggatgcgagttttttaggttagagtttagaagcgcgttgggatttgggtttggtttttgggtttgtgttttttttcgtttggttttaattgttcgtatttaagattataataaaaaggtttaggaagtaaattttttggacgcggaagggtcggttcgcgggttttcgtcgagtgagggggttgcgggtggcgcgggtattttaggtttcgtatcgtatatcgtttttagttttcgcggtttttgtcgttgggttcgttcggtattttcgtcggtttttttgtatttttggcgcgtttttgtttagtaagttgttcgttcgttggaattgagttttttttgggtcgttttttgggtttggtgggagattttaggtcgtcgttttgtagtatttgtacgggggatcgttagtatttgggtgagttagtacgtggattggggattttcgaggagatttgaatttaggtaggattaaggagtgtagggtttatatgaggaaatggtggggaaatgtttcgggaaatggcggttatttgtttaaatgtcgtttggggagcggttcggtttggggagtataagattgttaggaggtttgaaggtgtcgcgggaaaggacgaaatgttggtttatttaaggggtagaaaaaattgagaggatttcggtgcgtattaggtatcgagggaatcggggggttgggtagagttttagtggggagaaagaggagagtagttttgtatgtatcggggtatggtttaggaagttgaggggtgggaagttattaggtatatttattatttttttttattttatttttcgattttggtattacgtttttatttgtaattggtttaggtttagggatttagtaagatttattttggaaagagtagggcgtatttttagtaaggtaagtgattatatttttatagttcgttggttttagttttgtatcgttttatttgttcggcgtggaaaggtatttttgtttttcgaagcgtttttttaggtttattagttgtagttcggtgaatatagtgcggtttcgacgtttttttttggttttggtgtttggttttttagggtttgtcgtttttagtttttcgcggagttgtaattcgagcggtaggtgtggcgtattcgcggcgtcgggtagttcgggttttgtcgttagtaacgtagagtttagttttgaatagtttagcggcgttagtgggaatttgaatatcgtcgtttgttcggtttttagtacggttgcgaagaaagagaatgaggattcgggtgagttacggtcgcgtttttttgttttagggattgtcgtattacgtgtcgcgggggtgttcgcgtttggttagtgttttttagcgtaaaatttttacgttttgtcggtcggcgtcggtggcgtagatggagattttttttaacgttgtcgttttttagatttgggagggagtattttttcgattttgttcgtgttttgttttggagttttttaggttttagttgtttttgagatttcggggtttttgatgaatatgtttgtagttgcgagaaattcggagtgtgttttgtttttcggggaaagtagaaattaaaaagaaaacggtagttggttttaagaagatggcgtttgttttaattaaattagttttgttgcgttagaaaaagaatatgtacggagcgtgtatatttgttttttcgtgcgtggtataatagttatgcggtggttaggagttatttgggtcggagttgggtgtttttcggaaattttaaagtattttgagaatttggaaattattgtttacgttttttatttttagacgtttttttatgtagatgtttttattttttttagttttaaaatgattgtgtgttcgttttaaacgaattagtagtaatagagtagatggagacgaaaggtagtcgaatggtcgagttttagttggatttagaaggagcgcgttggttttgtcgtttttaggttagggagtatcgattaggaggtgggggggtgtagggaaggcgatttgaagggttggggtttcggttatagcgtaggagtttttttttttcgataggtttgttattgaggtgcgagttttagtttggttggagtcggaaagggtagggtaaggcgtaggtaaatgtggggtagaggattcgtagggaaaaggtgggagatgggaggtaggtcgattttaatgagagaagcgagggaggtcgatcggtagacggttggaaagcgagatagggaaagataagacgagggtggagtgcgatggagatagtattattagggtagagtaggtttcgttaaattagaagaaagggtagaagttgaaaaggtttgcgtaggtcgtttaagttttgtagaggtttagtcgatttgaaattagaagggatagttaggtagttgtttatagttaggtttttggttttaaggtaaggtcgaagtaggttcgtattgcggttaaggtcgcgtttttcgttcgttggagttttcggggatttcgggtcggtttgggttcgcgttagtatttagttttcgggagcgtaggttttttttttagaggttcgatttttttgggttgggtagtcgcggttattttcggttatttttttgcggcgaagtttaggcgttcgtggtttgaggtcgtttttatttacgagagttcgtagtttggtagtgcgtttgtattggggatgtttattcggggttttcgggttggaggtcgaagggaagtagtgaaggaaagagcgaatatttttttcgggcggttcgcgggtacgaggtttggtttttgtgaggtttggagtttgtatttttcgtttttcgtttggagggtttcgagagacggttttagaatttgcgtttttagagtagtttttcggggttgtttcgatgtcggaggaggttcggggcgttttcgcggtttagttcgttgtttttcgttaagttcggttcgcgatttcgcggtcgttatacgtatttaggtggttgtggaagggtcgcgtcgttagtagcgtttgtacgtcgaattttagtagttcgttcgtcgcggtagcggcggttgcgggcgcggcgtttttgggttcgggtggtttcgtgaggatttttttaattatgaagttgcgatagcggtgcggtcggtggttcgcgtagttttcgggcgggtcgaagcgcgcggcgttcggttttttcggtcgttgtatcgcggcgtttattgttgcgttcgcggtttggcggcggcggcggcgacggtttggtttcggcgcggggttcgcgcggggttttaggtcggttcgtagttcggggcggcgcgcgggcgtcggtttatgttttttttttcgtcggtcggtcgggcggaggcgtagggcgcgggcggggcgcgcggggttcggtcggtcgaattcgggattgcgttttttttttacgtcgtcgcgttttttgttcggttagtttcgcgttatcgtttcgtttcgtttcgtttcgcgtcgttgtttttaatttttaggttgagtcggagggagggatttagaagggagggaggcggaagggaggttaaaaaggagggggttacgtgaaagaggtcggtcgatcgagatcgagggagattgagcggagcgtacgttttggaaggagagagtcggagagttcgggaggtaagatttttagagacgagagtcggagggattaaacgatataggtgagagaaggggtagaggtagacggcgtgggttaaataagattttagatagtgatgtgagggtattagagacgttatcgagatgtgcgtagagagattaaaagaggcgtgagagttagcgggttgtgacgtgacggagggtatagaggtaggcggggtagaggaagggggcggtaaagaaatgggaatagttagaaaatcggcggtttgatcggtttttaggtagtttcggaaaggtcgggaggaggaggggtaaaggtcgcg

SEQ ID NO: 6505 - DNA, 999 bp, Artificial Sequence
  Description of Artificial Sequence: Synthetic polynucleotide
gcgtaacggtttgtttgcgttttttgcggttatagtcgatatacgttcgtagacgtacgtacggatatttcgttttttattagcgtacgaagacgggacgcgcgtttatagttttagggttcggttttgtattacgagttaacgcgcggtttttagggaggtggcgtagaaggtatggcgtttttgtttacggcgtttcggttttggtagtttttatagagattttcgttgatggtttaggtttaaaaggttttttttttcgagtttgcgtttttttagttttttcgttgggttagggtttattattttttttcgtcggcgagcgtgggtttttttggaggcgggggtggttttgtagaggtagttttaggtgcgcgttggagaggtcggttcgtcgcgcgggagatattttttttaaagtggaagcgttgcgtgggtagtagcgcgggtcgggttttcggattttagtttttgttgttttcgagattttcgtttcgcgtcgtatttttcgagtttagcgttttcgggttgcgttgggcgtagtggttttcggttagggcgtagtcggtttgggcgttagagttttttttagttttcggtttagggcggggaagcgttagttttcgtagtttttgtgaaaggttttttgtgttttttgtttaggtgcgcgttgtggtatttttggttagaagtatttttggcggtttgttgggtttttcgtagtttttggttgagattttgtcgtcggcgttaacgggttgcgttcgcgttttcgttttgttttcgttcgggtttcgggtttcgcgtgtatattattttttggttttttttattaaaattttttgatttttagttcgatgttgtcgtcgcggttttcggaattgttgtttttagacggcgagtcggggttgggagcggtttttacggggacggatttttttcggaggcggaggtggtttttttgacgcgaaaggtaggggcgcgtttcggtttttagcg

SEQ ID NO: 6506 - DNA, 1750 bp, Artificial Sequence
  Description of Artificial Sequence: Synthetic polynucleotide
tcgcggttttagggttcggcgatttttaaggttttcgttttaggcgttgcgggtaaatagggtttgggggtttttttttatcgcgggttgagttttcgttatttgttttttttgtcgcgggtatttaagtttcggaatttgcgagttaggtagcgttttattttcgcggcgtcgtttttgatggttattttgtggatttttcgtagtttttagttttcgatgtggtattttcgattcgcgtatttttggtttatggagtttaggagcgtttggtttaggcgtttttcgaaattgaagagtttttttatggtggcgattttttagacgttaattattcgttattgagtcgtcgcggtttttcgtggtttttttatttcgattaagttttaaattcgcgatttttttttttatttcgttatttatttttaaatttaagatttattattaaattagtaatttatttttaaatttaagatttatttttaatttcgcgatgtagtttagaattcgcgatttagttcggtttattatagtttttagtagcgatattcgtagttttcgattttttagatcgagtgagtttaattaagtcgttattcgcgtgttagtagttgggcgtttcgattttttagatcgcgtgagtttagtaaagcggttaggcgcgcgtttgtagttcggcgttagttcggatttcgggagtcgttttcgagttcgcgtggacggtagagggcggttgtagttcgggcgtaggcgtcgttggtttgcgggtttttttgggttcgcgtaggatatttcggaatcgtaggcgcgtattttttttcgtttgagggttcgtttggtcgtgattttcgttttttttttttttcgaagagagatggggtcgttggtaggggtttttcgtagttatcggggatggggttgagggtcggtttttgtttcggtgtagtcgtcgcgggtagatcgtttggtttggtcgtagttatagcgatatttagtttcggttttgcgaggttgggcgcgttagttagtttgggagttgtttggcgtttgtagttgggcgtttaggtggtggagtatggtttgggcggtttttggatcgcgagtgtttttggtttgagagttcgttagattttgtttttattcggttttttttttgttagagttcgagatttttagttaggggttttttgtaattatcggggatggggttgagggtcggttttcgtttttgtgtagttgttgtaggatagatcgtttggtttggtcgtagttatagggatatttggttttggttttgagatgtggggagtgcgggcgggttcgagagttgtttggaggttgttgtttgtatatagaaggcggttgtagtttgggtgtttaggcgggttggaggtgtatggtttggtcggtttcgggatcgttagcgcgtttagtttgagggtttttaggtcgtgtttttcgtttatttttttatttgagggggattggggtcgttggtatgggtattcggtagttatttcgtgtggggttgagcggcgggttttcggttttgtttttgtgtagtcgtcgttgggtagaatgtttggtttggttgtagttattgggatatttggttttggttttgcgatgttgggagcgcgagcgggttcggaggttgttaggtagttgttgtttgtatatagagggcgattgtagtttgggcgtttaggcggcggagtatggtttgggtggtttttggaatgcgtgcgcg

SEQ ID NO: 6507 - DNA, 391 bp, Artificial Sequence
  Description of Artificial Sequence: Synthetic polynucleotide
gcgtaggtcgtagaattttttcgcgaaggtgtcgtaggaggagtcgtggcgcggtatcgtttcgtcggcgttcgtgttttttcgcgcgcgttttcggggttttcggtttttcgggttcgtatcgtcgttcgcggggttggttgcgtaggcggcgggtttcgttagtagtagtaggagtagcgacgtttagattttcgggtgttgtcggggcggtcgcgttattcgtgcgtatagatttcgtagttaggtcgttcgggtcgtagcgggggcgtcgcgggcgcgggtcgggattgagttttcgtcgaggttattagtacgcgttcgcgtagtcgcggagtttttcgtattttcgtttttttgtttcggtttgcgtattttcgttttagtatcg

SEQ ID NO: 6508 - DNA, 817 bp, Artificial Sequence
  Description of Artificial Sequence: Synthetic polynucleotide
tcgggatagagacgggtaggtagcggtgggtcgaagggttcggggattagggttcgggtcgggaggggcgggcgttttatcgcggtttgttggaaggcgtttttggtgtaggtgtcgttatttcggtaggagatggtagggattttttggaggagtagcgcgtatttgtgttggcgcgcgcggcgggtggagatgtaatcgacgcgcggtattacgtagtttttggacgagaaggttacgatggttacgcgcgtggtcgtgggtattacggggaagtcggatagtagtttgcggacgaatatgagttcgttgcggaagttgatttcgtttacgttggacgaattatttattaggaagataagttttaggcgttcgttgagttttcgtagtagtcgtacgcgtcgtcggaacgtttggtttagtcgttttattttgtttttcgtcgtttcgtcgttaggagcgggcggcgcggggatattttcgggggtttcgggcgcggtttcggggaagaggcggaagttgaaattgcgcgacggggatatttgttgaaaggtcgtttagttcgaaacgagcgttagattttagtaataaaaggttaggcgaggttatatcgcgttggagatagagcggttgtttcggagcgtaggcggcggttcgggcgggaagaggcgttgggcggtcggattcgtagaggggcgtgcgcggagttgggcgcggggtagcggttaagagttttagcgtttttttatttgatattggggatagatataatttagattttttagtagttcgggaatttcggagggaacggcgcgcg

SEQ ID NO: 6509 - DNA, 814 bp, Artificial Sequence
  Description of Artificial Sequence: Synthetic polynucleotide
gcgaagaaagtcgaggcgtcgaggtttttaaagttggtagtttcgggtggcggtgtaggggcgaagggggggcggggggaatcgtcggatatgcggttttggagttgggtgttgtatttggggttgttgagcgtcgcgttgggttgcgggttggtcgagcgttttcgtcgggttcggagagattcgcgggtcggtcgattttcgcgtttcgtcgtcggttcggttatttgcgttattcgggcggttcgcggtcgtcgcgtttcgtcgtcgtcgtcgtcgtcgtcgggcggtgtttgggaagtcgtgcgcgtttttcggcggcggtagtagcgggaggcgaggggcgttatcgaggagtcgagttcgtcgagtcgggcgttttattttagcgggcgaggcgagtagttgcgttttcgggtcgatttcgagttgtttcgggacgcgtttacgttgtaagtgtggttgcgagcggaggggggttagaggttttcggtagtgattataggtaggtgagggcgtttcggcgggcgttgtatcgtttttgcggttttagaggttcgcgggtgtttgggcgcgggtggcgggcgggtcgggggtttgcgggcgtgtttgtgcgagagttgtttcgcgagcggcgtagagatattcgggcgagttgagagttttattttgttttatcggtggaatgggtatattcggaaggcgtagttgttttatttttgggaggaatttggggagtttttttggcggtttcgcggattttcggttagtgagggttggttttcggagtttagggtacgtaattcgtgtttcg

SEQ ID NO: 6510 - DNA, 1429 bp, Artificial Sequence
  Description of Artificial Sequence: Synthetic polynucleotide
gcgcgtataatgaagtagttgtttgtagcgttaattagttggcgattttgaggttattgcgtggttttgttttggtcgtttttaataacgggatagagcgtcgggtatcgcgtattgattaattatttttttttcgcggtcgttcggtttttttttttttttttcgtcgggtttggttttatttttttcgggcggtttgcgtttttttttttcgcggtttcggtttcgtggcgtcggtagtttcgggagtttcgggaagtttgcgcgcggtagtttcgtagtcggtagtcgggagtttcgtagttttcggggagcgtcggggttggtggtttttttgttggaggaggcgtggagggagcgtttttgttttgagttagttacggtggtcggttggaggttgttattttattatgcgtcgggtttgtttgtttgcgaggaagtagatggtggggaggtaggtagcggcgagagtggttagatttgaatttcgtttatttgttattttttataaaaggtaggttcgggggatttaggtattcgttgttattttttgggggagggggaggtcgaggggtcgtcgttttcggcgtttgcgaaggtttcgtatttgtcggtgttcgttttttttattttttgttttttttttggttgtagtttttcgtatcgcgtaaatgttatttacgtgttaggatgtgtgtttatagtttgtttttttgtttgtttagtttcggcggatagggtttagcggttgcgcgacgtttttcgtcgttgggggagattagtaaagttattcgtttttggatttcggggtttgggtttttagatttcgtttcgcggcgggagatgcgtttgagttttttatagacggagcgcgttttagtttgacgtagagggatgaatagataagcgtatcgggcgggaatttcgattgtttgtgtatttggggtcggtttagcgttggacgtgggttgttggttcgagaggtggcgacggaatcgcgtgtttatatgtatgggggagtggaaagtcgtagggtgtgtttttacgttttttgagtagttcgcggtaagagttgttgagtattttatttttcgtttttagattttaaggtagtttttcgagttttttaaacgtattgtatttagttttttcgagagtggagttgtattaaggataaatattttagcgttattataaattttttttgttttttgggcgatttttagatgaattttggtgatttttagattggatttttattttttattttttttgaaagaaagtgttttagatgcgttaataaaatatgtttatgtattcgtgtaggcgttcgtatgtttgcgcgtcggtcgtgtgtaggcgtcgaagtatacgtttgtgtgaatatacgggtacgcgcgtttttgggtttagtggtttttttttcgcg

SEQ ID NO: 6511 - DNA, 7708 bp, Artificial Sequence
  Description of Artificial Sequence: Synthetic polynucleotide
tcgggaagagcgagaagttatacgttgggttgtagattgggttttagcgggtttggagcgtggatatgttggttggttttttttttcgggagttatagttttcgtcggtttcgttatttaggttttgtcgggtatttaggaggtttgtacggtcgtttgtagttcgttgtgtagagttcgggtcgaaggcggagttcgatgggaaacggtcggtcgaaggtttttgtaattttgttataggtttgttttttcgggttttttaggcgggtgtttgaggtcgcggttttaggtcgaggggagatcgtagtgagacgagtatttttttgttgcgtttttttaggatagagggtttaatttttttttttgaagatatcgtaggaagttgttcgtattttaaaaattttaaatttcgcgtttttttttttttttgttttttttttattttcgttttttagtttcgtttattagtttttattatttcgatttttttttgttttttttgtttttttttttttttttgggtttttcgttttttcggagtacgcgttgttagggtttggggcgtcgagcggttaatggtacggcggtaggacgtgatgttaggcgcggttgtagaaaaggcgcggaggtttgcgttggcgcggattgtagagtcggggttgggttaggcgcgcgtttggagagtattgcgcgcggttgggttcgcggtcggcggtttttttttttattttgtttttttttttttttttttttttttattttttttttcgtttttttttttttttttttttttttttttttaattttttcggtggttcgattcggttcgtaggtttcggagaaatttttattttagtcgtcgatttagcgtttaagagggtcgttttgggttgggggcgtattttagggaggggaggggtttaggtagttgggtcgtcgcggatatttagcggttttagggtgaatttcgatcgtagtcgtcgtcgtttcgggtagagtttgcgtttttgttttgcgtttcgggcgttgaagtcgggcgggcgatgttcgcggcgtgaaagcgttcgcggcgggcgtcgatttttgttttagttttttgtttttttcgtttcgtttgtttcgtgtttttgtgattttggttttggcgtcgtcgtttaggcgtttcgtaatgtagttgtttttgcgtttcggcgggaggcgttttgtttcgcgagcgttcggggttcggagttcggtttgggggtttagtcgagttcgggcggggtcggggtcgcggtggcgatgtatcgggttcgttagcgttaggagcgttaggtagttgaggcggggggtaagttttttttcggaggagtcgcgttttcggtttcgtcggtttcgtcgcgatgttgttttatagtttgtcgggtttcgaggtgtacggggttatcgacgagatggatcgtagggttaagagcgaggttttcgttattagtttcgttatcgatcgcggcgatatcgagacggtaggcgcgcggttgtggggtcggggttgagagttgggatggggtcgggttagttagcgtttttgtttttcgaagtttggggagcgtttttcgtgtcgtacgggattgggtgttggggattttcggttagaatgtaaggtcggtggttttcggttcgggggaaattcggttgttgggacgtagaagggaaataaggttgaaatcgaaatttcggttttgggggtagaggagagcgtttttttcgaattggaagcgaagttttattcgcggttcggggcggttttttttttattttgttcggtgtcggggtcgatagtttcgcgtttttttttatttttcggtttcggttgttggcggcgtcgcgagcggcgttagggaagggcgaattagttgggagtattggggttttagtcggtttgggtcgtttttagtttttcggtaatcggggattttttttaatttttagcgtagttttagaggtcgaagttttcggggttaatatttgtcgttgatcgcgtttttagatttttgattggttagatttagttaggttagggttgggagtttaggtttcggtttggttttcgtcgaaggagattttatttggatttttatatttggtttcgcgggtttagttttaaatagttagtttttcgttttaggtttttttgggggttagacgagtagatattgttcgattagcgggtttagaagtgatttttaggaggtcgcggaggtggggagtacgggagaagtttttttgtttcgggagtaggagtagcggcgttagtgttttttcggtttttgagcgttttttcggttagattttttttgttggttagtttggatagggaagtatttgggttgaatttgttttttatttacggattttgagggtgtttttgtattttatttattttattttcggatttaagagggttttagttcgtgtggtagaggagttagaagttggttgatttgttttggttttaatttttggtttaaggatttagggattattggagttggggtttaggaatttcgttgtttttttaaagaggattttgtgtggagggtgatttaatggttattttatttttcgggtggtttatttaagaagtagtttagggaaagtttttggagggtttgattggagtagttgttttggtttttaaatatagttcgagtattttgggggaaaggatagggaggattggaaggaagagaggtaagtattagagttatttaggttaggagttcggtttgggttcgtggttggcgagggttgcgtaggtaggtttgggttttgaatcgtttagaaatggaaatgggttttttggggtggggggaagcgcgtcgtatgttttggtagtttttttcgcgtttagggtagttaaggttatagagggagttgtgggtgtcggtttttcggcggcggaggggtcgttggttgacgtaggcgttgttgtttttcgttttttttttttcgtagattatgtcgtttattagtagtgatcgcgtcgcgttgtgcgtcggttgcgggggtaagatttcggatcgttattatttgttggcggtggataagtagtggtatatgcgttgttttaagtgttgcgagtgtaagtttaatttggagtcggagtttatttgttttagtaaggacggtagtatttattgtaaggaagattattataggtagtttttttatttaattgttttttaggatttttttttttaattttaggtatagttttatagtttggttttttttttttcgtttagttttaggagagggtttattatttaggattttttcgttttttttttaagttttttaagttattataagttgggtgataattttttaaagtagtaatttggggagtttttggaaaggtttacgaagtaggagaattagaaaaaaagtagaagttgtttttttgttcggagtttagattataaaaaagtttgagttgggatttttgtttttttttttttttgaagttttttgagttaattcgaggttatagaaataggtatttttaaatttaggtagtttaagttggagtgaaatatagttggaaagagagttgtgggagtgggtgtatttttaggttttttgagaaaatgggaatgaaaggtggttaagattaaagaattagaattattagtagattttaagttttttgtttttttttttttttagttttaggattagggtttatgtatattttttttgtttttgtttttacgtttgtgtttttttttttttttttgtttttgtgttttttttaaattataaaagttagtaggatttttaggcgttggtttggagggaggagtaaaggttgaggagggggtaagtggtaagtgtttttttttatttttaggtaaaggtttttttagggtttgcggagattttgggtgaagtagaagtttttgtaggtataagtgtgttaagggaaattattttaggataggattaggtttgggttaaaatttagtttttttttttttttattttttaaataaaggtcgggttgttcgttttgaggaggggattgtttttcgtagtagtagcggtatttggaggaggaaaaggggggtatttaatcgtgtgtttttatagtttttttttttatggtttttataggcgtttttttgtgtagcgttgcgttcgttgttatttgggtatttcggtttcggagatggtgatgcgcgttcgggatttggtttattattttaattgttttacgtgtattacgtgtaataagatgttgattacgggcgattatttcggtatgaaggatagtttggtttattgtcgtttgtatttcgaggcgttgttgtagggcgagtatttcgtatattttaattatgtcgacgtggtagcggcggtcgttgtagtcgcggcggttaagagcgcggggttgggcgtagtaggggttaattttttgggttttttttattataatggcgtgggtattgtgtagaaggggcggtcgaggaaacgtaagagttcgggtttcggtgcggatttggcggtttataacgttggtgagtgcgcggcgtacgaagcgtttttatagggttgggggaaagtgtgcggtttcgacggtcgggagttggattgaatttttgtgtgttgggtaaatagcgagttttaagtatcggacggtttcgtagaagggatattagttttttgggtttttagattgtgcgttttcggttggagcgggaggagagggtgtagtggttttttgttgtttcgggtgtagggttttgtttttgataaattgtttttttggagatggttttttggtttgggtttttgttttattttgttaggtaggaagtggtagggatggagaaagtaaggcggcgttgacgttaaataggttttgggttggcgcggttgagggtcgggaattggggtagcgaaggaacgaggtagggcggcgagggttttaagagaaagggttggttgtggttcggggcgtcgagttcggtttggagtgcggtttgatttcgtgaaatgttttaagggcggtaggtttggggaattcgggtttggggaatttaggaaagtaaaggttgcggttttttttgttcggttcgatttttttttaaagataggttttagttttttcggattttttttttcgagttttttggcgtttgttggggtgagggtcgtgattttcggaagcgagtttttcgggcggggacgagatcggagtaggtttggtttcgcgttggggtggggtggggtggggtgaggtggggggtttggttcggattttcggtatttttgaattttaggttattttcggagaagttttgttttttttcgcgtttttttttgtttaggatagttgtagaggttttgagtttcggtaaatgagtcgttaatatttgttcgaagtttgtaaggttcggaaaggtttatgatttttcgggttttcgaattagagtttatgtgtaattattttttttttttcgtttgtaatagaattagatttggagattttgtgttttttttttttttttttttagtttaatgtataagtagaaaaaagtaaaaataaaaataaatttaagattgtgtagagggtgttacggcgggaagaagttagttatttttattttaaagaatttgagttgaatagagagggaaatgaggggcgggtgttcgttttaacgaaatcgtttggaggattatggggcgtgtgtttttgtgtgcggaattgggaggaaaacgtagtttttagtttggtaaatggtgaagtagcggtaggtcggtcggtggcgcggatttaagatttgttgaaggtattattatagatgtagttttttggaatttttatttttttttttttattattttttaaaaaaagataaaatcgagtttagatcggtttttttaatattaagtcgtttttatttattaagtgggttaatttttattcggaagtatttcgcggggttcggttttagggtatttggtggttggggagttgtattgtttttttgggtacggaggttcggcgtcggttttaggattgtgtaaaaagagagtagaaggtatagagatttatttttgttttttgttgtttagtcgtcgtttgttttagcgaggtgggttggaggttgaattttaagttttgtttaatttttataagagatattttttatttagttattttattttttttttggtttttttttttttttttttttttttcgtttttttcgttttttttttttatttttgtttttgtgtgtgtcgtgtttgttttcgtgttttttttttcgattttggtcggggtttttagttttgagagaaacggcgttcggtgcgtcggcggtggttatgcggttggttttttcggggttttcgggattaggttggggaaagagggtattttttcggtttttcggggtttagtttagtttttttagatttggcgttcgttttttttttttttttcgtattggtaggagagaaatggtcgtagtgtgggtcgcggggtagttaggattggaaagcggggattttggagggtgcgatcgcggacggggtgtgcgggcgcgggtcgtgtgcgtgtgcgtgtagggtttcgattacggggatacgagtttgtttgtggtagtgttttatattttgtggtttagttacgacgattttttgtaaagttttttgttttggggatagttttttcgaggcgcggcggtattttattgaagggcggcgagttgggggtcgagtggggagggggcgtcgtcggggcgtcgggcgttgggtttatagtagagtcgcgggtcgcggggtcggaaagttttttcggggcggggtcgtagcggttttttttcgtagtttttcgggttcgggtttcggtggaacggaaatttttttttatttcgggaggggttgttagcgggttgggggtgcgaaaacggcggtaggagcgggcgaggggttcgggtcgcgtattttgcgtttgggtttgcgcgtcgcggtcgcgggagtttcgcgcggatcggtcggacgttcggttttttttagttttagttttttgtgtgtgtgtgtttggcggcgtaattattgatttgattttaatttattatttagataattgaatttataatttcgtttttagtaaaatgaggcgaagttagatttgattataggtttagttttagcgataagagttcgaaattcgatgggttaataatagattacgagtaaattatttatgattttacgagttttttagttttattgaatcggtttaattgagaggaaaaaaaaaaaaaaggagagagaaagttcgggtttttttttttttttcggtttttcgttttttttcggattcgattttggggaatttcgattcgttttcgggtattgggggcgggagtgagggggttcggggcgtcggttaaatttgggttttacggttgtttttttcgtcgtcgttttttgtttttgtttttggtcggtttcggtttcgttatttagggtcggtttttttttttttttttttattttttttttttttttttttttttattttttcgttaataacggtttcggaaaaggtttttttcgtagggatcgggtttttcggagtttcgggatttagttcggttatcggattttcgttataagttgcgtttgttttcgggattcgttttttttttcg

SEQ ID NO: 6512 - DNA, 3969 bp, Artificial Sequence
  Description of Artificial Sequence: Synthetic polynucleotide
tcgggagtgtgggtgtttcgggggcgtgggtgttttaggagtgtgggtgtttcgggggcgtgggtgtttcgggagtgtgggtgtttcgggggcgtgggtgtttcgggagtgtgggtgtttcggaggcgagggtgtttcgggagtgtgggtgtttcgggggagtgggtgtttcgggagtgtgggtgtttcggaggcgagggtgtttcgggagtgtgggtgtttcgggggcgtgggtgtttcgggagtgtgggtgtttcgggggagtgggtgtttcgggagtgtgggtgtttcggaggcgagggtgtttcgggagtgtgggtgtttcgggggagtgggtgtttcgggagtgtgggtgtttcggaggcgagggtgtttcgggagtgtgggtgtttcgggggcgtgggtgtttcgggagcgtgggtgtttcgggggcgtgggtgtttcgggagtgtgggtgtttcgggggcgtgggtgtttcgggagtgtgggtgtttcgggggcgtgggtgtttcgggagtgtgggtgtttcgggagtgtgggtgtttcggaggcgagggtgtttcgggagtgtgcgtgtttcgggggcgtgggtgtttcgggggcgtgggtgtttcgggggcgtgggtgtttcggaggcgagggtattttagaagtgtgagtgttttaggggcgtgggtgtttcgggggtgtgggtgtttcgggggcgtgggtgtttcgggagtgtgggtgtttcggaggtgagggtgtttcgggagtgtgggtgtttcggaggcgagggtgtttcgggagtgtgggtgtttcgggggcgtgggtgtttcgggagtgtgggtgtttcggaggtgagggtgtttcgggagtgtgggtgtttcggaggcgagggtgtttcgggagtgtgggtgttttaggggcgtgggtgtttcgggagtgtgggtgtttcggaggcgagggtgtttcgggagtgtgggtgtttcggaggcgagggtgtttcgggagtgtgggtgtttcgggggcgtgggtgtttcgggggttgtgggtgtttcgggagtgtgggtgtttcggaggcgagggtgtttcgggagtgtgggtgtttcggaggcgagggtgtttcgggagtgtgggtgtttcgggggtgtgggtgtttcgggggtgtgggtgtttcgggagtgtgggtgtttcgggggagtgggtgtttcgggagtgtgggtgtttcggaggcgagggtgttttaggagcgtgggtgtttcggaggcgagggtgtttcgggagcgtgggtgtttcgggggcgtgggtgtttcgggagtgtgggtgtttcgggggagtgggtgtttcgggagtgtgggtgtttcggaggcgagggtgttttaggagtgtgggtgtttcgggggcgtgggtgtttcgggagtgtgggtgttttagaggcgagggtattttagaagtgtgagtgtttcgggggtgtgggtgtttcgggggtcgtgggtgtttcgggagtgtgggtgttttagaggcgagggtgtttcgggagtgtgggtgttttaggggtgtgggtgtttcgggggcgtgggtgtttcgggagtgtgggtgtttcgggggagtgggtgtttcgggagtgtgggtgtttcggaggcgagggtgtttcgggagtgtgggtgtttcggaggcgagggtgtttcgggagcgtgggtgtttcgggggcgtgggtgtttcgggagcgtgggtgttttaggggtgtgggtgtttcgggggcgtgggtgtttcgggagtgtgggtgtttcgggggagtggatgtttcgggagtgtgggtgtttcggaggcgagggtgtttcgggagtgtgggtgtttcggaggcgagggtgtttcgggagtgtgggtgtttcgggggcgtgggtgtttcgggagtgtgggtgtttcgggggcgtgggtattttagaagtgtgagtgttttaggggcgtgggtgttcggggggcgtgggtgtttcgggggtgtgggtgtttcgggggtcgtgggtgtttcgggagcgtgggtgtcggggattgtagggatatgggtttttttttttatttttgtcgtttagggtattttttgtgaggattcggagttcgtgagtttttatttttttgagttcgattttttggtgttttcgtttgtatttttagtttttttttaaattagattagttttttaggggcgtcgacgtgtgaaattgattttaaagaaaataggtagtggtttttttttcggttttacgtggtttagtagcgtttatttttcgttttttttttcgcgtttagtaattaatttaggtcgtttttgtagaattcgggtttttgtttatcggtttatagcgtttatttgaggtttcgtttttttagtaaaggtcgttttttcggaacgcgttttttgcggtttttttagagtttttttcgcgcgtttttttagtttcgttcgttttttttcggggtttttttttttcgtttgtttttaggttcgttttttttcgcgggttgaggtaggttcgggtagtacggtcgtttcggggcgggggttattttttattatcgcgtggtgtttatagtttacggcgttttcgggtgacggttttttcggttgtagggcgttttgaagagcggtttgttcggagttgagcgtacggggttgtttcgttttgggcgtttttggtttttattagtttcgtttttttatgggtaaaacggcggttttgtttgtttataagtaatcgtcggggttacggaggggttaggagttgcggcggggggttgtgtttttaggatcggttttaggaggattcgcgcgaggtttggagtttttaggggtcgcgggggatagaggggttttaagcggaggcggggaaggcggtagaagtttaggatcgttaagagttggcgaggaagttcggggttcgttgtcgggggagtcgggtaggggtcgcgtttcggattaggacggaggtttggggaaggcggatttggtcgtcggagacgcggtgcgggtggagacgagggatttggattttcgcgggcggttgtacggatttttacgcgcggtttacgtgggttttagggggttgttcggtattcggggtcgcgtcgtttttttttcgtcggtatcgattcgtagttttacgtttacgcggcggcgttcgtagtttttttcggttcggttttcgcgcgtgttttcgagcgcgttttcgggattagttttcggaagtagagaggttaggtcgggaaggatgggcgacgggggtggttgattcgggagtacggtagggaggatatttagttaggttcgcgagtagcgtcgttttttttttttaggacgggcgggaatttgcgatgttttcgtcgcgtgggtcgtggggcggttttcgaggtattgggcggggtacgcggtgggcgttttacggaattcgtattttttagttttcgtaatttaggaggaagtttacggcgttttgtatcggcgtcggcgcgttaacgcgtttttggaggagttgcggtcgggttttttggagagggagtgtaaggaggagtagtgttttttcgaggaggttcgggagatttttaaggacgcggagaggacggtgagtttagtttcggggcgtttcgcgtcgcggatattgtaggcggcggtgaattaggtcgcgtggggtcgtttgcgtttttttggttgcggttgtgggcggcgaatacgtagcggcgttcgcgcggcgttttttgcgggggtcgtttttcgttcggggtgatttcgtttttttgggcgatgttttttatttttaggtacgcgtttttttcgtgcggtcgtatcgcgtatgtcggtttttatattagaaaatacgatttgtaaagtatatttagggtgttttttttaattttttaagggagtttttttagttttcgaagggtttagggtagtttgcgtatcgtagacgcgcgcggttcgtagaagggacg

SEQ ID NO: 6513 - DNA, 2490 bp, Artificial Sequence
  Description of Artificial Sequence: Synthetic polynucleotide
gcgtttttttttcgttcgaggtttatttagcgttagcgttcggtttttttgtagcgattgggttttaatgtcgtacgaggggttttcgcgaaggttaatggtattatttttttagttttttttttatttttattttttatttttttaggttgtggggggttaggggtcgaggttcgcgcggcgcgtattttttaggcgtatttttatcgttaggtatttttggaagcggtagaagggatagcgtttgcgttgcgttttgtcgattttgtagttttggttttcggtgtacgtgtagtgtttgttgttttgtatcgtgcgtttgaagaagttttgcgggagttgagagttagcgaggtttcgtagcgttcgtttgtcgtatttttgtcgcgcgttcgtcgtttattttgtagtttttatacgtgagtagttcgtagtggtagtcggatattttgttttcgtatacggggtatagttcgtttaggttttcgtcgtacgaatagtttatgttcgcggcgttcgtttgcggagggatagcgggttagggagggtcggcggagatcggtagtttggggttttcgcggtcgtcgttttagtcgttgtcgtcggttcgtcgcgtaattttttttttgtgtttaggcgttgtcgtcggtatttatcgagcgtttcgcgtagcgtttcggggtgggttcggtgtagttttcgcgttcggtttttttttgttaggttttacgttttcgtttcgttcggggggtttttttcgcgcggatttcgtcgcgttcgatttggggttttcgggttcgatgcgtttcgattgggattcgtttgtttgagaataaaatttcgattttgagaaaaagagatgggtttagtcgcggggaagacgttaggggatttaggagcgttggggcgttcggttcgggtgttttgggaattcgatagagacgaaggaggtagagatagagttcgggggagttagagatgggaagaaattttggcgagagataacgatcgacgttatcgggcgtagatacgaggttagttcgagagtgttagagatatagatattgagacgtttagttagagagaattcggcggggacgagatatagggagggatggagagagatagggagatagagagagagagagagagagagagagacgagagagagagagagagagagaaacgaggggtgggggattggattagagattcggagagatagcggaggttcgaagagaaaatttaagagagattgacgtagagttagagatataacgatagacgatagatagagacgtcgagacgagaggagtttcggagagacgaggtcggggagttatagaaatacggagagaaaatttggaggcggaagcgtttagttcgagggtcggggataggggacgcgcggaaatttgtcgggtaggagtttaagcgttaaggcgaggtttcgtagggtcggatttagacgggggttcgggtcgtaggaggcggaaaacgacggcgtcgggatcgagagttcgaaaacgtagagtcgtcgggatttttttttcgggggagataaagtcgtagtagcgacggtaacgggaggcgtagttcgagtcgtcgttgttatcgggacgtcgggcggggagatttcgggcgggggtcggcgggtttcgggaagtcgagttcgaggcgagggagcgatttcgggcggagaggcgaagttcggaggagggaagcgcgaagagttagggttcgggacgcgagagggggcgcgacggcggttgcggtcggttcggcgtttatttggtcgtttttgcgagtagcgtttcgcgtttcgttcgcgcggagttcgtatttttcggtcgcgtcgtcgtcgtcggcgaggagtcgtattcgggcgtagcgtcgttcgttcgcgatgacggtcgttcgggtcggggacggggaggcgggggcgcggggttggcggcgcgggggtttcggtttttttttttcgttttttcgttttttattttgtttttttgttttttttcgtatcgtcgtcggggtcgtttcgaggcgtatttgggattcgggttttttagtcgttatttcgttttgcgttaattcgtcgcgttggggtcgggggtcggtttttttatatcggcgcgtgcggtattcgggggcggaggttcggtcgtgttttttttttaagttcggttcgcgtcggtatttttttcgtagtttagttcgagttttcgtttttattttttaggttttttagtcgtagttcggtttttcggatttcgagcgcggttagagagttgcggagttcgagtgtttcgcgatttgggtaggtatagggtagtgggggttttgggttattcgtttgtagtgggaggaggtagtttttgtttgtgaatttagttgggtcgtggcgaatgttacgcgggtggttggtcgtattatagcgtggaagtgggtaagggcgagtggcgatcgtggtcgaggttcggatttacg

SEQ ID NO: 6514 - DNA, 5370 bp, Artificial Sequence
  Description of Artificial Sequence: Synthetic polynucleotide
tcgtgttcgagggaggcgggtagcgtagaggagagggtgtaaggttttaagaagaggagcggggggattagggcggggtttaatggagttggggcgttcgtagattggaaggagtcgggattttcgttttagagtttttttttttattttcgttttttttagtgatttcgagttttcgatttagttttttttttaggtagagagaattcgaggttgtttttgtcgttgaaatttgagcgggagagtatttcgaagtcgtttgcgtggagcgagtagttttcgcgttatgggttagaggcgttcgggagaatttgcgggttacggattatattcgtaggggtttggcggagtaaggtgtcgttcgtcgtttgcgggtaggagtcggttttgggtttcggtttttgttgtgtcgtttagtcggtcgttttttcgttttttcggtaagggaagcggtggagaggcgcgggagtttcgattgtgttggagagatttgggatttttgcgcgtttgcgtgcgaaggattcgagatcggttaatttagttgggagtacgggatacgaggagtgaggataaagggtaaggaacggggtttatagggagggtgtgtgtgtgtgtgtgtgtgtgtgtgtgtgtgtgtgtgtgtgtgtgtgtgtgtgtgtgtgtagggggaatgaatggatagcggggaaggtatgtagaggggtttaaggggtgtggatttagtagttttattttagattagagaaggtagttaggttttggcgtttatcgagttagcgtttttatttgggcgcgggtcgtatggcggtagattattttatattcgttttggtggcgtgggatatgattggtaggagcgcggaagaggcgttgagaatgtatgcgtattcggatagattagacgcggtacggagggggtattttttataagtttttttgttttgagattaggttttcgagtggttcggggaatgcgtttttgggtatagttagcggttttagatcggtattggacgttaattcgagttagagaagtttgggagattggatcgtaggggtttttatttagttaaggagggggaaaggagagttgtagggtaggagaggttaggtatagggaaggtggggaggggatggagttttgcgttaggagttgggggtgtagggtttgtgacgagagagtattattatgtgtattttgaaggagagggagagggtttgggtttggaacgaggattttcgtttgtaggtagtcgtttagtttcggttgtagggatggatcgcgattagtagagggtagaaagtgtttggttcgttcgtcggtttcgagtcgcgtttcgcgtttcgggattttggttttgtgcgtcgaagttttgttcgttcggtttttttttgtagtagtcgcgttttcgttttagatgttcggagaaggcggtttaggtttagtttaatttcgcgggtttaggtttggggtttttaggttaagtaaagaggggatcgagatgtgggagagaaattttatattgattgtttatttttttcgatttagttatataaaggcgtttagaaatatacgaaggtataaagttttttattatatataaatatatatatatatatatatgttaggagatacgcgagtatatagaagtatttagaatttcggagataagtatagatacgtaaagttgatagagatatttatatagaaaaggatcgtagatataatatagaggttgagatacgtataaagatttaggttttcgtatgaaatgatgcggatatatattttagatataggtacgaaggatttatatatttatatatatacgggtgtaggggatttagatatagatttatagatttatttttgggagtttggaaggttgtagggatatatatatcgtgtgtgtagagttaaggagtatacggaggtaagagtcgtagaggcgggggttcgatacgtatagatatatatagatatttatcgatatatacgtaggtagggtagggcgggagtttttaattttttataaagtcgggttttttcgcggggtttcgcggcgtagggggttatttttgattaagtttttcgtaggttttaaattcgattcgttttttcgtttttagcgaggttaggggattcgttttttatgtttttcgttttcgttcggtttcgcgtcgttgtttcgtttcgggaggggtcggggtcgtttcgtagcggatcgcggggggttagttcgtcgttatttcgggtcgtaatcgtttttttgtttttcggtgagtcgcgcgtcggtggggattacgggtcgtagatagtcggttcgacgttgtggtttttcgtatcggacgcgggtgttaggttcggttggcgcggaagtcggtagttttatttcgttagttttcgcgtttcgttgtcgaggtttattttgtttaggttggttagagtattgtttttgattcgcgcgttttagcgatttttggtcgggtattcgattcgttaaaggatttcgattttggtagttaatttaatttttttagagtcgttattttggggttattatttttttttagcgttttttattgtaaattttaggaggttcgggttttgtttattgtttttgtttttgttcggggattttttttttagttttagttgttttttaaattttcggtcgtttgaatttaggtttgattttttttgtcgttttagtgttttttattttcgatttcggggttttaattttttatcggtttagtttttcgtttaatttttgttaggttcggagtttttttagattttttatttatattttaggtttatttttcgtttttgggtttgggttttttttgtacgagtttagggttagtcgttttcgttttttgttcgttttcgtttttcgtttttgggagtcggtttttttcgcggattaagcggtttcgagtaggcgtcgtcgttcgggggatttcgatttagttttcgcgatttatttcggtcgatagtcgggggtttttaagcggttattttcggtcggcgtcgttttttggcggagtcgtcgcgttttttgtcgttcgcgtagtttggtttcgttcggggttatttttcgtagcgttggagttttataaaatattaataataaagaaggtagaggagaaaaaagaaagttttcgttttttaatttttaaattaattttttaagggggtggagtagagggatttgtttcgaagacgattaaaatttttgcgaggggttcgcggggcggtcgggtcggggagtcggggtttgagttcggggttaggcgcggcgcggggcgcgggttaggggcgcggagtttcggggcgcgcgggggggcgggacggtattatttgacgtggagtcggcggcgtatttcggcgtagggatatcggtcgcggggtttaaatgttaggaagtttcgggaggtgaggcggttcgtattttttcgtcgttagttttagttttaaattcggcggtttagcgggcgtattatggtattggagtagcgcggggagcgcgttcggagtttcgcggttcgttgcgtttcgttcgggatttcgttgcgtcgcgcgtttttttcgcggttcgcggggtcgtttttgtatttttattttttttttcgtttgtcgtcgtcgttatcgttatcgtcgtcgtcgtttttttttcgcggtttcgtttgtagtagtcgtcgtcgtcgggtttcgggattgataagtaggtgatagaggagtcggcgcgcgtggttgtaagtgttcgggagagcgcggcgcgggttgtagtcgtttcggttcgttcgtacgacgtcggggttcggggttagcgcgtcgtcgttttacgatcgtcgggggtcggcgtaatttttgttttgcgggggtcgcgttttttcggttttagggtcgcggtggcggagagcgggtggacgggtcggcgggcgagtagttcggtcggcggggttcgtagcgcgtttcgcgttttatggatatagtaataggtttcgagtcgttggagaggtgtttttttcgcgggtagacggattgcgttaagatgttggacggtattaagatggaggagtacgttttgcgtttcgggttcgttattttgggggtgttgttgggtgagtgcggggtcggaacgttcgagtggtttcgggcgtgggatggggcgtcgttcggttgtggatacgggcgttggggttaacggataaaggaaatgggtttgtaggatatggggaggaggtagagataggatttttggagtgatcgttagagggtcgtaagtacgttttcggtaggcgttttgaggggataggatagttttagtcgttatttattattttttttaggtttaggttttagagttgttatttcgatgtggtaggtggcgggtggtaggggtgatggaggatttagtaattattttggcgagtttgggagaggcgtaaggttatttggggtgggggagattttaagagaaaaacgtttttttggttatttaaattatagattttggggagatcggggatagaagattacgaacgttatcgtggggcgtgttagttagcgagcgttttagttttatttcgtttgttttggttttagtcggttattttgcgtcgtgttcgttgttatttgttttaatacggagcgcggatttttcggagaaggggagagtatagcgtcgagttaaggttcgaggttcgcggtttttttacgtcggagttcgaggattgggacggattagtcggggtcgttcggtttttggcgcggcggttcggggagcgtaggcggtaggcggtgatttcgggcggttcgagttttcggggtcgagggttgtgggttcggtgcgatcgggacgtcggggttgggtcgggcggcgttgacggtcgggttttcgttttgtgcgttataggtttcgattgttcgtatttcgtcgtttgcgagggttgttagcggtttattttcgatcgttttttgatgcgagttaacgagtcgttttggtacgaggagtgtttgtagtgcgcggcgtgttagtaagtttttattattagttgttattttcgggatcggaaattgtattgtaaataagattattaatagtaagcgtttttcgtttttttttttcgttatcgttcggtattcgagttcggttagttttttgtcgggttcggttcgcgttcgttttgtcgtcggttttgtgcgcggttgggtcgggtagttttaagggtttcgagagttgcgcgttttggggttggggcggattagtttagtttagcgggtattgatggggttttgggagttttcggacggtttttagttgttattcgttgtttcggaattttgcgttgggtcggtcg

SEQ ID NO: 6515 - DNA, 3120 bp, Artificial Sequence
  Description of Artificial Sequence: Synthetic polynucleotide
gcgggagagtttttttcgacgttcggatacgcggatggggcggtttttagcggtttttattcgcgtatttttttaggtttatttttcggcggttcgtgtagtatgttttttattgggagtgggatgatattatgtataggtttttgggtttcgtagtcgagtcgcgggtattagcggcggttgatgaatttcggtgttattaggggtttagttcggatttgggaatcgcgcgttttaatacgcgtatacggttttgttttttttaaagcgtagtttttttatttagtagttgatttatggaggaattcgattttgggacgcgttaggttgaagttcggagtttagggttttgtagtagttttcgggttttttagcgtttcggggatttttggtggttcgggggtttttttgggttggggtcggggtgtttcgttaggtggggttttacgcggtttagaaagagttagtgattttttttggagttattgtaggttttcgttggagggagtaagattggcggggagagttggtatttttattttttgttgagtatagttttcgtttttttttaagtttttttgtcgattttttcgggttggttaaaagtagtaagttcgggaggtttgtttattgagagaatagaaaattaggggttgcgggggagaatttaagatttttttttcgtttgagaaacgtgcgaagttttttagtttttggaggtaattaggcggttcgaaagtcgagttttcggcgcggatgttagggtcgattttagtttttttttttttgcgttttagttcgagggcggcgagtggtaggtttttttttattttgtttttttttttttggatttggtttgtaggggggaaatgtggttgtattaatttataaatatttatttttaatagatttgtatttgtggagatttcgaataaagatagtttagggggattataaaaattttaaatttcgtttttttttcggatttggtgttttaaatgttaattataggcgagttatatttaatagtaacggggaaaggcgagtaggtttcggggagggaggtggggggagagttcggttattaaatgtaattttttattatgaaaaggatttcgtcggttttattttttaataagattatgttacgaatataagtatttaggatggtgttgagtgatagggttttgtcgtttaattagaggttgtgtcgtttaaatcgcggggttttttgttttacggagtgaacgacggaaatttgttattttaatttttttatttatgttaagtatagaaaagaagtcgagtattttataatcgtgttttttttatttttttcgaggacggcgggaagagggggtttcggttttgtagttttttgacgtttttcgttttcgagcgcgtttgggttttaggagtcggagcgttgtcgtgggggcgggggaaggggtggttttgcgggtgttttaattggtagcgtttggaaaatggggatagtgattttacgattagaggatgaatggggggagggttagtgggatgtgtttgttttttttgatcgagagtacgggttttgttttgttttttttttttaggaaaggtggtatttcgggtgtatatttattatttttattaaagcgggattgattagaagagagaggtcgaatggagatgttaggttggggttttcggcggggtagatttcgttggatttttgggattaatgtcgtagcgttcgtatttttgtaggtttttagggttggttattttcggttgtatgttcggtttttttttttcgagggtgaatttttttgttttatttttacggaaattttttttttcgttaggttcgtggcgtttttttcgttattttcgtcgtcgtcgtcgttattttcgttttatcgtttgtagggtttttttgcggcgttttggtcgtagagatttagttttgtttgtcgattggtttttcgacgtcgtcgtcgtgtttgagtttcgttgtttgttcggataagtagaatttcggtaggcgtagcgggcgtcgaggtttgggttttagtcgtggcgttcgtttcggcgtagtggggagtcgcgggcgtcggagaagcggtcgcgttgtttcgggttattgtatcggttgaaaaaattaaaagtaaaattaatatttagaaacgaagtttgcgtgttttcgggggtttcgttttgttttttttatggatatgggggtggggagttcgtggggttttagtttaaaggttttagttagtggaatcggagggggatttcggaggaatttgtttttgatgtttcggttttttggttttttattagaattcgtagaggattcgttttggagttttcgtgcgttttggtagaggtcggggacgttagagtgtacgtagttttttgcgcgtcgagtttaggtttcgggcgtagggaggatcgggttgagagtagggtgttatttcgtaaaagcgataggtaaggattgttttatggggagggagaaggagtaggaagtgatgtttttatttttgatagtatagggatcgggagtttcgatggaggaaatttttttcgggtaggacgagtagagggataggatatggtcggggattatgggattcgttgttattaagtatgggacgggtaggcgagagcggggaaggggatcgatggagttagaagttttgagtttatttttcgttcgtttttttttggagttttttttgtaatttcggtttagtcggtaatcggtttttttttttaggttaggggtgggggagagattttttttttcgaaatatttgatattaattttgtttttttggtaagaaaaataagttttgtttggaaaggggtgggtggggggcgtcgagcgagcgagggaaggagtaaggaggcggcggcggagtaaattttgcggattaggttttagcgttttcgttttatttttagtttcgcggcggtgatttgtgtgcgggggtttgtgattttgtaagtattaaacggttcgcgggaatcggtcgagtttagagggatagtgggtcgaagggcggtttaagataacgtagatggtttttattagttcggtcgggttcgtagcgttcgtcggttcgttcg

SEQ ID NO: 6516 - DNA, 3120 bp, Artificial Sequence; identical to SEQ ID NO: 6515
  Description of Artificial Sequence: Synthetic polynucleotide

SEQ ID NO: 6517 - DNA, 7861 bp, Artificial Sequence
  Description of Artificial Sequence: Synthetic polynucleotide
tcgttttttcggaagtcgtgtttttttttttttgttttttttattttcgagtttttgtatttttgcgttttcgattcggttttttatttgttttttttatttcggtatcgttttgttttagtttttttcgatttttgtttcgttttttttgtttttagaagtttgcgtttttgttttttttatcgttcggttttttggtgttttcggcgtttttttcgtcgttttcgtcgttttgattagtttgggttgtggcgttggtatcgttggtttggggatcggggtgtgggcgatggaagggggttcgagaggcgtaggggaggggttttttttttttcgtttttgggcgtttggggagattcgcgtgttagttatttgtcggtcggggcgtcgatttcgcgtttacgtattttacgtgggcgtttcggggcgcgtttttgtttttttcgagttttgaaagttaattatattgggaggggataggggtggggtgggagagggggtcgttgtttttatttattgagtcgaggtcgttatttcgtcggtagtttcgcgtaggtttggtttcgagttacgtttgttgaaatcgtttttttcggtttcgtttttattcgttttggtagttagtcgcgtttttgtacgcgtcggcgggggcgttttggaattttgaatcgttttacggggaacgggggtggggggaggggagcggcgcgggttttacgcgaggaaggaattttttgggttattgcgaaagattgaggtttagaaagttagagagagacgtgcgaggaggaagcggagagggtgtgcgaagttggagagggagtcggagcgttagcgaaagaggggagcgttggggaaggaggaagagaaggagagggggagaagagagacgcggatgttgggcgcgcgacggtagcgggcggaggaggggagcggtcgggaatttgcgcgtaggggaagttaggacggagcgtagtatcggtaggggagggttgtcgaggggttgtgtcgaggagttcgggtgggggcggttggatcgcgggtcgcgggatttatagatagtgcgaggcggcgcgggggtttttttttttatgcggggttggggcgtaggggttgggcggggcgggtgggcgtttgagcgcggcgcgggcgtatttttcgttttttttttttcgggtttatttcggtcgatcgatatttgcgcgggatttgttttcgtcgttaatatttttttaatgagttcgttaggtttaaagcgagcgcgatttgttttttagggtggattttttttcggtagatgtttcgggaggaggaggcgcgcggagttttcgggaggggggataaattttttttttcgaggggcgagaataggagatttttttttaaagtttaaaagaaagacgggtttttattcggtttttaaaaatgtatttttcggcggataatgggtttttttttgcgtttttgagggtcggcggggcgggtagggcggggattcgtgcgttttggtttcgtttgatcgattcgtatttttttttttcgtatttaggttcgggttttagagcgagggcgtaggagtcgcgaagtcggtcgttttttcgagcgtttttttgaagcgtattgtcgggatttggttttttcggagttaagtttcggcgtatcggcgagaacgaaagcgtcgtgcggggttttgggttgttttatacgttttcgtttttataggtgttttagtcgggtcgaagggacgcgcgttggtgttttaaggggaggacgaacggattttcgggtttgggtcgcggttttttttttttcggcgtttcgttttgagcggggtaataattagaaattagttaatttcgggcggttgtcgggttttgagattgttttgttcgtttcggtttagttattttttcgggtcgtttttgttttttttttttattttttttttaatgttttttcgtggggtcgtcggtttgtcgcggcggttttttttttattttcgtgggtttaggggaagagggtattcgggcggcgaggatgattttcgaagagtcgcggtaaattgattcgtttcgttcggagtcggggtcgcgtgaatgggggttcgggcggcggcggtagcggagaagaggataaagatgttttttttgaaagggggagggggcgcggagcgggaagcggggttatttatttttggttcggtttttcgggaagtcgcgtcgaagaaagggggtcgaggtttatttaagttttacgagtcgtttataatggatcgatatattgagggtttttttattaacgtttatgaatattaaagagatcgttaagtggcggttagcgggcgaggggggcgacggagtttgagagtttcggttcggtcgaggggagggggtttttgcgcgagtatatttcgcgtttgggtttcgcggaaaatgataaaataatacgggttattcgttgggaaagttcggaatgttttttttcgaaattttttttcggggagatgtgagtatagggttttgttttttattttaatgtattttgagattgggcgttatttacgggttttttttttttcgggcgggggtttaggtgggttttgtcgttagattagaagtataaaatgtgagcgcggtggagatttgggcgtattagttgggaggacgttttgcgtttcgtttttgttcggtttttagtattgtttttcgggtttgcgggttcggaggagaggaatgggattttttggtcgtagttcgagttcgtggttattgcgttagcggaatttaagtttttaattttaagtcggggtttaggatttaaacgttgtattttagtacggaggatgtatagatttgagggtttttcgtagtgggacgtggttttggagagggtaaaattttcggggttgtcgtggggtaaagtgattttatttaaagagagattaagtaaagaaattttagtttataaagtttaatttaaattattgtatagatagggatatcgaggtttagagaggaaaggggtagtttataggatatatagtagtttttatttttttttggtgttttggaggaattgaggtcgttttcggggtttgggagttgtcgtagcgtttggtttttggtagcgtttttcgacgtcgtttttttcgtttttagtattttgttttttttatttaggtttttttagaagttaagaagtaggtttcggtgaggtttttttgtaggagttatcggattttatacgtttttttagattcgagttttggttagggagtcgatgcgatttataagttgcgtcgaaaaatgagtggagggttcggcgattttaatttatttttttttttagtagcgttgttttttgttggcgttttgtttaacggttttgttttttgttaggtgtgtttttttttgggttttagtttcgggcggattcggacgtagggtttgaaggttagttatcgtcgtttttttttttttgcgttttaacggggacgggggatgtcggagattattggtaggaattggggattaggggtttggagtttggacgttaggtgtgagatttttttagttaaggcgcgttcgggtggtggaggggcgtttatgttaataggcgtttggatagggtttcgtttatgggaggttagttcgttgtttttttatttaagtttttcgcgttgaggagaaggtttagggagtttatatagtttagcggagattaattcgtgagtttgatttacgtcgagagggtttaggtatttttgttagcggtatttgaaattgtaggttggtgatgggagttagaagtgcggtaggtggggtgagtttttttatttagtatgttagggtttggggttcgaggtttgaggttgatattggggagtcgcgaagtttgtaggaagcggggtttttcgttgggtttagtagttatttgtttcgggagaggggatcgttgggtttcgaggtgtttcgaaatcgtcgtaaagtaagtttgtttttgggatgatgggtaggaggaatagaggagaggaagggaaagaagagagaggtagaggagaaagaaagaattaggaggtaagaaggaaggggcgtcgtaacgttatcggtttttcgaggttgtagtttagtaaggagtcggaaagtcgggtcgtaagtcgaattcgtattgaggtttttcgcggagttgtttgtagtttttgagggatttcgtttttaggtacgtttgtttttatttaggaagggtttcgggattttttttaatttttttatatttcgtaggaaattttttttttagagataggttgttagggcgatttttgttcgtttatttcgattttcgatttggtttcgtaagggtcgggagtttggttttttatgaagttgttttaggtcgggattagttttagtttcgacggtcgttgcggtttcgtttcggtagtttcgtgagttcgcggaggagtttcgtattcgatcgtgtatagcgatcgagttggcgcggttcgtatgaagcgaagcgtcggttttagtagcgtagtttgagtaggggattcgcgtggtaattagggttgcgcgcgagttcggggcgattgtggcggttcggggagtgtagggtcggagagggaagaggacgcgggttttggtcggggagggagagcggtgtagggttgggtcggttagtcggggtagtaaagtaaaggtgaacgtcgggttgggttaggtcggtgaatatagattaggtttgaggggagcgcggggttcgaagttaggcgtttttttttgtttagtttggtttttggagttttagagagtttcgtcgtatttttttttttttttcgtttttttttttttttagagtcggttgagtttttttttttgttttgcgttttttacggggagagaaggaaaaataggaggggggaggaaggattaggaaggggagagaggagtggaggggtattgtttggagcggttcgcgcgttttcgtttttcgcgttttcgcgacgaaggtttttcgagtttagtcgggtataataagtttgtttttcgacgttagggggttattaataattaattaggagggttattgcggtttttataaaggcgttgagattttgttaaggggaagacggtttcggtcgagtgtgcgagaggttagcgcgcgtttgagttttttgttgtcgtttttttgtaattattcgttttttatttattttgtatttttcgtattcgttttcgtttttattcgcgtttttttatttttcgcgtcgtttttgttatttttatagattttattatttttttttttttttttttttcgttcgttttttttttagtcgtttttttatttttcgtttttttttgcgtttttttttttttcgttttttttttgttttggttttttttttatcgtagcgtttttttttcgttttttgggtttttttttcgttcgtttatttttttcgtcggttcggtcgtttttcggcgtcggggagtttcgggtcgtttatgatgggtttcgtgttttcggttgaggttttggtgtttaagatcgggttgaaggcgtcgggattggcgttggtcgaggttattattttcgatattttgtatagttttttgtacggtcgttggcgtaacgtgttcggggagtagtttttcgaggataagagttattacgttagttttaagatagtttttatcgtcgaggtgttggcgtagttttttttcggcggtgagtttagtcgtcggagttcggcgtaattttttttttcggcgatttttattttcgttttggcgatgcgcgagacgcggttgggatattcggtttcgttgttattcgcgttaatttgggttttttcggcgttcggtgtattttagtttttttatgggttaaattaggacgcgagttattaagtagtttcgtagtttattcggtttaaggatcgatttcggcgatttcgtcgttcggtttcgacgttttcgtcggttttttttttttttttttgcgtttgagttggcgggttttcggtatttatagttttattaggcgtgtaatagtagttgatttaaaaagaaggggttttaaatttatttagttaatttgggtttgatttacgaaagtttttatttaaattaagaattttaaaaggtagtcggggttggggagggggtggagggagggcgggcggggagaaaaagtcgcggggagagcgagggagagaaagagagagcgagaaaagttttttttttttaagatgttttaagtttttattttttatttattaattcgtaaataatatttttttttggttttggtatttttgcgcgtcgtttttttttttttttttacgatttttgttttttttttaatttatcgtgaagattaattttatttttatttacgttatgttaattatttaattttttttttttgtaaggggaatttttcggttttttttaaataagtttttttcgtattgagttataatttattgttatagtatttttttagggttaatgaatttagaattagtaatttttttcgaatggagtcgaatgaatgcgattattttaatagcgtgataaattgttcgtcgcgtcgtaatggatatcgtttaattttttttttttagtcggttcgttcgtcgggtatttttttaggtagtttagaggggaattttgtaagatatggaggtcgtttttgtgcgtttcgtcgtttttagttttgtcgtagatgttcgataggggaattttcggggagttgggggtcgtcgcggttttttttcgtttagagagatgatatcggggtttgtttgagttcgggcgtcgttttttttggtattttagggtttgggagtagagagggattcgggcgcgttcggggttatatagcgagcgtagagtttggttagttgttgtcggtgtttttttggtatttttaatatttgttagttcgaggtttgtttttagcgttgattacggttcggtttttttgttagtgtttagagtttggatatatagtgggttttcggaagtcgattaggcgaaagagttttcggttggtttttatttttttgtaggatttggttttagtttttttgtgtataaaatcgttcgttgtcgttggtttattaatttttaaatttattcggggtagaggatggaagaagttgcgaatgttttgagaattcgcggagagattaaaaatttatttttaaaaatgatttttaacgtattattcgttttttagggtacggagggtttttaggttgtaaatagaggagaggtcgttgagttttcgtatattcgattttttttatattcgggtggtttttttggatttggggtcgatttgggtttggttggtttgggtaggatcgaagtcggggtttcggcggggaaggaagggtcgggtttcggttgtttcgggttttgatcggtttttttggtttcgtcgtcgtagaagtgtagaagttgtttagtttggtgttgtttgcggaggtgattatcgtttagagttttatttttggcgagggtttcggtattttttttaagacgtggattaaggcgggaatcgagatgggtttttttatcggtcgcgtgatcgtttcggagtacgtggatatttgtaagaataataattttatgtgggaggtacgcgcgggttggggtagaggggcgtaagggtcggcgaggggcgttggtcgcgggtaggattcgggcgttcggtcgtcgtcgtttttattcgggttgagagcggcggatatttttggtttggacgttttttgagtcgggattttaagtcgttcgagtttggagtttatttcgtttttaggttttttttaattcgtgtcgaaaattcg

SEQ ID NO: 6518 - DNA, 1434 bp, Artificial Sequence
  Description of Artificial Sequence: Synthetic polynucleotide
tcgggtgtgcgtttttttagggtttttattgcgtatcgcgggttacggtagattattttagttttcgttttgttgtgtaggtgttaggagtgtcggttggtttttttttttttaagtaaggttttagggtatcgcggttgttttgggatcgtaggggcgtttttagttttttatcgatgtttcgacgtttttttggcgttggaggttttcgcgagtttggttgtttttcggagtttgttttgtttgttgggttttaggcgacggtttaggttggttgggattttcgaattatcgcggaaaagggttttagtaggtaggacggcgtcgtttttttgtcggtaatttttgttttaaagcggattttttgcggggatcggagagggatgtttcggcgtgaggatgggagaagtttcgggacgggagggtcgcgggtcgtgtttttagttggagttttcgcgtcgtcgtcgggtattttatgatttgggggtggtggtgtgttcgtttttttatgttattttgattttaatttttgggcggattggagtttgtagatttcgttgttagtagttagggggcggcggggagtcgagcgagaggaaaaatttatttattttttgggcggattgcgtcggtttcgttcggtcgagtttcgtttttcggtcgcggttttcgcgcgtagttcgcgtagcgtttagagtcggacggcgtttttcggtggcggcggaggagttcggagggacgtagtcgggtaaggtagggcgtagggcgggcggcgcgaggcgtagggcgcggcgggtagaggttatttggttattttttttggcgttcggggaaggtgcggcgatggtcggggcgcgcggggcggcggcggcggcgggcgggcggcggcgggtcgagggggcgcggggatatagttaggcgtttttgttcgtcgcggtgttcgtcgtttgaaggtcgtttgggcgcgggagtcggtgttagttcggagcgggcgttggaggtagttcgaggcgcgatgtcggtgtcgttgtttaagatcggggtcgtgttgagtattatggttatgattattaattggatgttttagacgttgttttcgttggtgggttttaatattattaagttttcggcggtcggcggcgggacgttggatcgtagtatcggcgtaagtgcgttcgtcggtcgttttggcgcggttttttttttttttttttttttttttttttggttcggagtttcgggttgggcgggcgtcgcgcgggattcgagtcgtttagggaggcggcggggagtagggcgggtaagggtaggcgtcgcgggtcggcgtagcggtggcgattttgtttttcgtttttttagtttgggttattttattttcgttcgcgcgtttttggggcggcgtttttttcgtttgggtttttcgtcgcggggtcg

SEQ ID NO: 6519 - DNA, 5053 bp, Artificial Sequence
  Description of Artificial Sequence: Synthetic polynucleotide
tcgcgggttttttgggatttttgcgatttcgtcgacgcgcgttcgttttttttcgagtttcgcgattttttcgtttatcggggaaggagattttagcgtcgttgttttgttttttttgaacgttgtttttgttcgatttggagtcgtcgcgggagcgttttatgttgcggaaatattgtttttagcgttgtcggtcggcgtttttttttagttttttttttttggttcggcggttttggaattaaatttgggggcggggcggggtgagcggtcgttcggttttgcgggggtttttaaggtcgcgggcgggagggaagtaggggcgagcgttgatttgtattacgcgtatgtttaggttcgtttcggacgagagttgttcgcgtacgtggcgcgtcggtttgggcgaggtgttgtaagcgttttttagcgtttttagttgtttggcggtgatggtcgtgcgcggtcgtttggtcgtggtttcggtttttgcgcggcgggcgagcggtgaggcgcggtagttttttcggtttcggtcggatttttagtttttttatttcggtcggcgcggggacgtcggggttttaggtgtttatttttatttcgttttataggtttttcggaaggcgcgggcgttgggagcgattggtaaaaacgggtagtattcgggttggggtggagggggcgtcggcggagggcgggttttgtcgcgggggcgggggcggcgttttttttaaaatcgtatttttacggcgttttcgtttttagttttggtttttttttttaagtattttgattttttcgcgggtttttttttattttaagggtgtgggtatggtttagttttcgcggttaagaatttagggcgataatttcgattaggggcgaaaagtcgtatatttcggatcgaacgaagcggttcgggacgcgggtttgttcgtgatttcgtcgttttcggtttcggttttttgttgtttatatcgttttagtttaggtttttttagtgagcgtttggggagagaattttttcggacgtttttttgggcgtggttttagttttattttttttagattaggaaaggtgggagcgtcgttttttcggttgatttcgttgtttggcggtttcgtagttcgttttgtatacgagtcggttgttttttatgaggtagaattcgtcgttcgtggttagttgtcgtttgtatacgacgtaggtaaagtagtgtaggtggtatacgaagttttgggcgcggcgtattatttgcgtgggcgggatgtttagttggtacgcggcgtatttggtttcgaagcgtttgcgggacgtatagggtcgggtttagcgcggaagcgcgaggtttatttcgtttcgagcgggttggagagaggtaagcggttgtttgggaaggcggtttcggaggaaggttttgttcggttttgtagggtggtcgttagtttggtcgtcggggtagagttgtttatttttattgagaagggaattttaattttagaaagatttcggggagtttagtcgttattgtttgtaggatttatgttggatttgggaaggtgaattcggagggagaggatttatttggggttagttttttatattttatagttggagttatgaaggttattgggttagagtcgttgggtgttagtattaggaattaaaatattattaatttcggaggaattaagtttagtagaattttataaataggggtgtattttttttaatgattgtttttgtgatttaggtaataaattgtttttttttttaaataatatttgttgatgttttagttaggtttagttatttagggagtatttatggagaggttttatttttaatttggttaggttatagggtgttttgtttgggtgataggagtgggttgggattgcgagagacgtaggtttcgagggtttggttttggtgattgtgaggggaggagtttttggggtaggcgtgtttttcgtttttatattgaggtgaggtttcggggtttatttgaaaaagtcgtttttgtagtaaacgtttttttttcggttgaagtagcgttcggttagtggcgtgtggtagtcgttgtatttgagatatttgttgtgttagtggcggtttagagttttgaggatgaagcggtttaggatgtgttggttatagttagcgtatagcgggatttttgtgggtacgaggaagttttgggttatttcgtagattaggaggtagtgaagttatttttttattttaacgcgagttagtttttttttcggtttataggatttagggttgtcgaggggtttttttttttttatatatttttttttttagttagtttaagtggtttcgtaagtttcgggagtgtgtaggtatcgtattttatgttaggagttaaggggaaattgatatcggtttaaaaatgtgtgtgagtaagaaagtagtttaggttattttacgaggttgaatatttaattataaaatgttgttagtgttaagaagggtgtatgtggagtttaaatgaaaattttattttagggggatttgttttttgaagttcggtaggaaatatagggaaacgggtttttattattatttggagttggggtattttatcgggttttttttatgttaagcgttatggttattttttttagggatttttcgtaaatgtggttgttttgtttggtggttttgtttgtaggttttcggggtaaatattaatgttttttttattattgggtagtcgtaaaattatttatgagtggattggataagtcgatttattgtttttgtgttaggcgtgggtgtttttaatatcgttagagttatttaaacgtttggtttttcgttgtttttgttttttatattttatttcggtattgtaggttttttggaggaattatattggggaggtttaagggtgttttgtgggagtttcgagtttgtgagcgggttttttaggtgttaagggttgaggattttttttttatttagaaaaagtttttggaagagaggagtgttcgttgaagggatcgggatttattgatatattgtattcgtttttttggttgtggatttcgtcggttttagtttattttttagtgggtgagagatattaggaaggggttttttcgattttcggcggaaaaaattgggttgcgtttttttacgtagtggcgggaaatcggcgatgaatgcgtttcgtattcggtaaaatcgtagtttcgggtgcggagcgtcgaggattcgttgcgcgttcggggtttttatcgtgggtagcgatcgtaggcgaggattcggttcggagcggggcggttcgataggtcgatatagcgcggatttagtatcgcggatcggatagcgtttcggtcgtagttcgtcgtcggcgttcgcgtcgggtaaaagtcgttttagtttatttcgcgtcgcgttcgcgattttagttttacgttgtatggcgattttagttttggcgggggtttttgtgttagggatggcggggtcggcggagtttggacgttagttcgttcgtttcggttagttttttcgagcgcgggcgcgtagttttttttttttttttttttttttcgttttttagttttcgcggttaattttttttaggaatcgtcgaaaaataaataaataagtagggaatcgcgagtttttatagtttggatgtaatttttttttcgtcggtcggttttttttattttttattggtttcggggtttttttttttattttgcggttttagttggttcgggagtcgaggagaattgtttaggttttttaagaattaaagtgttgggagttagagtggtgttattaggaagttggggggtttggagaagagaggtttttttttatagacgggttttgagcggggataaatcgagcgggtgtttgtgggcgtagacgttgaaatttgatttcggggagatcgacggtcggagtttagttcgattttggtttttgtatttgattttgtttcgttggaacgtggaaagagttcggttggggcggtttttttggggatttttttgtttcgtggttattgtttcgttattgttttttgcgttttttttagtttagggagttggtttcgggttgtagaggttttttaagtttattttggattttcgagagttttttggtcggagtagcgtagtgttataattttatttattttttgataatttaggttaggggttttgtaataaatataggttgaggcgtttaggcgcggacgtttcggggttttcgcgtttattttcgtttagattttttagtttttgttagttttcgcggttaggttcggaaaggtttgaggattttttggttttttcggtgtagttattcggttcgggtatttatttcggcgtaggttcgtttttcgcgttagtagtgttagtagtaggtcgtttttcgtcgattttcgggtcgggtttagtttttcgcgcgtttttatgggtttcgtcgttcggcgtcgttattttttagtttcgaattttttcgggtttagcgacgttatttcgtaatagtttcgaatcggcgtttaagcgatttcgggtgttgttgggcgttgcgttcgcgggtcgttttggggttcggagtttttggtcgagcggagggcggagcggtcggggggcggggtcgcggggcggggcggggtcgggggtcgcggagattagttcgggttattgcggattttgagcgtttttgcgtcgggatttgcggtgtttagaggtcgtttcgcgtgttcggttcgagggcgggtatcggtaagggagggtttaggttagggtttttcgttagcgttcgtttcggtttcgtagttttttgcgtcggagcggtttagaggtagaggtttgagttggagtatacgttaggagggttaaggttttcgggagaggggtcgagaaggtagtagggttttttcgtcgttgaggtttggtttcgggagtagtagatggtcggcgggagtttaattcgaaacgtagaaggggtgagtgtggcgtcgagggttgcgtatcggaatcgtaaggtgtcggatcg

SEQ ID NO: 6520 - DNA, 6343 bp, Artificial Sequence
  Description of Artificial Sequence: Synthetic polynucleotide
tcgttttttattgtgcgcgatcggaggggtcgttttgtagtgggcgttgtgacgggggcgtagttattgacgttttttggggtaatatttataaataaggtttaaatgcggttcgtttttttaattgcggatattagagggcgtagttttaggattacgtttttatttttttattttattcggaaaggggtttattcgagtcgatttcgtcgttattagtcgggggaggggaggttttggagttttacgcgggagttttcgtcgcgggaattataattacggttaagtttttttggttcgttcgttttatcgtagggagaggacggggggacgggtaggacgggcgtttggatagttgggtttttttcgtaggtgtttttgatttcggtatggaggaagcgttcgcgttttcggtttaggttcgtagttagggttgtttcgttcgttgcgttttaggtaagtcgggttagcgtgggggagtagcggggtttgggttgcggagggggtcgttttgattcgcgtttttttttagggtaaaagtttcgtaaggtagtgtgagttggagtcgttagtttggggattttttttaagatgattcgtacggatttttcggatttgttggtgtcgatcgtgtattaggatattaaggtggcgatttcgggattcgcgtttaagtgttcgttatgtgagcgattcgtggttcggtttgttgagttcgcgttttttaataagcgttattgtcgtagtttcgattttttggaggcgttggacgggtcggttatggagattttgtcggagttatcgtcgtcggagttcgttgtgtcgcgcgttcggattcgcgaagtcgagttacgtcgtcgcgttcgttttaagagtgcgtttcgcgcgttttcgggtttgacgttcgcgttcgtttcgtcgtcggtgttgtttcgtcgagggcgggaggtttagcgtgcggcgcgggtcgaggtatcgtcgcgtcgggagttcgcgtattcggcgtttcgcgtttttgttaacgagttgtattttattaagttgtagtcgtagcggggcggtttcggtcgcgtcgcgtttttgtgcgtcgtcgcgggtcgttgcgtatcgttcgagttattcgcgggtttcgttttttacgtgcgttgtcgtttggatattaagttagacgacgtagtgttttagtacgttattcggggttcgcggttttgcgggtttatcgaggtcgcgtattgggttcgtttcgtttcgtagttttacggttttacggtgttcgggtttcgttatatggcgttgtcgcgtatttcgacgtttagcgatttatattgtgcggattttcgggcgttttattgcgacgggtttttgtttgggtttcgggattacgtcgagcgtcgtagtttgttttttattatttcgtcgggttttatttagtttttttatatagaggagttttaaggttttcggggtagttttgtagttagtttcggtttaattttcgacgtttattattttaggttttattcgttcgaggagttttcggggtttagtttaaggcgtatgggcggttattacgtaggagaggtgcgtatttttttaatttaggaatcgttttttcgtttttattatggggaggttttacgagtttacggtttgttttacgggtttcgttatgttttcgaggagtttcgggtttattttatcgttcgttttttttatacggaggatttcggaaggtatcgcgagcgtgacgttttggttcggacgtattcgtattcgcgtagtagttcggtttgggcggattggggttcgcgatcgtatcgtattttgtaagtggtgtcgttttttgatttcgattcgttgttcgttttttggtacggcggtatcggtattagttcgtttcggttggttatcgatagtcgttattattcgcgtttttgggataatattttggtttcggggtcgcgtcgagaagattcgttgggtcgcggtcgtagttacgagaatttgttggggcgcgaggtgcgggagtcgcgaggcgtgtttttcgaaggtcggcgttcgttcgtcgtcgtgaatttgtttattttttttagacgttacgtcgtattgtttttgttcgagacgtcgttgacggagaagggtcgcgcgggcgagggtttgggtcgtaattggtacgtgacgttcgagattattattattgataatgatttgcgcgttatcgagcgttcgagcgttagggtttgggagttgttcgggggtcgtacgcggttatttttttacgcggttttcgacggttttatttttggtcgttagcggagtttagagtagttggacgagtttattacggatttggttatcgattcgcgatttatcgtcggttaggttttagagttcgcggtcgattgtttgggtttttaattgcgtcgattgttggattcgcggttcgcgggtttcggggttttcgcgttggcgtcgttacgttcgtttttcgtttcggtcggtagcgtcgaggagttcgcggtttcgggagaggcggtcgacgcgtttttcgaatttagcgtcgacgaggacgatttgatgatttgttttaatgcgcgttgtcggcgtatcgagattatgtttaacgtttgtttttattttaagttttgttatagttgttatatttattattgttcgcgtttgtgtcgtcgcgaggattgggacgtttataaggcgcgttgcgtgtacggtcgcgtgggtagcgtgtgtcgttacgtattgtagttttgtcgcgatagcggttcggtgtatcgcgttttttcgcgtatcgcgcgtgtcggttttttgtcgcgcggtcgcggcgtgttttttttgggttttttaagtttaggttcggtcgataattttttgcgttttggtttggaggggttgttgttattttttatttatttatcgttgcgtgagttggttatatacgcggcgtttttgggtagttacgcgcgcgagttggcggtcgttgggcgtttttacgaatcggtagagtgttttttgtttagcgtgttcgtggtcgtgggattcggtatcgcgttatcggggatatcggttttgttcgcgttcgcgttacgtagttacgggttaatagtgcgtaagttcgttaaggtagcgttggcggtcggtagtttcgcgcggtcgttttcggcgcggagtcgcgagttcgatatggagacgttgattttgacgttatcgtcgggtacggcgggtttggattaggacggcgaggcgggtcggcgcgcgcgcgaggtggtttttatttatatttagcgcgagttgcggttgcgcggcgtttttttgcgttacgagttttcgcgcgtttacgagtagttttgcgagttcgtcgaggttaataggcgttttacgtttattattatttattttacggatcggcgtatcggtcgtttttttatgtgtatgattatggtcgttttcgagtcgcgcgcgttcgattgggtggttagcgttaatttgttggacgatattatgtgaggcgtcgggtttattaggtttagtttaggcgttggttcgaattttgttttgtttatttaggtttcgttcggtttatttagggtcgttttcgagtttcgttagggttttatttcgattttttttaggtttcgtttttaattttttagttttttaagtttcgtttagttcggtttttagtttcgtttaggtttttatttttcggtttttcgttttcgtagtgttttttataggtttttcgtttttttatttttagtaatttttttttttttttcgggtttttttttttttttagttcgttttcgaggatttttagaagaagtcggttttcgttttcggtgtttttcgttgggaggcggggtgggtttgaggatcgtcgagttttgtttttattcggaggggttattattgtatagattttattcgtagagattcggttttcgtcggttcgcggggttttcgttggagttttttcgatttcggttttttttcgtttagaagttcgacgtaattaaagtttagtttgttattttaaatacgtttcgtttcgtttttcgcggttgtgttgttttttcgttggagaatattttggtcgatttttgtgcgttcgtgtgcgcgagcgcgtttcgtcgaggcggtgggtagggcggacggtgcgtagtgcgttttcgttggtcggagttagtatattaattacgttacgcgttttgtcgttttttcgtttttagtcgttgtagtttgggttttgtaggagttgggaaaaatcgtagggaggtttttaggtcgatatgtaagttttttagtcgaaggggtaggggatttgaataggggaagtagagtatttgggtttggttagagttgatatttggttaggagaggaaggattaagggacggggcgtttttaggtgggagtttggagggtaaagcgtggtgcgagtaggtgagggagagagttagttggtaagcgtggaagtttattcgagggggtttgatttgtttcgagaggttttcgtatattcgttttggtcgtacgtcgtattgcgggcgtggaggcgtaagttcggcggttcggtttttatttgttttttaagtgtattttggttcgcgtttagagttttttggagggtggggtatgcgggagaggggtggaggttaaacgtaagggtttttttggagtttttagttttatttcggagttaggggagggggtattaagtgagagaaattgggtattttcgttttcgtttttgttttcgtattcggtacgtttatttcgttttcgcgcgtttgtatcggttaggcgtttcgtttgtttattcgtcgtcgcgtttcgcgttttttattttagggtttttgtattcggttttatttttgagggtcggtcgggaacgtttttggatcggaataatttttagggggtaagagttttcgaattaagtaaaatagaatttgaatgtagcggttgtcgttgtttttttgtatcggtagcggggttggggacggaagttttcggtcggtggagaggagaaagggagaggttttcgggcggtggacggggaagagagggagtttttcgggcggtggagggggtggagagcgaggttttcgggcggtggagagcggggaggggggaggttttcgggcggtgggagggggagagagggaggtttttgggcggtgggggttacggggagggtggttttcggattacgtgcgggataggaggttagggttggtaagttttttaggtttttttcgttgttttagtttcgcgggtcgtttaattgtttcgttttaagggtgttatcggatttcgttggagaggaattttttcgttggttggattttattattatttattttcgattttacgttttttttaagcggggttggcggagtcgtaaggcggtaaggaattggattgcgattggttagtacgtgtttcggtcggcggtataattggttgaggcgttgggttttgggaagtatttttcgacgggattggtcgtcgttttcgtagagttcgtttttcgtagtataagcggttttcgggtcgggtgggaggaggggatttcgggaggaggaatatggcggtggcggatttcgtttttatttttgatgtggatatcgatttcgacggcgtttttaagtatgtgttgattcgagtttattcggtttttcgtttcggggtttcggttgtagagagtaaggagatcgtgcgcggttataagtgggttgagtattatggtgagggcgggatttgcgggtatgttaggggtacgtttggcgaggcgggggcggggttggcgggacggagacggggttgacgaggtaggggcggggttggcggggcgggggcggggttgcgggtcgtagcggattgcgttttgtttcgagttttgtttttgttaggtttgatttaggttgaggttttgggcgggaagggcgtgatacggtttgatattttttttagtagttttttagttttcgcgtttttttcggttttattttttttcgtttatttatttttgttttagttttaaggggtttcgttttttttggggaaggggttgtttagagttgggattttagattttttcggttgggagtttttttcgcggtttttaagggcggttagggtacgttttgaggtcgtttttttattttagcggatatttacgataaagtgtcgggcgatatgtagaagtaaggttgcgattgtgagtgtttgggcggcgggcgtattttttattagagttaggataagaagatttacgtgtacggttattttatggtgagtcgtagtttcgtttcgttttgtcg

SEQ ID NO: 6521 - DNA, 1089 bp, Artificial Sequence
  Description of Artificial Sequence: Synthetic polynucleotide
gcgggaaacgtcgttttttttggcgtttgagatttggggttttttttttatttggttttttcgttttcgttttagtttcgtgcgttttaggagggtatcgtcgagcgtcgggttttcgtagggttcgggagatttcgcggatcggaggagggataggattttcgagttttgggggcgggaagggagggtggaaggaggaggggagcggggttggggaaagttggagtttcggtatttttttttcgggttaggtcgttttcggggttttgcgttgcgtttttaagtgttgggaagatttcgcggggaaaggtttgaggacgcggtcggttggtataggtgtggcggttttagagggtcggggagaatttatggtttcgaggttgtggattagaaatgtttttgattagaagttgagaatttttggttagggaggtggggcggcggggaggggtcgttaagtcggtttagagcgcgtttatttgcgttataagggagaagaggtgtttttcgttttttttcgtttatcgtcgttacgatgcgtcgcggatttcggcgatttagttcgggtagaagcgcgcgttttttttttttagtttcgtgcgtcggtttttgtttcgttagtttcgttatggttttttatttattttcgcgggagcgtttttgtttttttattttgtattttttttagagtcgcgcgttagtttttcgtttcgtggaagcgtttttttttcgatttcggttgattttcgttcgtcgtttttttcgcgggtgcgcgttcggtttttttttcgttcggggcgggtttgcgtgggcggtgtttcgggtcggcgggcggagtttcggttttttagttttgcgtttcggtggagttcgagtcggagtcggtagaggggcgcgggcgcggacgcggcgtttggcggggttttgggaggttcggacggggttttggcgttgagttcggtcggttcggagcgcggatttagtcgtaggggcggcgatgggtatcgagggattttcgttttcggtcgtttttcgcggacgttagggttgtttgttggtatttgcgcgggtgagtgcggttttttagcg

SEQ ID NO: 6522 - DNA, 1020 bp, Artificial Sequence
  Description of Artificial Sequence: Synthetic polynucleotide
gcgggcgtgaggtttcgttttcgtcgttttttgttcgtttttagattcgcggttcgtttggtcgttttatttggtcgatggcgttggtggtgagtataggaaggttattatagttttaatttttgaggtaatggttgaagttcggcggggcgaagtcgttgtacgaggggtcggtattggtggcgatacggttggcggcgttggttgttagggtagcgttggcgacgttgacgtcgttggtattgggaggttgtttttagttagaggtattaggggggaaggtttcgtagtggtaatgtagcgggggcgttagcgtgaagatggggttcgaggttatgtttagagttacgaagagtatcggtaggtagtagaggtcgagttgtagttgttggtcgtcgtttagcgtttttatttgggcgagtagcgttttaaagttgagggggtttgggggtacggttagcgataggttgttgtttagttcgtcgtcgttcgcgtttttttttttttttcgttcgcgttttcgtttattttgtagttgtttcgtgggtatcgtattttcgagggtttcgatttgttgttggggggtagggggtggtaggagaagggtgaagcggaggaaatcgtagagtaagggtagggggtaggtgggagggagggttaggaaggtagttaggggcgagggatgcgtaggaggaaaatgttagacgtttcgcgggggcgggggtgttgggagaggatggcgtcgttatttggggttcgggtatttatttcgttggaggtgggggtgatttttatagtgttgtcgattttgtcgtcgttttcgttattgggttcgggggtttcggtggttattcggggagttagtttgtcgatcgtaggggttttgtcggttcgcgtcgaaaggatgcgttgttttttggtttagttgcgcgtcggttgttcggatatagatagttcgaagagatttcgttttgtagttttgtagtcgcgggcgtttttttggtttttgcgatttttgcg

SEQ ID NO: 6523 - DNA, 6343 bp, Artificial Sequence; identical to SEQ ID NO: 6520
  Description of Artificial Sequence: Synthetic polynucleotide

SEQ ID NO: 6524 - DNA, 1109 bp, Artificial Sequence
  Description of Artificial Sequence: Synthetic polynucleotide
gcgaagttatagtcgtatagttaggggttttcgtttagacgtagggagcgtagcgcgggtagcgcggttagggcggttacgttgaggttgcgtaggttgttgtcgttgagttttagtatttgtagcgattttagggtttcgaaggcgttttcgtgtacgtttattaggttgttgttagttaggttaagttttattagtttttcggtcgagcggaaggcgtcggcgtttagttgggttaagttgttgtagttgaggtcgaggaatacgagtttggtcgagtcgttgaacgtgtttttttttagcgagcgtagcgagttgtttttgaagtttaggtagattaggtcgtcgtagaagatgaagaagttttcggggattcgttggatgcggttgtcggttattagtagtttgcgtacgtttagggggaaagggtttggtacgttgggtagttcgcggtcgcggtagtttacggtgtgcgggtcggtgtaggcgtagttcgcggggtacgcgtgttcgggcgcgagtagtagtagaaggttgtagagttcgagcgtcgcggcggcgtaggttggggttcgggggcgtatggtcggggggttcgcgtcggtcgcggcgagaaggaagcggttttcggagcgagttttggcgcgggacggcgcggtgaggtattggttgtcgggcgcggggagttagagggcggttcgggcggggagggcgtgcgttcgggcgtgcgggggcgatggagcgcggcgcggacggattggggagtcgggatagtagggatggagaggggaggggcggggagggaggggcgagggatttattaaagggtttattcggataggaaattaattcgttagaaaaattttttgggagaggcgggagcggtaggggtggtcgagtggtcgtcgttaaaacgcggttttattttggtagttgattttcgagatttggtagtaagacgtcgcgcgtatcgggcgggttgtattcgacgtttaagtttagttattaagtttaggagcggtttttttaaggcgtgtttcgggcgtgcgttttgttttttcgcgttcgtttggtgttaaagtacgttttttgtacgttattttatgtcg

SEQ ID NO: 6525 - DNA, 1109 bp, Artificial Sequence; identical to SEQ ID NO: 6524
  Description of Artificial Sequence: Synthetic polynucleotide

SEQ ID NO: 6526 - DNA, 1384 bp, Artificial Sequence
  Description of Artificial Sequence: Synthetic polynucleotide
gcgggagtattagcggtttacgtcgaggaagataggcgtttttttttggggtgggtagcgtaggtttggtttgcgggtggggggtggagagtgagaggtacgcggggtattagtttagtttttttttggggatttcgtattcgtagtttaaggaatcggtggagtacgaattttatttttgagttggcgtaagcgttttttttttatggagatttatttcggtttttttttgaggttttttttttaagtattttttttttcgagtatttagtatttttttaattttagtacggttcggggtattagttttttagggcgggggttgttttatcgtttaagggaggggatagagggtcggtttcggtttaggcgatttttgtttttcgttaggggcgttattttggttttttttcgattgtcgttcgtcgttttcgttttttcggggggtgtgttttcgaagtacgggggcgcgggaggttaagggtgtttttagttttcgatcgagattttttttcgagtcggcggcgaatggtaggttttatttaaagagtgtttggtggcgcgcggtgttttttttggagtagttttcggcgttcgttcgtcggggtttcggcgatcgttgttttttttttttttttttttttttttttttttttttcgtttttttttttcgtcgtttcgttatcgtcgcggttagggttggaggcgtcgttgttatttttgtgtcggaggaatcggcgttgtcggtgtttgggggtcggggcgcgggcgaagtcgggtcgcggaggatataataggtagagtcgggggtgttcggtcgcgcgtttttcgcgtattatgtagttttttgttatttttttcgtttttaggttaaaattttgagtatgatggaagataataagtagttcgcgtttcgtatcgatggggcggtttagtcggttagttaggaggtgattaatttgcgagtcgaatttacggttattaatcggagattggcggaattgagcggcggcggcggtttcggttcgggttcgggagtcgcggttagcgtttcggcggcgggggattcggcggcgacgaatatggagaatttttagtttggagcgtaaggtaggatcgtttcggcgtttagggcggaggaaggcgagtagagtacgttcggtttcggaggtggtcggggattcggggttttttatattcggggcgaaatcgttttgtattttggtttgtaatttttttcgttcggcggtggttatcgttgtttttcggttgggagttgtaggttgttgttatttacgaaaattcgagcgtagtgtgtacggggttatacggttatatcggtttcggttagtttgagcgaggcgtagtcggcgggtttttttcg

SEQ ID NO: 6527 - DNA, 1384 bp, Artificial Sequence; identical to SEQ ID NO: 6526
  Description of Artificial Sequence: Synthetic polynucleotide

SEQ ID NO: 6528 - DNA, 835 bp, Artificial Sequence
  Description of Artificial Sequence: Synthetic polynucleotide
tcgtgaggtcgtgtgtgagtttttgcgtgggtcgtgagtgcggtagggagcgcggtgttcgggggtcgtttgtcggtgtgtttgtgcgtgtttgtgcgttagtttttgtttttgcgagtgcgtatttttaggatcgagtttgtttatatgagtttgtgtttgtgtgtgtgcgttttcggttttgcgtgtgtttgtgagcgtttgtcggggcgcgtgtgtgttcggaatttcgcggtggtgtgcgggtgtgttcgtgtgtttgtgtacgtgtaggcgagcgtttttatttgtgtgtgtgtatttgagtttgggttatgtgtgatttagggattagtttatgagtttgtttgtgtttttgagtcgatatttgtgtgtgatttagggacgagtttatgagtcgatatttgtgtgtgtttgggtgtttgtgtcgtggtgtgtttttgtaagcgtttgtgtttgtaggtgttggagtgtgtagttgtgggaatgagtgcgtgtgagtgtgcggaaggggtatcgcgcgagggagcgtcggtgcggaaggttaagcgagttcgcgttttttacggacggtgtcgttatttttttttttcgtttcgcgttatgtgtttttgtgtgttcgcgtcgtcggggtcgtttttgggtttcgggagggggttgagcgagcggttttttttttttagggatttcgggttcgtcgttagttttgggtatattcgtttttttttttagcggtttcgttcgttgatttacgggtattcgatgggtattcgggaggtaatggtcggagaggatgggtagttagcgggagggattgagtggcgtcggttttacg

SEQ ID NO: 6529 - DNA, 2248 bp, Artificial Sequence
  Description of Artificial Sequence: Synthetic polynucleotide
tcggttttcgggcggtcgtttaggaggagatttattcgttgggtttttgatcgttttttaggaaaattttaagtacggaaattaagttcgatatcggtttcggtattttttttacgtcgttggtagtttaaggttcgttttgaagaagagttgtagaggaggaaggtggttttggttcggcggagttcggttcgtttggtgttaggcgttggtgttggcgtcgagtgaatttaggcggtttaggtgttcggtttggtggcgggcgtagggtttgcggtgatggaggtttcgttttagttcggttaggtttagttttgtcggtcgtcggttcgggatatgcgcggcgtttaggtttgtagggtgttttgggcggttataataaagttaaagatcggagtaagagttttcggcgagaagagacgcggagaagtcggagtttcggaaagtcgcgcgtagtttcgttagtcgtcgttagttgcggaggaattcgggttaattttaaaaatcgttggcgtttttgggtcgtttgttcgggtcgtattgggcggtttttatcgttttttttttttatttgtattgttttaggcgggagagaggttttggtttcgagggattagttgtagcgggtagcggggttttgtttttttaattttcgttttatggtacggggttgaatcggtattatcgaggttaagggcgattattaggagagaagatcggttgttttcgttatgcgaatttgtgttttgcgatttcgttgcggttgttcgagttatgttagaggtggggacgaagggttcgcggggagtgaggtgggtagaggagagaagttggcgttttttttagggtttttattttgcggagaagttcgatcgtagaattcggtcggttgcggtttatgttggtagttatcgcgaaatgcgttttcgattcgggatcgtattggaaattttcgttatattgtgttaggtttgattttttaggagcgcgttaagggtttttcgtttattgcggttcggcggttttttttttaataagtaaggttcgtgatttcgattttggaattttgtttttatagggaggagtttttggtggttatcgatcggtttagtagttcggagagaggttaggaaaattttttcggaacgcgttgggaggtttttttattttcgttttttttcgggcgtacggagattttcggttttagggagcgtttatcgattcggatgacgtggggtatttcgcgcgagttcgggatttagaaggcgtatacgaggagttcggtttagtatttttaaattagatttcggaggcgtcgttagggagcggttatcgttgggcgtcgtcgagcgtgttcggggcgcggtcgtggcgggttttttggggcggtagttttaggcgcgggcgcgtagtagtttcgaaggcgtcgtttggtttagtcgttcggttttcgagcgtcgttgtaagtggggggcgtttcgcggcgtcgcgtatattttattggggggtcgtttcgtcggcgttcgtttcgtttggttgtcgtttacgggttgttcgcgagcgaggtttttgggtttcgttcggatttcgttcggattcggtttcggtttcgattcgcgtcggttcggttttcgcgcgggtttttatttgtttcggttgtcgggttttggcgggcgggttgtacgcgttttcggtcgttttttttttagtcgtcgtcgatgttatcgttcgggttcgtataaagtttcggagtggagttgtacgcgcgtatatttttttttttagtttttttttttgcgttttgtttttcgtttttcgcgtcgttcgtcgttcgcgtttttttcgcgtattttttcgtgtatatatattttatatttatatttgtcgaggcgtatattcgcgcgtttatatttgcgcggggggcggggaaggggattttggttttattgtagggggacgttcggagaacgaggatttttttcgttttttagacgtttttattcgtttcgtcggttttagttttttttattgcgagggtacggagttcgggagttaggcgtggagcgcgagagttggtatcgcgagttgggagacggcggtagtttagcggtcggattagttggaggagacgcgttcgtcgggagtagcgagatcgggagttcgtcgtttgcggagtttggtttcgcggtttttacgcggcgggcgttggttggacggcggtggtagcgggagattgattcgggaatcg

SEQ ID NO: 6530 - DNA, 3541 bp, Artificial Sequence
  Description of Artificial Sequence: Synthetic polynucleotide
tcgcggggagtaggggtcgcgttatgcggcggtcggtttgtagtagggtagaagttttttttcgtttgggtgtgtgggagcgtagattttttcggcgtggtcgggaattaagtcggggttcggatgaaacgaaacgaaaaatgaatattcgaattttttttgttagttttttttttttttttttgtttttttttggggggagggtagggtagggaaatataaggggaaaaataaattaggttagattaaagttttggttattttttgtttttatatatagacgcggttttcgcgatttttttttcggggtttcgataaatatagtatattgcgatttaaattaagggcgcgggcggagttagaaggattttaggagtcgagaggttttacgaataaataaaaatcgtaaaaaattaagttcggagaaaggggaaagcggggtggggcgtatttttataggagagaagaggcgtgtagcgaataaagtgatagttttttattttggattcgtaggtttaggagtttacgcggggagaggggatggagaatttttttcgtttcgttttttttttcggggaatttttaatttcgtattgcgttatttgtcgttttggggaggtcgttgtcgggattcggtttcgaatagttcgggggggtaggggcgggggtcgtcgaggggatgggggtagagagtaggcggcgggtaggatgttcggggtgagttggcgagtttcggattttcgtttttttttttcggggttcgggcgacgtagtttatcgggttgttttcgtcgtttatcggagagggtcgttcgggtgtttggttttgttcgaaagtttttgggtttttttttttttttgtaaaatttaaagtaatcgaataaaaagagtttaggtcgcgcgggcgggttgcgcgttcgcgttttgtagcgcgtcggcgggggttcggttcgcggggttattgtattgagtcgggtagtgtgtggtggtggtggtggtgtagcgtcgtcggcgggggcggtgggggcgcggagggtggcgatgcgtcgttttcgttaggttttagttttttaggcgcgtatatatcgtttatgggcgggtggttcgcgtcggtcgtaggggttatgcgtttttttttttgtcgtcggttgtagaattagacgcgtattatttttttttttagttgtaggttgtttgttaagtcggtgatttcgtgcgtcgagggtttggggtatttgagaaagtggttttcgagcgcgtttttgatttttatttcgatggacgtgcgttttttgcgtttgcggttttgcgtcgcgattttgtttaggttggtggggttgtcgttggacgagtcggttttttttagttatttgttgagtagcggtttgagtttgtatatgtttttgaagtttagttgtagggtttcgaagcggtagatggtggtttgcgagaatacgttatcgtagagcgtgtttagcgttagttttacgtcggtttgcgtaaagtttagtttgatgcgtcgttgtttgaattgtttggcgaattgttttaggtcgttcgagttgggcgtattttcgttcgagtgttcgtttatcgatgagtcgtcgtcgttcgcgttcgggtgtaggtgcgtcgtcgtcgcgtgtaggtcgttcgcgtgtgtatgttcgtgtgcgtgttcgtgggcgtttagatgcggcggcggcgacggttttagttgcgtttcgtggttattttcgtgtagcgcgtggtgtaggttcggtttcgcgtcgttatcgttcgtcgttagtatttcggttaggtcgtcgtcgtcgtttttcgggtaggtcgtttgcgcgtatagttcgagcggttggggttggtggttttcgttggtttcgggcgagggcgatatggtcgggtttaagtggtgcgttgtgttgttttgcgtttatgtcgcgttcgcgtgggtcgttttttggtgtattaggcgcgcgtggaaattttcgtcgtcgtcgtcgtcgtcggttcggtcggtgtcgtcgtcgtttgttttgtcgtgttttaggtgcgggtcgtcggtttaatcgtcgtcgtcgttttttttcgtgggtagttattgggggtgcgttaggtttacggggtggttcgcgttcgcgtttagttattcgtggtgtattagtttttgtatttcgcggtacgcggtttttgtatgtaatcgtttcgcggtcgtcgtcgtcgtcgtcgtcgtcgtggcgttcgggtgtataagcggttcggtgttttcggtttcgttatcggggtttcgcggtaggtattgcgcggtggtggttatgtcgtttcgcgttttgcgtcgcgtcgtcgtcgtcgtttcgtttcgtttgcgggtttcgtcgtttcgtttcgtcggtttaaagtttcgattcgttcggcgtttcggagttttatttcgttcgtcgtttattggttgttcgcggagttgtttttcgttttttttgttcggttttcgtttcgcgcgttcgttcgttattttgttcggttgtttagagttttttattgggcgtcgttttcggggtttcgcgcgtcggtcgtgttgattggtcgttggggttttatttacggtttttttatcgttcgcgtatatatttacgtttcgggggcgcggtcgttacgtggggagtggcgcgggggtggttttgggatcgtattttttttcgttttggttgtgtgggtttcgtttttttttagcgttggagatttcgagttcggtcggttttatattttacgcgagttgaattttcgttcgtatttcgttcgggtagtagggattgtcggtttcgggaggcgttcgggtttcgagaagcggtttagtttcgcgtttttttttttttagtatcgttgtcggcggattaggattttcgcgggttttggcggttgcgagcgcgaggcggcgcggattcgcggttcggtttcggcgcgattgtttatcgcgttcgtttcgtttttcgcggttgttagcgtgtattgggcgtttttcggcgcgtttgttcggttcgtttcggtttttttttttttttttttagttttagcgttataatttcgtcgattttttttgttttgagagcgcgttcggtgcgggcggagtcggacggattttggttttacgtttcgcgcgggtatattttttttcgggtattgaggtttaggtgagtatcgcgcgggtagttggggttgggacggcgggcggtagcggttttatagttttacgcgagtttttggtattcggtcgcgtttcggggttttagaaggagaagatttcgaggtggagattgtggtttcggggaaaacgttgttggtaagggcgttagttgggggtggacgttgggtttaggggtatttgatttgcgtcgttgtagttttttcgtttttttttttagtttgaacggtttatcggttgtggtcgtggtgggattacgtttcgggagaggagaaggatgggtttagggaaggggttcgggttttttagaaattcggcgtgtaggtcgggagttgtttagtttcg

SEQ ID NO: 6531 - DNA, 1513 bp, Artificial Sequence
  Description of Artificial Sequence: Synthetic polynucleotide
gcggggcgggtcggggcgtcgttgcgggacggtatttaagggcgcgcgttgcgtgttgttttcgcggtttttcgggcgttatcggttcggttaggtttcgggagttgttcgttttaggtcgcgggggcgtttcgggttcgtaggattcgaaaatttttttttcgggtcggggcgggtgagtaggcgggcgttgggttgcgttcgacgtttttttaggtcgtttaggagagtttcgagggttgggagaagtcgtcggggcggttgggttggacgagcgagtttaggggttaatcgtttttattcgtcggtcgcgttgtagagcggtgtttttagggttggggtttgcggcgatttcgttgggaggaagggagagcgagaattgagacgtttgttttaagttgtttggagttaaaggttttcgagagcgtggtcgtggggttgggtcgttggagtggtcgtttcggtttagatattcgtattttcggcggtgcggcggtttttacgcgcgtatttatttagcgcgttcgggggtttgaggtcgtcgttacggcgtttcgtttcgggtagtagtaattagtacgtaggtatttttggaataggcgggattgttttttcgacgcgcggtttgcgtttaggcggcggaggggtttagtttttttttagttttcggttttagggcgtagggttacgagttttcgtttttattttcggtttttggtattcggcgtcggtttcgtcgtttttttttatacgtatttttggtagggtttcgcggggcgttttaaagtttgggggtagtttttaggtgtttttgggaagggaaagaaaggttataaagtaaaagaaggagtaaagagaaggcgagggaggagtaggggttcgggttttgtggattcgtttgggttgggagtggggatattgagagggttgcgaaggtttcgggggtcgcgcgtggttcgtaggtttatttttggttcgcggttgttttttttttttttttttgggtttttggttttttttagtgttgttttttttttttttttttaggtttttttttttttcgcgtagggtttcgttttggggattaagagaaaggagggaggggaaaggggaggggaagggaaggggcggaggagaaagagggacgatttttttaaaggcgggtgttgagttttagtttaggattttcgggtttaattgtttgtggtattttttatattttttattttcgtttcgttttggttttgttttagttttcggcgtttttttttttcggatttcgttgtatgtttcgtttgcggtggttcgatcggtttttttcgggagttttttttttttcgttacgttttcgttttttcggtcgttttcgcgtttttcggttttttttttattagttttatatttgttttttttatgggagggagcgcgcgtttttcgtttagcggggtttttagtagagtttttttaattttcggcgttttttttatatagggttcgttgggtcgtttttgcg

SEQ ID NO: 6532 - DNA, 3541 bp, Artificial Sequence; identical to SEQ ID NO: 6530
  Description of Artificial Sequence: Synthetic polynucleotide

SEQ ID NO: 6533 - DNA, 558 bp, Artificial Sequence
  Description of Artificial Sequence: Synthetic polynucleotide
tcgagagcgtaggattattaagagaggtcgggttatttttttcgtcgttcgttgatttttaggggttgggtcggcgtatagtaagggggttggaggtggggtcgtttttttttacgcggttgggtttttaggcggtgttttgggtcgagtcgtttggagattttagattagtatgtgggtgggaaagggcgtttcgttttgggttttttcgtttttgcgcgtagagtagagacgcgtagattcgtttttatttcgtttggtttttttggagtagtttcggcggcggtagcgatgggttgggaggggtcggtacgttggtttgcgcgggtttttagtcgtttttcgttattcggaattttttttttttaagcgttgatcgtcgatttatagtttttttttaattcggggcgagcggggtttttattatatatttttttttttcgttcggttttatttttttttcgtttttttttaggttttacggtttgtaagtatttttgtaaataatttttagtttatttatatcgtttcgttcgtatttttcgagagttaggtacg

SEQ ID NO: 6534 - DNA, 7244 bp, Artificial Sequence
  Description of Artificial Sequence: Synthetic polynucleotide
acgtttagttagggcgtagagagagcgttgggcgaagaggggtcgatggttcgcgggaatagggttggggtttttgtttggggatcggtcggttgttaggtttttcgttttattgttttttcggagcgtcgttgattataggttcgtataggtcgtcgtcgtaggtcggttttttgtgtatcgtcgtagtagcggcggtcgagcggttacgtatgagatcgttaaaggcgtagtttatgggtgggcggaagtcgagcgtgggtattaagtcggtagtggagtagggcgttatgaaggttagatcgcggttgtgcgtcgtcgtcgcggagtaggttaggcgtagggggttgaggtcgagcggcgcgtttagcgggtaggcgttcgcgtcggtatcgaagtgattggcgttgggttgtagcggcgagaaggtcgagcggttgtttagcgagtttagcgttttaggcgttatggcgtcggttagtaagggtttgtggtgcggaggtgcggcgggtttcgtttgtagcggcgtaggtagtttaggtttttcggcggcggcggcggcggcggcggcggcgtcgacgcggttgggttacgcgtcgtttgtagttgttgtagtatttacggcggttttatttgggggcgtcgtagggtttaggtcggtcgttaggtttttacggtggtggtttagtatttgttcgatggtttgtattacgtcgtcgtcgtagttttgtaatattagttttaggacgtttcgtcggtggtttgggaatacgcgtgttaagatatttagcggcgttcgttgtcgtggattcgagttttcgtttagttttggcgtcggcgcggttttatttttttttttgttagtttttgaatcggatttagagtttagagggttagcggagttcgggttgtttttttcgtcgtcgtcgttagggttagcgttgtttgggtagttgttatttgtttttttggaggttcgagttaggggcgaattagaaaaggattcgttatcgtcgtttttcgagtttgagtcgggtcgtatttttggggacgacgtttcgggtttcgagtttgcgtcgtcgggtgataagggttttatcggcggcggtagcgggttgttcgggcggtttgtttgtagtagcgttttaggaaataggttaaatttttgtaatttggtttttgggaggggagaaaacgtgtcgtgaggagcggttagttagaagatagtagttatagtatttcggttttttggattttagtttttttttttttagttttatagtttttatttattaggttttagtgtttttttttttttttgttttagtatttttttcgttttgagtttttatagttttgattttagggttttttttttttttgtattttttagaattttaattatttgtgttttgtaaattcgatgtttagtgttgttttttttacgtttgtgttttaatatttttatttttaattgtttttttagttttgttttgtcgtggagaagtggttaggtttagggtttaaataagagataatataatttttgtttaattacgttgtatagaagagtttattgtatagaaaatgtttgttttggtagtgtagtttgtaaggaaaggcgttttggttatttaggaggttttaagtttttttataggtagaagtatagtttttgtttttaatttattttttttaaaattgagatttgagaagttttttttttttaagtttagagcggatttttttttttttttaacggttttggtttaattttttttttttttataaaaagttacgggggtttagaaaaagagggtggtgttaggtaggtagtaggaagcgaagaggaaaagatataggaaagtagatttgagaaattagggagggtgcggaagaaattagaaggagggagggcgtagtaagcggttgtttagagggcgttaggaacgcgagaaggggaaaagaaattagggcgttttagaatttagggcgttttaaaatttagggtgttagttaaagggggggggattttttaagggagttgggaaggagtagagggaaagggtttgtggagaagcgtagagcgaacgaagatgcgtaggtttttatttggggagaagacgaagtaaagaagtagggatttgtttgcgtttgggtagaggcgagtaaaaaaattaaagcgtgtatatttcggttcgatgtaggagaaaggggtaaagtgtaaatgttttagaagcgggagaaaggagagtttttgtatttacgttttatattcgaggttgggcgagcggtgaattttagtagtcgcggcgattggatacgggggttttattttttttgaatcgagataagtttttgggtttcgtgttttagagttacgattttgttgtttttatttgcggtttggtcgcgtttttatttgagttttttgcgttagttgtttcgttttcggttttcgcgggcgttttcgttttaggtttttcgtcgtcggcggcgtatattgaatcgaagatttcgtaggcgggtttcggggggatgatgtcgttggcggcggttagcgttagtttttcggtagtgtcgtagagtagttgtagttcgcgcgtttcgttttttttttgcgtttgttgtttgcgtagcgttatttgcgtcgttatgatacgttggcgtttcgcgatgagcgtgtatttggcgtataggtagtttttttagcgatagtagcgtttgtggtttttgagggtcgatattacgttatggttgcgatagcgcgcgtatttgggggttcgcgggtatttttcggttgttcgtagtaatagtggcggttttcgtagtaagtcgtttgttacgtttatcggtagcgatgtagcggtcgtcgcggttgtcgttatcgacgttatcgacgttataggcggtttcgtcgttgttgtcgtcgtcgtcgtcgtcgtgtcgggtacgttgggtagtttcgagcgtagttttatgataggatttgacgggaaagaaggtgggagaggggagagatttggtgaggagtatatcgcgcgttaggttaaagcgtcgttttgaggaatttaagttggagagggaaatttgggtcgcggaggttgggttagaggggttagaattgttgggaggaggtgtagtcggaatttttttgtgagttttagtatttttattttagtttggttatggttgtttttagatttgatatatacgttaggggtaagattttgtttgaattagtgatttcgttggaaaaaataaagagatatgtaaagtgtgaaagttattgatttagatggttgtaatgagaatttggaaaagttaagatgatattttaaagtttagtttaattggggtgagacgggtgagagaaatgttcgtttgacgggattgggattagagcgatagttttggtttagaagttaggttgatgttaagggtaaaataggaaaattcggagtaaaacggttagtttggtggaagggtgaagaggagagagatgtgaaggcgtagatgtgaaggtcggttgggtcggagttttgtttttttttgtttgtttatttttaatgtagtttggggtagaagttttggagagaaaaattaataatagaaagaatagttttaggaagtagagtgaggacgaggaaataatttgggtaaagttaggtttagtggttttgggattcgtaaaaatgtgagcgttaaaagttttacggtgagggtttttagagagtgagagataaaatgtatgtggaatttagtttaggattgggaagtattaaagagaaaaattcggttaaagaaattttttgtataggtaaatttagtttaaagatgagttttatgggtaaggaaaatagtgaaaagtagttgatttgggtgttcgggatttaggggtcgcgtttgggagaggggaatgtgtaagaaaaaattttataggtaaatgttgggggaggggattgggtaaaatttgtggtgtagttttttagtttcgtagtttggagtagtagtcggggcggaagacgtattttgcgaaaagttaggtatttcgggagggggatttttttcgaagattattttatattgtttttttttttttttcgggtttagggatagagtcgttagatacgtttttttcgttttggggttttaggggatttttttcgagcgtaggtttttgcgttttgattttagagttggggttttaggatacggatggtttagtaggtcgtattaagttaggggagtcgttttcgtaattggttataaacggatattagagttttttttacgtcgtagttttataaggtttaagtaggtttagtttttcgtttttgtcgcggttttttttgtttttcgcgtttttcgtttttgttagagttcgcgatagagtttttgtgttttcgttcgagagttttagattttttttttatgagcgttgtttttttttttagatttttcgggcgtttttaaggtttacggggtttaggtttttttaataggggtcgtagattaggtttttatttattgttttttttgcggtttttaattatttgttttgggtttcgggatttttttttttcgttggcgttgtacgcgtttttcggttttattggcgacgttggagtttttggtcgtttttttttgttttcggttttttatttgattacgttatttttttttagttattatgttcgaattttcggattttttagaacgtagcgtagtttaattttttttttagaaattcgggtcggaggttcgtttgcgggtcgcgtggttggaattcgcgatttgattttcgtcgtgtcgggttttttcgcggtgcgcgtcggacgttgcgcgtagtcggggtttagttgttcggcgttgttagatttttaatgagtcgttcgttcgttttattgttggtttttagggttttattagatagaattggataataatgtggcgtttgttattggttaggggaggtagacggcgttttgattggtcgggttcgcgttcggggagtttcgtattttgtagtgttcgaaagattcgaaattttaaaagttttattgcgtgtttttgggaggggagggggcgcgttaggaaaggagtggaaaaaagtgggcgaggaggagcgttgaaaattttttgataagtagttttcgtgcgttcgagagcgtgtgaattgtttttaattatcgtgttcggtgcgtttttttgcgtagatttgtgtaatttttcggtttttggggcgtcggttcggttgtatcgtttttattggtttggggcgtttggtaaagtcgagttttttaagtggttttggagttttgaggcgggatggggggtaggtgataatttaattattgcggtcggggtaggggcgggataagggtgcgggggtggggaagggagggtgtttaaggtataaatgttaggacgattttttttgttttttttttgttatgtttcggcgcgtttttaaattcgacgagtttggggtagttgggggttgttttggttttttttttttgtttttttaaagtttagttattttattttaaaagttttgatacgatagttattttggagggtaagtgtggtttatgaagattttcgtgtttaaagagaagtttagcgaagagaaatgagattgtattttttgtcggtgttcgttacgtttttcgcgttttgagtttttttttttttcgttttttttttcgcgttttttagttttttttgagtttttttttttttattttttagtatttcgatttttttttcgtggtggtgggattttttttgtcgttattgtaaatgaataaatagttttttttttttttttttttttttttaaacgaaagtaaaaagtggtttttgtgttttcgtagatttttttaaatttaggacgcgtatcggtttgttcgattttttcggtaagagataaagttattgttgggaggttttttcggatagtttttagttttaattttcgttttattttcgttttgttttgatgttacggttttgaggaatagttcgttttgtagaagaggtaataggttttagattttgttttttttttgaaaggttgttgttttttaaatatttggaattaatgtcgcggttttcgggcgagtcgttttcggtttttgtagttttgattttatttttgtgtttttttttttttaatttttaaagttttgtttttttttttaattttgtttttttttttaatttttaatgttttgttattttcgtttttgttttttattttttttttttttttttagaataaagaaaattcgtttaaataatgaggaaaatgagcgtttttgtcgttttttttttatttttgatcgtgcgtttttgcgttgttttttcgaatttttaggtcggcgggaatttgggcgcgtagattcggttcgggtcgtcgcggttttaggacgtagtttatttcgtttggtacgattattgggtcgcgttttgttagtttattagtttttgagtttaggaatgggggtgggggaaggacggtgcgattaacgggtttttattcgaagatcgtagaatttggcgtttcggaagagttttggaagatgtttatcgggaggttgaggttggagggaggagtgggtgggggtgattcgttggaggatcgggcggagagtttttagaaagtttattaggtttcggcgcgagggcgtttcgatacggataaggtttatgatagcgataaaaagttggttattcgtttttagaaaatgttatttgttggagtttgtgaatgggtttaggagagagaagggtgttagttttcgcgagggtttttcgcgtgaagtgaggataagggagtgttttagggataatatgttttttaggagcgtaggatttagattttattttttaatatttggaggtttcgaggttaagtatgtttagtttcggttgtatttgggtaggtgagttatggggtcgggggaagagcgtcgataatcgtcggatttcgcgtaggggtcgttaggcgtttgtttttagagtttttttggataaagttttcgggaaattttattaaatcgaaaacgaaataaattatataaatttgtttagtttttgagggggcggtggtttaggtatttttttcgtttgaggttaggttatcgtgagatttttttatttcggatcggggatttcgtagaagttaagggtgtagttacgaggattcgggaattcgaggcggtttagtagatgcg

SEQ ID NO: 6535 - DNA, 824 bp, Artificial Sequence
  Description of Artificial Sequence: Synthetic polynucleotide
acgcggattgagcgaggaaatgtttaagattataggattgaatttttcggaagtttcgacgttgtttagttagttagagtttagtcgtcgacgcggatgaagttgttttttcgggataggaagggttaaatggttgcgcgttaattcggtttcgattggggtgttagggagtaagagtcgtttgtttcgggggatttcgtttggggggtttttaggggtcgttttggcgtttcggttataatttgggcggttttgtgcggcggttttcgtttgcgtttttgcgcgttatttaaaattttgcgtatattgtagtcgtcgttttttcgtttttcgcggtgagacgcgcgtcgttaagtgtcgtaggtagttttttatagtcgtcgcggtagtcgttgtttggtttttggttttagattttttttttattgtttttagtttttatttaggaggttttttcgcggtcgcgagagttcggcgttcgatttatagtaggtagtgcgggtatagtgttgtagattattatttcgttaggttcgggtagcgtttattagacggataggcgttcgcggtcgtttttatttcggcgcgtttatttcgagttttttacgtcgcggcgggcgggcgtaatatatttttttatttttagtcgtcgaggattatatttttcgtttagttttttcgatttatttttcggttgtagtagagggcgagcgggtttcgtttttgttttttggggttggtaggttcgtgtggggttagggcgcgcgggagacgtcgcggagttgggtatttcggagaggggatgtttatttttagcggtttcg

SEQ ID NO: 6536 - DNA, 824 bp, Artificial Sequence; identical to SEQ ID NO: 6535
  Description of Artificial Sequence: Synthetic polynucleotide

SEQ ID NO: 6537 - DNA, 1415 bp, Artificial Sequence
  Description of Artificial Sequence: Synthetic polynucleotide
tcgcgttgttagaagtcgacgttagcgagggaggtgtgaagagttggttagaatgattaattttttttttatatttattttttttattatcggtggttcgttgttgttgttttgcgaggaagaggagtcgtgggcgggtcggcgtatttcggtgttatttttgtattcgggtttggttatcgggggtacgttggttaacggtatggttatttatttcgtgtcgttttttcgaaagttgtagattattagtaacgtttttatcgtgaacggttgcgtcgtcgattttagcgtttgcgttttttggatgtcgtaggaggcggtgttcgggtttttgtttatcggttttgcggagtttttcgtagattgggacggcgttgggggtagttatcgtttgttacggggtgggttgttgggtttcggatttacggtgtttttttttttttattgtttcgtggttttgaatcgttatttgtttattattcgggcgttcgttatttattaggcgttgtattagaggcgttatacggcgggtatgttggcgttgttttgggcgttcgttttgggtttcgtgttgttgttttcgttttgggtatcgcggttcggcgtcgcgttatcgcgagtttattattcggcgttgttggtcgtcgcggcgttgttggcgtagatagttttgttgttgtattgttatttgggtatcgtgcgtcgcgtgcgtgttagcgttaagcgggttagcgtgtttaatttttatttgttgtattagttgttcggttgcgtcgtcgtcgtcgtcgttttttcgggcgtttagtacgcgtcgggtttcggtggcgtcgcgtattcggcgtaggtttagtttttgtcgttcgcgttgtattcgcggcgggtatagcggcgttttagcggtttgtcggtgttgttgttttgttgcgtttttttgttggttacgtagttattggtgtgggtgagtttggttagcggtttttcgttgtcggtgttttggggagtgtaggcggttagttggtttttgtgttgcgttttgttcgcgtttaattcgttgttttatacgtggaggaacgaggagtttcgtcgtttcgtgcgtttagttttgtcgggcgtcggcgacgcggcggtcgttgtcgttgtcgttatagtcgtgttcgtagtgttttaggcgtaattgggtattcgcgtcgcgggttagtattggtaatttagtcggggttcgagggaagcggagattttcggttttcgacgtttttgggtatcgtcgttttttttttttttagggtattttttgtttgaacgaagattttcgtcgcgaagttcgatagatcgggggaaaatggggttttcgattttagcgggttatttgaattaaggcgtttttttaagtggggcgttcgaagttattttggacg

SEQ ID NO: 6538 - DNA, 1415 bp, Artificial Sequence; identical to SEQ ID NO: 6537
  Description of Artificial Sequence: Synthetic polynucleotide

SEQ ID NO: 6539 - DNA, 3039 bp, Artificial Sequence
  Description of Artificial Sequence: Synthetic polynucleotide
tcgcgggattagttttggtttttatatttcgttgtagttttgtttcgcgtcgtattgtttttttcggttattgtggggttattaagcgatttgtagaattcgttgaggtttaggtttttgtagttttcgtcgaagatttaaagttagagtggatataaacgtcgtgggtaggatttcggtgaggtttcggtgttttttttgggggtttttagcgttggtttagaagttttagttcgggtttaagaatttgggatttttttcgattttggcgatcggtcgggttattcggtttagggttttagcggtagcgggtaaaattttagtaggagttttttgtcgagggcgtgtttcgacgttagagttaaattcgggatagattagttaagcgcggacggcgcgagagtggttggtagcgttagtacgtagtttgggtttagagtaaggttgggcgtttttagtaaagggcggtttggggttgcgcgggcggcggattgtaggcgggagaagagcgaggtgcgttaggttttggggcgcgtaattgtttagtttcgtgaaagatcgcgtcgtagatggggcgtagttgcgcgtttattcgtgtggattggaaacgtttcgagtcggttattttaaaaatcgggaaataaggcgggtttttttttcgttcgttattttttattaagtaggttgtgcggttttgggggttgattgtttttaagtagttaggttttatcgcgcgtcgcgttgcgtcgaggttcgttttgtcgtagggacgttggtagttcgttgaatatcggtaagagcgttagaggttagcggtcgttaggatttttattaggttttgttcgtattcgtttgtttttttttcgtttggtttgtttttcgtttaattgaaatcgttaatttttttatttttttgtttttattttgatatattttacgttttaaatatgtttcgtttttttttgtttagtttgttttttttttttttgtttttttttttttttttagttattcgtttcgttcgattttgtttttgttttttttattcgttcgttttttatttatttattttagtttattttagttcgtcgattgttatttattttttcgttttcgtcgcgtttttcgttgttttgtttaatttttttttttttttttttggttgtcgttcgttttttttggttttttttttcggtatttcgttgttaaggttatttttgtcgtcggatttcggggtgttgggtttttttcggtcgttcgtttcgtattagcgttttttgtagttcgcgcggtatcggtgtggttcgggggttcgagttgtcggtgtcggatgcggcgcgtttagtagggacgcgggtttgggggggtggtttttgttcgacgcggagcgttgagttaggtcgggtatttgtttttggcggtgtttatcgtattgcgcggtttttgtcgtttggttgggattagaggagttaggttaattgttttttattaagttttaattgtggtttttattaggaaagttttttttaaagggtatagatacgaagtttcgcggattcgtttatttttttcgttgatttatatatattttttcgtttttttttatatatttttatcgtttcggttgggcgaaagtcggagatgttcggttatttcgtggaggttcgcgaggcgttagtcgggcggcggtagggggttgaggcggattttggaggatttagttttgggtttaggttgcgggatatggtagcgtagataaggtgggtgtagtgcggaagtcgagacgttttataggttatagggtgcggcggacggtcgtagagttgtcgattagtttgttaggtttttgtttttaggcgtattttcggatgtcggcgcggtttagtcggttttagtatagggtatcggttcgtgagttcgcggcgttagggggttaggttgtttagggttgtttttgattgtttagcggtgatgatttagcgcggggaagttaagattgttagaagggcggttattatagtgtataacggtagggaggttagtttagtatgagaaataagaatatagttatttcgttttgaggatagttttggtattgtacgattagtcgcggttagattgtgttagtttgtcgtataggtagtattttttttgtgaaggttaggttcggggaggagagacgggttaagattaggtcgtagtttttagtcgatttcgatttgattattttaggttgaggtttagttttagggtttttaaagggcgttagatataaaagtcgcgttttttcgttaggttttagtgtggttttatagttttcggtcgggtttgggttttagggtaggtggtagttttagtttaatttcggtagagtatgtttttttttttttaggtttaattgttttcgggtttcgattggatttcgggtcgtcgttattgtattttttttcgatttttcgttttttattttcgtcgtcgaggaacggtggtttattttttcgttttatattggtttttgtttggttcgggttagcgttaattcggttttcgtggaagtcgtggcgaaaggcgagaggggtaaaaagttgagaaataggcgagcgggagagataagtaggaaggttcgggtgggttcgggtaaggaagaagaagagagggtcgggttgcgcgttacgtttcgcgtcgcgcgttatttttcgcggggttttcgtagaagtggtcgtcgttgagggtcgggtcgggttcgaggttttgtaggtatttggcgggcggtttggtcggttttgggaggtagggttttaggggttcgtaggtcggaaagcgggttagtcgcgggtcgcggggcggcgcggggtgtaggtgaggcgtagcggcgggggttttttgcgggttcggaggttcgtttttcgaggttatataggggtcgggtgtaggttttacgcggaaaggcgcgtagtgttcggggtttatgtcggtttagggcgtataggttttcggggtttcggggttcgcgttgttcgcgtcgtttgtgagcgttcg

SEQ ID NO: 6540 - DNA, 1277 bp, Artificial Sequence
  Description of Artificial Sequence: Synthetic polynucleotide
tcgttttacgtttatttttttcgtttacgtcggttattagagtttcgttcgttgttcgagagtttcgtattgacgtcggttcgcgcgtgagttaagtttgcgttacggcgtttcgtcgttagggtggtttttcggaaagcgagggaatagtgcgcgtagcgtttcgtttagtttcgttttgtttcgtagagtcggcgttgttagggcgtagggagggcggtattcggttttagttttcgtaatttcgcgcgtttttttcgtcgtgggatttgggttttcgcgtcgtttttttgagtttcgagcgcgcggcgggcgggagttaggttgggattggtggtgaggtagggagtgaggagcgagcggagtcgcgtgcgtcggcgcgtagtttcgggtcgttttagttttagtcgggggtttgtggttcgggggaggagttgtgcgttcgcgattcgtcggggatcgtagttgttcggtcggagtgtacgggtcgagtttgcgcgattatttacgcgtgataggtgagtcgttggtcgcgtttcgtttggttttatcgggtcggttattgtaattttttttgttttggtttcgttttagttagggagggttgaggattaaggtgtgaggcggcgttgttttcgtattcgttcgattttgcgttcgtttcgggtttttttcgtcgttttagtcgtcgttgtttggcgacggagtttcggggttcgttttttttcgcgtatcggggtttttagcggcgtacgtacgggttggatatcgggttttagtttttggtgtttagaagggtttaagaatttcggaggaaattgggtttagttgcggaggtaagcgttcgcggagaatcggagggggtttgttcggtttattcgcggtttgaaattgcgcgtttagggcgtagttttattgggagttttttacgtagttggagattttagttttagtcgttcggttttaggtttgtgattttgatagtaatattggtaagcgaagtagaattgttacgttcgagatgaatatttaatttttagttttggggttggttttcgttggattcggagttagtagagagttttttttttttcgtgggaagcgtatttggggaacggaatggttgagataggggacgtgcgtgtggtgtttatttggagggggcgtcgttttggcgggtcgagaggtttttgttgtatttatgtttgtgtgcgtcgtgttttgaagcgatgttggatgttcgtagtattatgggtgggtcgttttttaggggcgcg

SEQ ID NO: 6541 - DNA, 2394 bp, Artificial Sequence
  Description of Artificial Sequence: Synthetic polynucleotide
gcggttcggtttgggttgtttcggtgtagcgcgtttcgtatttggtttcgtcggtttattttcggagaaattttttttgttttgtcgtggtttatagggttgatttttcggtattcgaaacgttagtagttttgggagtttagcggagagtcggagttattttggggttagtgacgtttttcgttgataagaattttaaagttgttttagttttttttttttttttttttttcgcgtttaattttgatattattatttttttattttttaggtatttttttaaagtcgtgtcgggattgtaattcgtttttcgatttagttggggtcgggttttatttagttagttaaggggcgagttagcgatgcgaatatcggtttggggggtacgattttcgtttacgtttttcgtaggcgcgtaggggatttaattttatatattttattttcgaattacgaggaaaaatattttattttttaaaaaaataatttgttttttatataaatcgttatttaaaaatatataaataaggtttaagtataaaatttaattttggggttggcggtggagggaaggtgagggagggggttttggtatacgtttttcgtgtgtgtttgcgcgacggttgatgagggcgcgttagggattttggcgtttaaggagatggggttgtagggaggcggacggagagcgttttaggcgttcggtttcggttttgttttaatcgtagagcgcgttttaaagtcgagggtagttttaggtgtcgttttgcggttttattagttttaggagattagggcgggggatgttaagtgttggtaggcggggaagaggttaagcgtcgagtcgggatcgaaggtagggtagttcggtagagggtaggcggcggttggaggggcgtcgtattttttttgggtcgcggcggtttttatttcgttatcgtcgtcgtcgtcgtacggttgttcgtcgcgaataagtatcggtattattacgcgacgtagtaggtcgggcgcggcgtgtagttcggcggatgttgttaggttaggcgatttcgtcgtttttggagcgcgagcgcgttttagtttgtagcgatgattttggaattagattttgatttgcgtgggcgtgaggcgaagtaggttcgttagttgttcgcgttcgggcgtagataggtatcgttgttgtcggaagcgtcgttttaattttagcgtttgcgttttggagaatagtattcgtcgttttttttttttttcggcgttcgagttcggagacgcgggtttagcggacggtcgttgcgacgagtttggcgggttggtttttaggttgttttcgttcgaggttagggatagtaaaggagatacgggtgggtgagacgtcggattttacgagggtttgttgtttttttggcgcgggcgtggaggtattggttagagggtacgtttattagttcgagattttcgggatgaggttattttttgagtttatatttggatatttattttttcgaatgcggtgattttatttatattatagcggttattagcgggtttgagatcgtgtttcgaaaaaatttatttcggggtttttttaatatgttcgtatcggtagttgcgttggtcgattagtttattataagttgggttattagcgtcggttttttttaggtcgattgtattgtagtgtgtcgaggtttgcggagttttgagtgggaacggggtgggggtaaattcgttaatattggttattttagacggaggtttggagatcgtggtcgtgtttttaggtatggagagggggcggggggtggggtgggggcggtaggtggcggcgcgttttaaattttaattatttcgatttttagaaatcgttagatatagaaattttaaatttcggagtattagtgttaggtagggatttgtttttaggatgtgtcgatcgggatgaatgcgttaggggttcgaggatagggttttcgtttttaagattgaggaaatttagattttgggttgggatttcggtttttcggtttttcgtgggttgggtttttgattttgttgttttacgttttttattttttatttcgtatcgtaatttattacgtatttataagggtagtggtcgcgtttcgaatttagttaggcggcgtaggggtcgggttggggggcgcgtggttttggttttcgtttcggtaggtgttgcgcgttttgttcgggtaaatttagaaggttgcgtacggtgaagtttaggcgtttagaggtggttatggtcgaggaggggaaggaggcgggggtagggtaggttgggaacggaggggcggtcgggacgtcgtttttacggatgggcgtgggaggcgttcgttatgcgttggtagtcgggatattagcgtatttatagcg

SEQ ID NO: 6542 - DNA, 1627 bp, Artificial Sequence
  Description of Artificial Sequence: Synthetic polynucleotide
tcgtggggttacggttacgttgttttgcgttttgggtattacgttttttagttataaggtgcgttggagtaaggtggagtttggggagtttcgggaaacgttgatttttattattaacggattgtacgttcgggggtatgggtttttgggagggcgcgttaggatgcggagggggtatcgattagacgtttttttggttatcgcgggcgtgcgtttggaggacgagggtcggtatcgttgcgagtttattaacggtatcgaggacgagagcgtggcgttgattttgagtttggagggtgaggttttttcgttttcgttttatttttgtgtagtagcgggttcgtttcgtttgggttttttagggtttttttttagtatttttttcgtatttttggggattttagtttttttttttaggtcgcgtcgtttttttttttttttcgtttttattcgttggttttttttaggattttcgttattttttaggtgtggtgttttcgtattaatttagtcggggtcggtattagtttaattattacgaggcgaagtaggcgtgcgaggagtaggacggacgtttggttatttatttttagttttattagggtgagcggtcgaatttagtattttttaagtttcgcggagttgttttaggggttcgagagagggcgttaggcgagtttagtttggtttttgtttatgacgttttttattttcgattttcgtcgtttttcgttagtttggatcgagggtttggattggtgtaacgcgggttggttgttcgagggtttcgtgcgttattttgtgtttatcgtacgcgtttcgtgcggcggtcgaggtcggttcgggattcgtagttacggatttcgcgatcggatgcgcgatcgttacgacgttttttgttttattttcgcgttggcgggtgaggcgcgggacgaaggtagggttttggggaggggtttgaaaaatgtgggggacgaggagtggattttagtttgagattagggtagggttttcgggtttttttaaggtatcgtttttttattagttcgttcgttcgtttaggttttagtttatttttttaaattttttttgtatttttgtttcgattttttaattttttttatttaagttcgatttagtatttttgcggtttcgtattttaatttcgttttttgggtgttagtcgttttttttcgtttattttgttttcggtcggtgattcgttgtggtttttaggttaagtgtttttcgtgttcgggcggttgacgttgtttgaagtttacgcggcgtgtcggcgacgcggcgtcgtggtggttaaggttgggtatttttacgtcgtttggaagttttcggggttagattagtgcgacggcggttggttggttgacggtagtgtgcgttttttaattattacgtcgaggtcgcgttgcggggggttttcggatttcggagtgcgtagtttcggtttttttaggttttaataggtagtttatgggatttattgttacgtcgagaattaggcgtttatcgtgttttttttagcgcgcgcgaagaagtttgggagtcgtggcgggggtttttcgttattttttttcggagagttttttttttttttagattcggagcg

SEQ ID NO: 6543 - DNA, 271 bp, Artificial Sequence
  Description of Artificial Sequence: Synthetic polynucleotide
tcgttcggtggttgtcgcggtttttttcgcgttgttttttacgtttggtttattatgtacgaggtaggtaatttgttttttttttcggggatttatttcggagataagaaggtagtttgttttttgtaatggtttttgttggagtgcggcggggtttaggcgcgagcgggggtacgggcggggagttggtagcgaaggatgcgttcggcgtttttcggcggtcgttcggagttcgaggtcggcgcgggaggagcgttgatttcgcgggtcg

SEQ ID NO: 6544 - DNA, 884 bp, Artificial Sequence
  Description of Artificial Sequence: Synthetic polynucleotide
acgtcggttgtgaaatttattgaagtgagcggcggcgttaggatttttgggatttcgatttttttgtagttcgtatagttaagggcgagggcgtttttcggtagaagtagtaaatcgtcggtaagtttagcgaggagggttgtcggggtttgggtttgggaattggttggtatttagcggaaagggacgtgagttgagcggcgggggagaagagtgcgtaggttagagggcggcgcgtagcggcgtttcgcgaggtttttacgtcgggcgatatggggtgtttgttgtttttgttgttttgggcgtttttttaggtttggggaagcgttgaaggtgggtggaacgagggcgtttgagtgtattcgcgggagggcggagagagggagttgggtagggacggggagggtaacgtttgatggggattggtgagattcgggacgtattggcgcgatttaggtagaaaattcgttgttttttggtttcggggagaggtagcgcggtatagagttcgttggtattagtcgttttttgaagtttatttttttttgttttttttttttttttttttatgttggttgttttttcggttatttgttatacgtttttaatttttatttttttttagtttcgtaaaggttttttttttttcgttgtttttagatttcgtttttcgttaatagtagttggacgcgtatcgacggtttggcgtggttgggggagttgtagacgtatagttggagtaacgattcggatatcgttcgttttttgaagttttggttttagggtacgtttagcgattagtagtgggagacgttgtagtatatatttcgggtttatcgaagtagttttattagggacgtgaaggaattcgttaaaatgttacg

SEQ ID NO: 6545 - DNA, 1007 bp, Artificial Sequence
  Description of Artificial Sequence: Synthetic polynucleotide
gcgacggtgttcgtgcgtttttttattagtgtatgtgcgaggagggttggaggtatgagcgaaagagggaaggtaatttcggtttttaaaaaatttaggggatttttttttttagtataagcgtttatacgtgcgttcgcgcggatatatatatatatatttatatttatatataaataaatttttagtatttgtttcggaaagttttttttcgtaggttggttcgaaggcgcggtttcgttagcggagagtttttggatttatcgtggtattatttttaattaattttgcggcgcggcgcggggagcgtagggtgggttttaatttcgggttcgtttgacgttatttgggaacgcgcggcggcgcggggcggcgcggattcgggacgatttcgtcgcgatttggtttcgttttcgttcgcgcggggttttgtttcgcgggaattaaaggaaggagaaatgttagtatatttttaattggaaatcgagttttttttttagagcggtttgtttatttaggattgggtattagaatttaggggaggttttaattgaagtgacggttttggagattatggggaatatatggttttatcgtcgggttttttatttgtatttttttataaaattgtcgttcgtgtgtgtttttgcgtttggttttttgtatttttaaggggtttttgaagatagggtcgaatgcgcgcgggggttttaggtattttgcgttttacggcgggtttcgtagttcggttcgagtcggttttggaagtttcgttttggattagattggtatcgacgtcgtttttagtttgagcgttgagagggaaaacgagagttagaaaggaaagaaatcggattggtgattgtttggtaggggtgtaatttaaattgttgtgagtagacggtaggagggagttgttaaggtaacgggtgatttttattcgtcgttttttcgttaaggttggggagagggaagttttcgcgtgttgggttagggttaagttcgcg

SEQ ID NO: 6546 - DNA, 2191 bp, Artificial Sequence
  Description of Artificial Sequence: Synthetic polynucleotide
tcggacgcgatcgttcgtagtttgcggtttttggcggttgaggagtcgcggcgatttttggtttttatcgtagtagttaagttcggcgcgtattaatcggcgttgttgaaagttggagagtttttagttcgtcgatagaattcggcggtgggcgttaggggaattttttttagtgtcgtaattaggaaagttttaaaaagtaaggattttagatagataagagatttatttttttttttagtataagaaatatttcgcgtcgcgttagtcgaacgttgttcgtataaggttattcgttttttttggtcgggacgtattcggtgttttttagttttttattagaattggtttagggggcgcggaaatagagaggtaattgtgttcggtttgtggttttagacggaaacgttttcgggttttttggttcgggggataagggttcgaaattttaatagtcgcgagggtaaggatagaattattaattttcgttcggatgttcgggatttgtttttttaagttcgtttcggtttttttaaaggacgcgcggtatagtttatgcgttttcggtattttattttatttttttatggttttttttaaatttttttcggggagttttataaagtatagacggcgttttgaaattcgttaggtattcgttagttatttttattttcgtttttcgaattttttttgtcgcgtttttttcgtttcgtattttttttttcgcgtttttgggaagttagaagtaaattacgagaaaatgttttcgtaaggagtttttttatattcgttttgttattgaaataaaagcgtagggaggagggaggtgggagaggaggcgggaggaaggtttagaaagacgatggggatagtagtaggaaggagttggggaggggggttaaggtggtaagtagagttgggggtttagagttcgttttcgtgtcgcgcggcgagtcgtttatatgtttaggtcgttgtaggtgttgaagaattttatttgattgtacgtttgaatttagtttattatttaggtttcgtggcgggggatggggggtatgattacgcgggcggaggttttgaagtagggggttttgtagcgtaggacgatgggcgaggttttttcgatgcgcgtggggtattggtcgatggtggcgtatatatcgtatattacgatgttttcgcgtcggattcgcgttttgtaggtgatgttttggatatagtttattttgtagttcggtgtcggtacggcgcggcgtggggtagcgcgggggttcgcgcgggtagtcgggggcgttcgttacgtcggtatggcgacgcgtcgttcgttttcggttagatttagttcgtatttaggagcggggagtcgtcgggtatttttggggaagttttttttttttgtagtcgcgcggggttttcgttgtttcgacgttcgtttacgttcgttttttcgtttcggtagggcgcgcggagggtgtatttttaggaggcggcgggtgttttcgtcggttttagcgttcgggcggagggtagggaggggagcggcgttgcgaggaatggtgtttatttcgggtcggagtttttcgtttttcgtcggagaggaggaggcggtagcggcggcggtatggagtcgggggagggcggcggtggtagcgttcggtttgtttgttttcgcggcggtagtagtagtagtcgtcgtcgtcgtcgtcgttgtatgaatttttgtattacggttgtttttcgcgtgtagcgtatttagcggcgggcgagcgggcggtttaagaggtaggcggaggtagtagcggcggcggcggcgatcggagttttcgtcggtttcgtttcgtagtcggattatatcgatatttttcggttcggttgtttcggttcggggggcgttaggaggttgtggttcggggtggagagttttaacggttggagtagtataggacgtgtttcgcggaggaaattggttgtacgttatgagttttgtttttattcggttgtcgttcgggtggggggggggtaatgtgtaagggtgggggtgtttaaagggtcgttagcgtcggggtggggtttcgtacgtggggttgaggcggggcggggttttggtaggtggtgttttggggtgggggtgggggattagggcgggtttaagcgttatcgggtgggtgaggtcgagtagggcgcggcg

SEQ ID NO: 6547 - DNA, 859 bp, Artificial Sequence
  Description of Artificial Sequence: Synthetic polynucleotide
acgtagaggtcgtggtatttggtcgtagttgggttgtagtgcgtgcgcgtttggtttggtggttcgatgggaagttcggggcggggtagtcgcggggcgggggcggggcgtcgcggagataggttacgtttttgttcgttcgcgtaggcgcgttgcgggtcgttagttgttagagttaagcggcgggttggcggcgggtttcgacgtttgcgttaggatttggttggttgagttcggcgtagtagtagtagttagggtagcgcggtttttattttttgttaggtcgtagaggcgagtagggattagttggtcgtcggtttttcgggtaagatggggaatcgggagatggaggagttgatttcgttggtgaatcgtttgtaggacgcgttttcggcgttgggatagagttgtttgttggagttgtcgtagatcgtcgtggtgggcggttagagcgtcggtaagagttcggtgttcgagaatttcgtgggtaggtaagcgcgtagggcgcggagtaaggatgcggtagtggggcgatttcgttgcgggtcgttggaacgtggacgggtagcgggagttagagggtggatggattaggcgttgcggtggaatggggggtagagtggaatggggggtagagtggcggtgttcgtggggcgggcggggttttttagttttgggtatttttcgttttttgttatttttcgtttggtggtttttttgtttgttttttatcgtgcgatataaagttattttttttttgttttttagtcggggagtcgggggaggggttcgtttcgggttcgatttttattttttcggtgcgcgttagtttcgggtagtttttttgcgtagcgcgtcg

SEQ ID NO: 6548 - DNA, 791 bp, Artificial Sequence
  Description of Artificial Sequence: Synthetic polynucleotide
tcggggtattcgtgtgcgcgcgaggattttttttgtagagaatgaaattatcgttttttttcgttcgtggtttatttcggggtttttattttacgtaagtgttgtggaatttcggggtgatgagtttcgggggaagttagtattttttgttttttagtgtcggcgttcggtagagtttcgggatttttagtttttgtcgtcgttgaggacgcggcgcgggttgttggtcgcgtcgtcgagggagggttcggatagttttgtagcgcgttttagcggagttttgggggtcgcgtcgtttttttaaatatgatttagaatcgttcgttagttttggttttagcgtttggcgcgagcgaatcgggtttggttgtttcggtttcgtttgaattttgcgggtcgcgggttagggcgcgtcgggattcgttgcgttaggattttgtagattcggtcgcggtcgggtcgagtgtttttcgtcggggttttacgtttacggtttacgtttgtaatattagggttgtacggcgggttcgtagttgggtttgcgtttgggattcggggttttttgcgtttttcgtgtcgtattttttgttttaattttaagcggacgggttttggggttttatcggttaggtcggagttttagttttataatttttttttttttatcgtattgttttttttgcgttgtggcgggagttggggattggggtcggagaaaggagacgcgtcggtttttaagttttttgagttatttcggtttcgggcgcgttttttagggttgtagtcgcgcg

SEQ ID NO: 6549 - DNA, 586 bp, Artificial Sequence
  Description of Artificial Sequence: Synthetic polynucleotide
gcgaagaggagggagtttcgaaaggagggaaacgagtcggtaaggggcgataggagcgagtcgggaagggagagtagcggagggttgtagagttgcgggcgttcggatcgtgttatatatttttcgcggggtacggagggtattgcggggggagatatataaagatatgcgaagaggggttgaacgaggttcgcgtataaagacgtcggggcgtacggtagttggggttgtatttatcgttttcgcgtcgcgtcgtgtcggggtcgggttagcgagtagttcggggttgagcgcgtggcggcggcggcggcggcggcggcggcgggtaggcgcgggattcgggtcgttcgcgtttttcgggtgattcgggttcggtagtaggcgcgcgcgggggcggcggcgtttaagtttaatttggttttcgtttcgttttttgtttagttcgtcggtgttttttttttttcgcgatttcgtttttttttacgttttttttttcgttttttttcgcgtttagtttcgttttttttattttgtaaaataaagtcggggaaaatgtttgttcgtgtagttcggagcgcgtagttcg

SEQ ID NO: 6550 - DNA, 1678 bp, Artificial Sequence
  Description of Artificial Sequence: Synthetic polynucleotide
tcgataggcgaaattgtaagaatcgggaggggcggttgcggcgtttaggcgcgaggtatatattatattttttcgtagttttttattttttttagacgtacgtgtttaaagagtttttgttttaatcggtttcgttttattttcgttcggtttttagttttgtttgtattgttggttttaagtttttttcgagaggcgggcgtgtatagttgtagtggcggcggtagcggttattaagcgttcggcggcgtttcgttatttatttttttttagttttcggcgttgtagttttcgttcgtcggggagggcgcgtttagcggaataggagtcgagggtggggcgtcgagaggagggaatttcgggtcgtatcgttatagttttcgtagtggtaaaggcggcggcggcggcggcggtagcggtagtagtaggtggagcgagttatagcgtttggtttgaaatttattgttgtagttattcgggttggagttggttcgttgggtggagttagtgttcgtttcggttcgattttcggttttcgggatatttgggttgcggaggtcggttggtcggagttacggttggggacgggcgcgtttcggagcgtacggttgcgttggaagtcgcgtttggggcgtaggattaacgggatttattttttttcggttatttaaagattttttttttcgggaaagagcgttgttcggttttgggatttgggaggagttcggaggtcgttcgggtatttcgttggatattattcgtttgcgtttcggtggcgcgggagggttcggagcggagcgttcgtttttttttagcggtttagtggagaaaagtagagagttttttttggggcgaatgggattttttttttcggtttttcgtggagtcgtcgtatcgtttgtcgtgttggtttcgaggggtttatagtttggtattaatttgtaggtgttcgttgttgatttggtttttttttcgatttgcggacggttttttttagcgattttcgatatacgtttttttgttttcgtcggagggtcgggtttggggtcgtcggagtttgcgggaatttagcgtttattcgttgattttcgagtcgtttcgttagttgtgcgtttttttgggtattagtttggagaggagcgtgtagacgcggttttttggagggagtgcggttttttagggaggtatcgggtttttaggggttttttggcgtgtgtggtgggattggggttcgtcggttatggtttttattttcgttgcgttttgttatatgttgtttttggtgttgtgcgttgcgtttatttttttcgttatttggtacgtgagtaatacgttttggttttttttttttcgttttaatttcgttaaattttttcgattttattttattttttttattttgcgggcgtgggcgaatcggaaggttggattttttgtcgttttattgtttcggggtaggaggtagttcgttgtatttcgtcgggcgcgttttcggtgttttggttggaggcgaggggtcgttggtgtttaggtaggatattttttgtagggttcgattgggcgtttcgggtttcgggcgtcggggagtggcggttataattataattaatttttttttttttcgtttcgtttttttttgtcggcgggaggcgaaggagaagcgtcgtcgtcggtttcg

SEQ ID NO: 6551 - DNA, 1600 bp, Artificial Sequence
  Description of Artificial Sequence: Synthetic polynucleotide
tcgacgatattgttattggaaaagtgttggttacggttttcgttttattttttttatttacgggttcggagtttttaggagtagttagatcgattatcgtttttgtagttttatttgttttcggagagatatttataagttagtttacggagagtttggattcgttcgttttagtatttacgtttttttcgcgttcggttttagcgtcgttttcgatatttattcgcgggtagttttttatcgtcggtattttcgaagcgcgggggcgggcggtttcgtagcgttgcgttttagttcgcgtcggtttcgttttttttcggtttttgtgcgttcggggcgcggggcggtggcggggcggtttttgggggtttcgggggttcgcgttcgtcgttcgaggaggcggtcgaggaggagcgcgaggcggtcgaggtgttgtagaaggggttttcgtcgttgttcgggtcggattcgtcgaatacgtcgttcgagatgtgtaggttttcgtagcgcgcgcgggtagtttcgagtagcgtcggcgttttttttcgcgcgttttcgtcgttttcggttatggtttcggtcgtcgttcgcgcgttcgtttttatagtgttttttagtcgtatacgtcgggttttgggttcgcgtcgcggttcgtcgttttttattagcgtagttcgtagtatagcgttcgtcgtttcgtgttcggtcggttcgtcgttttggtcgtttcgggtttagcgttcggggaagcgttttcggagttcgggcgtcgtaggttgcgggtcgcggcgggaggcgagtcgcgcgcggggttggtaggggcgatttagagcgggcgggacgtagaggttgcggtcgagattaggcgtcgtcgtcgttatcgtcgttattatcgttattatcgtcgtcgttgtgttttttcggcgttcgtcgtttttttgttcgttttttttacggttttcggcgttcggttgtcgattttttcgggcgcgagtcgttagaggcgggttttgtcgttttttatttttcgttcgtcggttaatggggagttcggttcggatagtcgcgggggagttgggcgggttcggcgcggggaacgtttttattttttttcgcggggcggggcggggcgcgcggtcggggttggcggttagggggagggtcgtcggcggtagtgtcggtttttttttatagggacgcgtagttcgggatcgttacgcgtagcgcgggagggggagggcgggatcggggaataggaggggagggggattcgggtgtttttagcggttcgggttcgcggacggagtgcgggtcgatttcgtttattgttttttttcgtagttcgcgtgtagttttagggagttgttcgtttcggtggttttgaattaggcgtcgtcgaaacgttttaggtaggcggcgggttcgaggttattatattcgcggcggcggttgttgtcgaggttttttgggggttattgttagttgcgtcgtatgtttttataaatataggggttgtttagtttttgggaatttcgttttaattaggagttcgtttcgtcggtttattgttggtcgttggttagatgttaatttcgtttcg

SEQ ID NO: 6552 - DNA, 2394 bp, Artificial Sequence; identical to SEQ ID NO: 6541
  Description of Artificial Sequence: Synthetic polynucleotide

SEQ ID NO: 6553 - DNA, 1160 bp, Artificial Sequence
  Description of Artificial Sequence: Synthetic polynucleotide
gcgcgttcggtgttttaaggtttttaggcggagcgcgggcgcgaggtgcgggtttcggggcggagcgtacgttcgggaggcgggaagtgggtagtagcgttttcgtttggtttttgtgcgtttcgattcgacgttttttcgttcgattaggtgtttcgagagcgtatagttgggagggttttttcggtcgcggcgagatttacgtttgcggtgtgttagggcggcggcgacggtgacgggcgtggggcgcggcgttgtttcggttgtcgggtcgttgcggcgagcgcgcgggtcggtttggagttatcgggttgaatcgtcgcgtttgtatcgtgtcgtacgtcgcggaggcgttcgggtatagatcgcgcgggcgcgtataaagcggttcggggcggtcggcgcggcgtagattttcggtgggtagcgtattttagtttttttaggttagcggttgtagggagtttcggttcgcggttttttcgttttaagtttgggagttgtcggttttattttgtttttgtttatggggattcgagagttttttagcggcgtatttaggggtaagagtattgtcgtgtgagtagcgtttcgggcgtgggtgagcgagtcggcgggcgggaggtcggagcgtcggggtagttttttgtagttgggatattgggtagtttgaggttcggggaagggcggcgcgcgcggtggagttgttcgggaagttttagttattttttttttcgttattcgttttaattcgtattgtttcgagacgtttaggatagggtattggggatagttgttcggggaagtgggtgagtggcggcgggaagggaggagcgcgggttttgtcgcggcgttcgttttcggagggtttcggtcgcgtttttgttttcgttttgggatttgttttttacgaatttttttttttttgtttatgttttttttgtttatttatttgttcgtggcgtttgcgatcgtagtggtatgaggaggttatcggacgttagttttcggagattgttcgatattagtttttagtttcggtagtttaagtatttggtggtggacgaggcgattaaggaggatttgaaatggtcgcgtttcgtggaggattttattagcgggtcggtggggtttacgtttatcgaggagcggattttgcg

SEQ ID NO: 6554 - DNA, 588 bp, Artificial Sequence
  Description of Artificial Sequence: Synthetic polynucleotide
gcggggttgggcgtttcggggaggagggcggagtaggtgagttgcggggtgggagtagggagtgtatttgtacgtgacgttggagtttgtagtaatttttaagtaggaggttgtgcgcgcgtgtgtgtggagtggttgcgcggtcggggaggatgtgcgttgtagggcggtcgtcgtagtgagtaacgcggtaatcggagttcggcgggtagtcggggaggtcgggattgagaggggcgagtcgttggtgtttttcggcggtagagggtcgcgtcggttacgggttcgggagagacgcgttttagtcggttttaggatgtaggcgatcggcggtagcgtttttgtaggcggtcggtttattatgaagaagtattcggttcgggtggtttcgtttagcgtttgtaatagttcggttttgatttttattaaagtggaaggtaatgcgcggtcgtttcgtttcgggggtttttgtattttagtcggggaatgttgttattttgaggggggttgtttggttgcggggcgtcggggttgggggtattgtttttttaggacgcggtttcgtagtgtagagcgtcgtcgtttgcg

SEQ ID NO: 6555 - DNA, 878 bp, Artificial Sequence
  Description of Artificial Sequence: Synthetic polynucleotide
gcgattcgcgattgtagtcgttttttaaggttagtttttcgttcgtagtttgtttcgggcggtagtcgtgttagtttttcgttaggattcgtttagggggacgtgggtatcgggtaggacgcgcgttttgggcgttggggacgttcgggatattcggggtttcgttttgcgttttagtttcgggtcgcggtatttcggttttcgtttcgcgtttttggagggaggtatcgagggacgcgtagcgaaggggttttgttaattgttaaagtaggaagtgagttcgtggaagaagcgaaggaggagaagaagaagggaggggaaggcggaggagggtaggggcgcgtagagttacggtttgttttaggcgcgtcggaatcgtaggattttttattttcgtggttttacggttttttcgcgtttcggaggtttgttagtttcgttcggacgttcgtttgtttttaattcgtcgttatggttttatcggacgattttttgcgcgtaggtaaagggatatagcgtcgcgttcgtttttggagcgagtatcgcggggcgggagttcgggaggcgttcgtagtagtcgtagggttatcgaggtcgggtttcggcgattttcgagggaggttcgggaattattttcgatttaggcgttagattcggagtcgtacggggtttttagtttagtttcgcgagcggttgttgatcgtttttttcgcgttcgttagggtttttgtttcgcgttagttatcgcgcgttttttttttgtttatgtcgtagttttcgtggtttttgttttggattcgggatgttaggttgagatacgttttgtaaatttttggtagaaatgggcgtaagggggtggatttcgttttcgtttttcg

SEQ ID NO: 6556 - DNA, 561 bp, Artificial Sequence
  Description of Artificial Sequence: Synthetic polynucleotide
gcgcgggtttacgttggtcgttagcggcgttaattttatttattcgttaatttgttagtttttggattgagtaaaatagtttttaaagacgcgggtaaacgtcgttttaaagtttattattatgtaacgttaggttgttcggagttacgttggtggtatttttttttcgtgtttattttgtataggtatttttagaatttcgtgtaaatgaattttatcgggagacgtaggtgggtaggtcgggtcggtagggattaagagtttgaaagggaatttgttttttttttttcgtagttcggttattaaggtaagaaattgtaggtagagaagttttcgaattcgatttaggacgtcggcgtttgttaggattttttcgtttgtttttcgcgtttcgcgcgcgtttatgttattattacggggagggtgtatgcggtaggtgtttggtcgaggttttcgggagcgagtcgtttttacgtgttttagtttgtttttttttcgaagttagacgttggcgttgtagttttgttgtttgacgttgttgtagaagttcgcgtttattcg

SEQ ID NO: 6557 - DNA, 1235 bp, Artificial Sequence
  Description of Artificial Sequence: Synthetic polynucleotide
gcgatcgtagggtttcgtttattttttttttcgggatagtttggatgggagtagttggcgcgagggttcgttttttcgtttttgggtaatttttttggtattgggagacgagatggttttcggagggtggaaggtagtgttagttcggtcggttattggggattgcggggttcggagacgcgcggggttttcggggagtttttcgtcgttttcgttttatttcgttcgggttttttaaatatgtcgtagcgtggttgtttattgttttttttgggtaagaggaggttttagatatttttacgggatttgaattttcgagcgttttgtacggagtagttatttcgttagtattttaaagtgaagttgtttataacggataagttcggagattttatgagaggtcggggtggagaagtcgggggtgaaggggggtaggggtcggcgcgttacgcggtttttattttttcgtttggattttcgtttttttttttttttggatttgtatttgagttgattgtttagttttttagattttttgtcgttttttaggatcgaggttatggtcgagatttaggcgcggagtttagagtcgttttttttttgtatttgtatttgtttttttttcggtagtcgtcgtcgtcgttgttgcgaagtttgaggttgtaaattcgggagcggtttattttttaggattgagtaggaaagcgcgtttcgtttttttgtttttcgaattgttttttatgatttgtttttattgggttgggggtttcggttgggcgtttggagcgagttgttttttggttagggagggcggggaagggcgcgcggcgttttgagtgtttcgagtttttcgcgggttttgttttttgttttgggtttttagcgtagggaggttatttttgcgtttttgttagttgtttggtattagttattttgaagttaattacgtagggagtttgtttatttgttgtagtagcgtttaattagatttaattataattgttttttggttttgatattagtagtagtattagtcgtatcgtcgtttggtcgtttgtaaatttagttttcgtttggacggtgaagtttttaggatcggcggttggagggaggttgttttcggggaataaggacgcggcgcgggtgcgtttgggagagatcgggggagtttttaggagggattttgttcgggaggacgaggttttttgtcgtagtttcgcggatagtttagttcg

SEQ ID NO: 6558 - DNA, 5964 bp, Artificial Sequence
  Description of Artificial Sequence: Synthetic polynucleotide
gcggtaatcgagttagatttaagaggggtcggtttcgtttaaattggttttttattaatggtttcggattagtcgcggttgtgttgcgggagtttttaggacgcggttggggttggtgcgcggggtttcggaattttaaattcggttcggttcggtaaggtttagggagataaggtagagaaggttggggtgagcgagaagtcgggcggtcgatcgttagggttacgagtttcgttttgtttttttggaattttatttaattttaaaggtttaaagattttgaaaatttcgaaagcgaaattgcgagttggtttttagaagtttgagaacggttttttaggttttttagcgtcgtttcgggattttcggatattataaacgttattaattacgagtatcggtgttcgtggttattgtttcgaatggtttttattcgcgttttcgggaattttttcggtttttcgcgtatttaggtttttagttttagttattggtgcgtttcgagtttttaggtgttagagcggtggtcggtcgggtttttgtttagtttcggttttttttttttttttattagaaggaaaaatttgggtttttcgagaattttgtggaatgttttttgtaattaattgtatattcgtttttacggtacggtttcgtgtaaaatcgcgggtttcggggttttggagtaaattgcgtttgttagcggcgacgttaggaggataaggggaggggttcgcggttgaaattgtagtttcgtagtatagagttattttaggttgttttttatttcgcggggtttatgggaaagtcggtttcgggagggcgcgtttaaacgtaggttggaggagttacggacgcgttttggtcggcgtgtcgttatcgtttagtttcgttgtttaggtgggaggggttatttgtcgcggggtttttaagttagtgtcgtttgttttcggtttttatttattgatagtacggcgttcgagtgattttgtttagtttcgttttgcgtttttgtaaattacgttgttgcgttaattataaatttggttaatatgtttttgtaattttattatttaaaaacgtttttaggtatttggtcgttgttagattaggttcgcgggttcggaggaggtttttttatttgttttcgttagtttcggggatcgtgcgcggttttcgtgtggttttcgtttacgaggtttttcgggtaggaatcgtcgcgcgatttttgtttagcggtcgcgttttggttacgggcgatttttgtcgggaattttgttttcggttaagttgcgttttcgtatttcggtggtttttattcgagttcgcgtttgttggttttttttttggtttttttgtttgatttcgattttgttttcgaattttatttttagatttttttcgttttggaacgtcgatttttttttcgtatttcgtcgtttatttatatttttcggcgattgttcggtttttatgttcgttaagataagaagatgttttttttcgatgcgtcgagagggtttttaagtcgagtaagggataattttttttttaaacgttgtttttattttttattttttttagagcgcgaaatttaaaagtaaggaaggtaatttttcgtttcgattttacgtgtttgttttttagagtcgcgcgttttcgtttttttgttttattttattattattattattattttggttttttttaagtttcggtttcggttttttattttttattttagagcggcgtggaggaaagtaggagtttattattaagtgtagcgcgttttttgtatatacgaaattcggttggcgtttgtagttcgattgtatttaatattcgggatagttagtttttttaataagtattttttcgttttatttattcggggatttattcgcgtaggatttagtatatataaggcgagagttagttcgttttttagaaagataaaataaattattttttttgtttttatgtattttatattacgtgttcgtagtttgttacgttaaattatggtagggtttggttttaagacgtatatatatattcggggtggttttttttgatatatatatttaaaaaaattgcgtatacgtaggtttgtatattaatttataggtatatacgatagttgcgtttcggtgttttggttcgggttaggggtatttttttattttttttttttttagtaatggatttgatatatagattttaattacggaaaaaaaaaatcggatagtttattttttttttttttttttatttaattcgttaaagcgttttttggggtagttaaagagagtcgaaattaaggggtggaaattttagttgggtttttttttattttaaaatttttatttttagtttttaaaagttattttagttcgttatattgaaattggtacggtttttaaagatttttttttcgtagttgtggcgtttttaagaaaatacgagtacggattaggttttggatgagtgttcggttatcgagaattagttattttttattttttaggattttttagttttttttagtttttttttatcgtttttggttaaaattaataaatatatttcgtagtttttatagttgtattttggcggatttttgtaaaatatatatatatatatatatatttacgtacgtatattaaaaaataaattttagaattagtttaagttagtaattttgaaagggggtcgaataagaggagataatcggaaagtttttaagtgataggatattattttaaagagaaaataatgaataaaaagattattttcgttggagtacgttttaaaattattattgttaattttattttagttgtttaggtaaatgtttttaagggagcgatttcgaatgtttgtacgatttttatttttatgtcggttttcgatttttcgtttttattattttttttttttatttaaattaaaagaaaggggagattttagcgcggaggagacgcgggagcgcggggtaggtagtagcggcggttgcgtcgttaaaatgagtgtagaaacgaggaaggtgggcggcgggaggggataggttgcgttcggggaaggaggatattttgtaatttcggacggattttcgtacggttcggttttttcgagttcggagacgtaggcgaaggggattcgggaagtaaaaatgataatttggagcgtatagaggagtttgaagtttcgtttaagtgtagtcgttttttttttttgtttttttttttcgtttttttgtattttttttagtttttttttattcgttatttttaattttagtttttttaggtttttttttttttttttttttttttttttttttttaggttggaaaaagtttttgattagcgtatttaatttgcgggtcgaagggttgtttttcggttagtttgggcgtcggggatagtagtcggcgcggcgttttatttggtgaagttcgttttgttttcggcgtggatttaggtttcggtcgtcgttcgggagggtatcggtttcgttcgtttgttcgttcgttcgtttttgttcgttcgtttttcgttcgtcgtttttttcgcgcgttcgtttcggtttttcggtttttattatagtttattttaatatggtattttttttgtgcgtatgttcggcgtttttttttttttttttttttttttttttttaagattttgtgtgtgtgtgtatgtgtgtgcgtgcgcgtgtagcgaatttttttaacgattttttttagcgtttgtaaaattttttaagttaattagtttgcgggacgtgatcggttttttttttagttagtttcgcgttattttttgcgtttaagtaggcgggtatttttaggattttgggattttttacgtttacgcggttttttttttatcgcgttttttttttttttttttgtgagttttttttatatatgatttgtagaaagtttttatcgcgggcgttttcgtatattttttcgtaaggataattgggtaaattttcgtttttttggttgcggttcgtgagttgggtttttaatggtttagtcgatcgtgtgtataaatttgcgttttattcgtcggggatcgttgggagcggagataaatttaatttttagggtaattttggtttcgttcgttttattttattttgtgtttaaatagagttttttttgaagttgcgaatatttttaggttttttgggtagggttggaggggtcgaggagagttattcgagggaaaggtgtttcgaggggtaggaaattaagttggggttgttcgggcgagttgttaggtagtcgtgttcgttacggcgttttatggggtatttagttagtggcgggttttatagggcgggaaaagaatcgtcgtttatattttagtaaaacgtggttttcgacggttcgttggagagtttcggcggtcgtgagtttcgggtagggttggacgtttgcggagttttcgggtattttgtttcgggcgtttggggaggaacgcggagtttttagggttttaggtgtaacggttgcgtagagtttaaacgaaatgtttttagtgcggaaaagtcggtgacgttttggtagtaagattaagagttttcgaagaacgttgcgtttttaattagggggtttcgtagagatgtttgtgtgggtttgtattgtatatttttgcgaaatagcgaatggatacgtttgtttagggtttttatggttgttaaagggggtaaaattatttagttttttaaatttgtgttttatgaattttttttatagtatttttttttagggggttaagaggttttttaggttttcgtgggttcgtagttttattcgttttttttcgttttgtatttttaaggagaggtgttcgttttgaagggttaggggttagttatggagtgaggggatcggggttgattacgcgcggtatagatagaggtttttaggcgggtttttttttggacggtggggtcggagttgatttagaagaaatacggagggacgtgtcgagaagtcgttttttttcgtcgcgattttggagagcgtttttttatttaaaggatttgtcgagttgagagatttagggcgggcgttcgtagtcgtgaggttttttgcgtcgttagtatgggaagattttgtttttttatattttggagaacgttgggcgacgattaaagcgtttttcgtcggtttgttattttatgtgatataggagttacgtgagatttagaagagtttagcgattcgtcgcgcggcgtattttaaattttagtttgagtttgcgatttttttagttttttagtttttagttgttggggatattaagtcggagttttgggttttttgttttgtgggtcgttgaaagtagagattttttaaattaatcgaatcgggcgtattaattttttcgtttgtatttcgttgtttttcggttgagtttcgaggcggttttaggtagaatttgttggattgattgcggcgtttagaaatttggagtgtgggttttagatattttttacggtttggtttcgggttttaatatttaagtcgttttttttggtttttttattatatagcggggtttgtggaaagggaggggtcgagagattcgtcggcgtattattgttttcgaggggtttttattttgtgtattgttgaagcgtagggcgcgtcgcggtaggaatggtttcgagtgcggattttttgttttgagttttttatttttggttcgcgttgcgtttatttagtggttttggtttcgtagggcgatagcggttgtttttttttatttgcgttttagatcgcgcggtttcgtttagttttcgggagtcgataggcgtttgttttggtgttagcgtagggtttttcgggggtttggggtaggggtaggggtgcgggggggaaggggagaacgtaatttttttttgtaggagtcgtggagacgtgagttgtaattagttatcgcg

SEQ ID NO: 6559 - DNA, 5964 bp, Artificial Sequence; identical to SEQ ID NO: 6558
  Description of Artificial Sequence: Synthetic polynucleotide

SEQ ID NO: 6560 - DNA, 5964 bp, Artificial Sequence; identical to SEQ ID NO: 6558
  Description of Artificial Sequence: Synthetic polynucleotide

SEQ ID NO: 6561 - DNA, 703 bp, Artificial Sequence
  Description of Artificial Sequence: Synthetic polynucleotide
acgcgaaataaacgattttaggtttttagtaaagaagtagcggcgcgtttttttttttcggtttagcgtgaaaatacggaaggcgaagggttgtcgttagtcgtttttttgttatcgcgatcgggaaataaagatatattattttttattttttgcgtttttaagggattcgaggaatttttggttgtaagcggttggtatttcggaacgggcgttttattcgttcgggcgaaggtttttggtttattaggcggttttggcgttcgtagttggcgagttttcgtttcgttttcgtcgtcgttttcgtcgtgggttttcggcgttagtttatagttcgttcgcgtttttcgcgtcgagtttggttcggcgttagtgagtttcgtcgtcggttcgtttttcgttcgcgttcggttcgtcgtatggtgcgtttagcgcgtttcgagttagttttcggcgcgttgttaggtcgggtgttaggcggttatcgcgcgttatcgtcgtcgttatcgttcgtcgttcgattttggataataatgcgcgttttcgtttttttagaaagttagggacgtttttagtcgtcgttagagttggttcggttttttagttttttttcgtggtattcgtaggcgagataaagttcgttttcggtgaggttgcgcgcgtttaaagcgtgcgggatgtttagtacggaggtttttaagcg

SEQ ID NO: 6562 - DNA, 1315 bp, Artificial Sequence
  Description of Artificial Sequence: Synthetic polynucleotide
tcgcgttttttttaaatatacgtatatttttatatttattcgcgtcgttttagtttgtttatttttaacgagtttaagtcggtgtagtcgcgttttatgttcggttcgtagttttcgagttttagttcgttcgcgttgggcgtcgttgtatttgttagtggcgcgcggtatcgcggtcgtcgggtttcggagcgtttttagcgttgcgggggtgtcgtgggtggtttttttgtttttttttattagaattttgtatagtcggggagaaaatttaagttgttatatttcgtcgggagttgttggttgaaaggttgggagtcgcgttttttgtttggtagggagatttcgtatttttcggtttttaggttaggtttttagttttagagttggaagagttttagggcgggaaggaagagatagtaaggattagaatggggagtatgagattttgatgcggaattcgacggtaggtttcgttttatagttgtttcgtttatagcgatgcgcgttagagttttcgtagttttgatcggtttttttgttttttagtcgtcgtttatcggtcggagggtcgtttttttgcgatttttttttttattttatttttaggtcgtcgtcgttcgtgggttgtttttcgtcgcggttaaaagttttcgcgttcgaggggaagcgatgggcggtttgggggttcgggggcgttaggcggggcgcgcggcgcggggcgcggtcggcgggtgggtgggttatttggcgcggtcgggcgcgtttgtcgggtattagagtaggtgtagtagtagtagtagtagtaggttggcgagtagggcgagtagtgcgtttttcggtcgtattttgagttataggcgtcgtcgttatcgttgttgtcggggcgaagtatagttcgggcggtttcgattcgcggttttcgtcgtcgtcgttatcgtcgtcgtggtcgtagtttcgcgtatttatagcgtttataggcggtagcgaggggcgttcgtagtttattcggtagagttttcgcggcgggcggagaagaagtcgcgttcgggttcgtttcgggttttcggtttcggttcgcggagcgtcgcgatcggttggtagatgacgattcgtcgagttcgtcgtttgttttttcggaggcgttcggagttgttgcgggtttcggtcgtcgttgttattgttgttgtcgtcgtcgtcgtgcggggttatttgaaggttggggcgcggaagtttaatttcgtgttgattgggttttaagttttttgcgttttcgtttcgtttcgagtgttcgcgaatttttcggacgtttacg

SEQ ID NO: 6563 - DNA, 1316 bp, Artificial Sequence
  Description of Artificial Sequence: Synthetic polynucleotide
gcggtcgtcggtttttagttttgggattattttggtttcgatacggagtgataggggatttttacgcgttttcgtatttagggcgtttttttagttgcggcggaggtatagagaggttttggcggcgttgtggtttcggtcggtatcgggtttcgcgtagtcgggttttttattttgagtggagttgttttttaagtatttagtttttgttaattattgtgtttaatattaagttttcggggcgttttgttttgcgttatcgcgcgttcgttcgttcgttcgtttaatttatttgttgaagattaggtagtttaggtggttgattttgtggtcggagcggtggcggttgtagtttttttataggtttttgaaggtcgtgatggttaggatgaagagtatcggcgttagtgttaggtcgggttggaaggcgtttatcgtcggtacgaagttgagtagcgcgatgaagataaagtatacgttggtcgggcggtggaattgttcgaataggtttttgggtaggaaggatagtagcgtgtatttggtagttttgagtcggttgtcggttaggtgttgggtatattcgcgtcgtcgtcgtcgttcgtttttggtcgcgttagtcgtagggttttcggcgttcgggggcggtagtaggttggagcgtatcgtgcgcgttttgttttttcggcgttttcgtcgtttcggaggttcgggtttttcggttttcgtcggttttcgttttatggtcgcgtgtcgtcgcgttcggttttttcgtcgtttacgttcgttcgcgtcggttttttaggttattattattcgcggttcgggcgcggcggtgcgagtttttcgtttgcgggacgtacggagatcgcggttagcgcgtcgtttggtcggtttagcgcgtttagttcgcgtttagtttcgtttattttcgtttagtttcgtcgttcggtcgtagtttttagggcgtaagttgggcgggtgtcgtatagagtttttttgttttcgtcgttcgttttcggttcgggtcgttttcgtcgcggtggttacggtttcgttttcgtttcgcgttcggattgggttacgtcggatagcgggaaataaaaaaagttcgagttggaaattttagagaggtttagtttcgttttttagaagtattagttcggttttaaaacgttgtaaacgcgcgttgtttgtagtaggagagaggaaatcgcgaagcgcgagaaaaggcgttttcgtttttaagtagttcgcgcgtttttttaggggttagatttgttttattttggacggcgaaacgatttcgggagatttcg

SEQ ID NO: 6564 - DNA, 1110 bp, Artificial Sequence
  Description of Artificial Sequence: Synthetic polynucleotide
gcgtcgggtttggtttttgtggtttcgtaaattttttagtttgtgtgttacggcgacgcgtagcggttgagtcggagtttacgcggcgcgcgtttttcgcgaggaatttttcggtttgtaggttgtttgttattttcgtttttcgacgcgtttttttttggttcgcgttttcggagttttttttttttttggcgaggatttttttcggcgttcgcggtttcgattttcgtcgcgttgcgttcgttttttcggtttcggttgtttcgttgagggttttttttttttaggtatcgtagtcgcgttttcgcgtttcgtttttcgagcggttcgtttcgttcgatgtttcggtttcgtttcgcgtattgagcgtttggtagtagggcgtcgagtttcggggcgttgcggggcgttgcgtcgagaacggtcgggtttgagttttgggcggtttttagagtcgattagagcgcggggaggcgggggcgaggaggaggggattcgtcgtcgggggttggttgtttcgtttcgagtcgatttttcgttaatggtttaaagggatatgtttaagtcgttttttatagcggcggcggcggtggcgtaggagatttagatggaattgttagagaacgtggttttcgcgggggcgttcggagtcgtcgtataggtagcgagagcgcggcgtttttttttttttttgtgagtcgtcgggtagggtatcgatttcgggttttttcggcgtttttattgtagggatttttagtttcgtatttttttttttcgtcgtttgtttattttttgttttttttttggcgtcggggattttgtttttttgcgtttttttttggttttgtttcggtttttatttttttttgttttcgaaaagttagtggggaagggcgggggagatttgttagtttttttagatttttttcgggttgttttagttggtttttttcgttttttttcgggagaggtatatggagagatatgaattaggggagtggattggatttgttgaagatcgtgagttcgggtgggcgggagggggttcgtttttcgtagcgttttttacgatgtcgatttttttggttacgtttcgagtcggggtgggcg

SEQ ID NO: 6565 - DNA, 1655 bp, Artificial Sequence
  Description of Artificial Sequence: Synthetic polynucleotide
tcgttttcgttttcgttgatattttgtaaagtcgcggcggtagcggcggggattacgttgcggtgtattatttttcgttattttttcgcgttgggttggggtcgagggggtttcgtagagtcggtaatcgaatcggttttggtttgttttttttattttttagttattattagaattagttttcgcgaaggggcgagttgtggttaattttttcgtgtttagggagatttcgttagggtcggggcggggcgcgatcgtttttcgtagtcgggcgcgaaggcggttcgggagttaggtgggtgtggggcgtagttggcggagttgtttagggcgtgcgagtaggttgcgaggatggcgtttcggcggcgcggaggtatcgtttcgcgttttttcgatagtttttcggtttgtttttttttttcgcgttttggggtagtcggttgtttggggcgtacggggttggagtggttttttttttttttttcgttaggttttttcggtttaatttgttggtcgcgattttttagttagtttcgaggaaagtgtagttattggataggtttgtgcgggttgtcggttttagggaggaaggtgggagaagtttggaggagcgaaggggagggcggagggaggagggaggagggtgcggcggtagatttggtaaattgcgagttgttttttttttttaaagtgtggagaaggagcgcgggggagcgtggcgacggtagcgtttttttcgttattaaatttttggggtttcgcgggggtttggggttatttttttttgagttcggaggaattttttttcgataggttttagcgtgatttttttttattttattttttttttttttttttttttttttttttttttttttttaaatatattttttttttggtttcggattttagattgttgtagttttaatttttttagggtttagttttttggagttgtttattttttcggttgcgagaaaggacgcgcgttttgcgtcgggcgaagaaaagaagtaaaatttgtcgggagggtttcgttattaatttttttttcgtaaatttaaattttttgtcggggttatttttagatagaggaaagtttttgtagagtcgattagttttagtggatttggggtaggtagcggcgttggttgtggaattagatttgttttgaatttagtggagcgtatcgttggggttcggaagttatcgttcgcgggtatcgggttggcgttgttcgagtggaatcgatagtttgcgagtttcggttgtaagtggtttttttttttcgcggttgttgtttagtgtcgggtgagggttgcgagtgtggtaagttgtaaagagagttttagaggttcgaagagcgttgcgtttttattcgcgttcgttttttttttttttcggttttttattgtgaaatcgtagcgatatttataaaggttttcgggttttatcgagatcgattcgtagcgtttggttcggtcgtgtttattgtatcgggagttttcgagtatcggcgaaggattggcgggtggggtagggaggtggcggcggcggtatggcgaggttttcgaaggtcgatttggtcgttgtaggagttatgttattttgttatttttttacggattagttttagttcgtcgatgggaaattcg

SEQ ID NO: 6566 - DNA, 1655 bp, Artificial Sequence; identical to SEQ ID NO: 6565
  Description of Artificial Sequence: Synthetic polynucleotide

SEQ ID NO: 6567 - DNA, 304 bp, Artificial Sequence
  Description of Artificial Sequence: Synthetic polynucleotide
gcgggcgttggaaggggggcggggtaaatgcggtcggcgtagaggtggggagtaggtgggaaaggtggaggcgggttcgtttttggagatttatttttgtttttattgtttttcgtttgttagttttatagataggtttgaacgcgtagagagttttttggagtgttttgattttgttttcgagagggtttttaattttcgtatttttttagtggttgttttggtaggtgcgcgttttgcggggagttgcgtttcgggggttatcgtcgagcgggagttgttttttggaattttgtttatcgcg

SEQ ID NO: 6568 - DNA, 1666 bp, Artificial Sequence
  Description of Artificial Sequence: Synthetic polynucleotide
gcgtattttttttcgatcgttagtagtataagtggcgatatttttatggagcggtcgcgtcgtagtttgtcgtatttagcgcggacggtttggtcgcgcgttttttcgttcggacgatcgggcgcgtttgatattaatagttcgcggtttaggtacgagcgggcgtcgtatttgatttaatttaatttataatcggtcgcgtttgtaggtgtcgttttttgaaatcgttatttaggcggtcgttgtttatttttcgttgcgtcgcgggttttgtagaagcgtaagaatggggttgattatttcggtgtttatatgtcgtttttatacgtttttattttcgttcggcgtaagattttttttggttaaaagaggcgtttaattagttttggggtcgcggagagttagcgtggtcgataaagttcggttttttaggtaattcgggttttttgcggattcgggagggggcgcgcggggtcggagtatcggttttgggttgcgcgtttttttcggcgatattgtcgtttttttggttttcggttcggtttttcgtaggttaaaggtttatttgtcgggtttgggtggttcgggttagcgtcgtttgcggttttcgagtgcggttggttttaaggtcggcgtttttttttcggtttttagtgtttagagttaggttagcgggaaagaaggtagtatggttcgtaaaagataggtggtagtggtagttttgtatgatatttgttttttttttttgttttttattttggggaaatattggaaatatttttttttttatgcgtattcgcgttttagtatcgagtgttttaagttttgcgcgtagcgtcgggtttggaaggcggcgaatggttgtttagtcgtcgtttttattagtgatattcggtcgttagttttcgtttaggatgtgtatatttgttggtagtattggttcgggtggtagttatcgggttatttattttataggtataatcgtatttaatttaatttggaattcggagggttgtgcgcgtcgagttgggatcgcgttttagcgagtcgggtttttggttgcgttagggtttaggtcgagttatttcgtcgttcgcgtcgtcgcgaggcgggatatcgtgtgatatttttgtcgtgggttgggcgtcggtcgcggggcggagagcgggtgttttatttcgttttattatttgattttcgttagcgtttgaggacggcgtatttaattcgttttattcgttgcgttttgtgaattagcggcgggtagggcgggggaggtcgggttgggggagggtagggtggttttaatttttcgttttcgtttcgtcggtttcgcggagtataagtgttgggatttttacgggtaggcgtgttttgcggttggaggttcgagcgtttagggtttaggagacgtggcggatatagaggggtttgtaggtacggtgattttcgtgtttttgttttgaaagggtttgaaaggagcggtttatggtgtattattagttaagggtttaggtattagcgttttgtgtcgggaattcgggcggtcgttcgtgttgtaggtgtttgttatataaacgtttcgggagggggagggtaggtcgtcggattgggggtcggggaggggttttcggtttggtttgtttttgttattcgcgcggtttcg

SEQ ID NO: 6569 - DNA, 5030 bp, Artificial Sequence
  Description of Artificial Sequence: Synthetic polynucleotide
gcgttacgtggagagttatacgaattttaagcgttttcgttttttagtttttcgcgggaaaacggattagggtgttaatgggttttgattatttgtattagcgttatttgcgagtcgagggttaagagtattttttcggttttggtggggtacgggttgttacggtgtttgtaaagttattgtttgaggggtcgcgttatgttttgtagggtttgtcgtttgtgttttattttttcgttattttgtcgggcgttgggatatggggagaggaggcggttttggtgagcgacgcgtttgttcgttcggacgttttacgtttcggttaagttcgggtttcgtatttaaattgcgtatttttgttttgcgtttttgttttgcgcgcgtttagagtgtttgggagaggtaggaagtgggagttatatagtttttggatggggagattatttcgataggtttattttgaatagggggatattttgaatttaatattttaaggttagaggtttagaagacgaaggttaagtgatttgaagaatattgttattttagtcgcgtatttgggtagcggggttaattgttattttttttttattcgttggcgtcgtattttcgagtggttttggtttggtaggtttggtagggtatgcggttggttttcgaaatttttttcggggattttttgtttgtttttagaggtttttcgtcgtttgtggttaggggaaaggtcgtcgattggatatagggaataaagtaaaggagtattgtcgtttcggttttttttaagttattttttttgattttttaggaaaagggggaaattttttaaaggagttggtggtttgtggaggaaagttgtagaatttaaaaatatcgtcgggtcgtttttcgattaagggagggttaaaagtacggtaagttttgttttattatgtaaggtaaaaagattttaggaaaagtatatttaaagggggaggaggtagaggtagttaggagtttggagcgtggtttggggcgttgcgtttttttacgggttcgggaggtgtcgcgcgcggtcgttagcgagtttagtcgtttttcgaggtttgcgcgtttgcgtcggagttttttgggtttttgtttttttaaatattttgaaatgtaattttattcgaaacgattggtagtaatattttgacgaaatcgaatttttgttttattaagtagcgacgtcgtagaataagtagttgatgtaatcgtttaggtggaggcggttaggacggtcgttttttttcggcggggcgttcggggagtcgtcggatcgggttaggtagagtttgttttttatttatcggtagtttgagtagttggtttattcgtaagttatcgttttttttagtatattttttatttcgttaaatttaaattcggtttcgtaggttcggggttttttttttcgggttcgtcgcgggtttagtcgagtcgcgtttacgttcgggattttttggcgggaggcgattttttcgattttttgggttaggcgagtcgcggggttttggcgaggggttcgagtgatcgaagagaagttcgcggagtttgagtttggatttttcgattgttcggtttcgtttgtttttttgtatcgagtttagtttttttttttcgtttttagtcgcgtatcggtatttatagttcggagaggggtaaataatttttaatttcgaggtttaggtagcggagggtcgaggggtagtttttggcgtttttagtttttattaagttttttggagttgtttcgacgaattgattttttatgttttaagataggagttttttaatatgagaatgcgcgagttttggaggggtagatttgtatttttagggaatttcgggttttttttcgtttattcgttcgcgttgttacgggatttcgttatagtttattatttttattttttcgggtcgtaggcgggtagggtttttaggggagtgcgtatattcggtttttcggtgttttaggtcgaggttgtttttgaggggcgggtcgtcgggaatgtttatttcggggcgggcgtgaggattgtttaggatatcgttgtagggtcggttatttcgttttcgtttcgaggcgttttcgtttttaaatagtatcgtatcgttgagtttgttgaagacgatggtgtttatggtgtcggttggtagggacgcgcggcgcggtcgtagagtttcggggttgggtcgtcgggagtttcgtagcggggttcggtttttaggagaggaaggtgtatttcgttatttattggttgagagtgtttagatttttgtaggtttagggttttgaatttggtcgggtcgtcgggttgcggagtcgaggggaggagcggcgtcgtcgtaattggtagggattttgcggttttttttagttggttatacgttttcgtttttgtaggtttttcggataggtatttgtttttttttttgtttgggcgatcgatttttttaatttttttattttttagaattataatcgggaattatttattcgtagaggtaaaggaaacgaatttttaaacgagtttttgggttttagtttgaatttgggagaggtatatttcggattgcggagcgcgatcggcgtgaggtcgcgcgtggttttttaattatagtagaagattaaagtttttaggaattttaattcggggcgttaggaggggttggatggaagggaagatttggggtaatgtgttaatcgtatttataagattttttagtttatgagttttaggttatatcgggatttgggggattttcgtgttttttagatcgtggatggtttggttgaaattttcgtattttttgttcgttaaggtttttcggggtgaggttgggtttaaggataggaaaaagttaagtggcgttaggacgaaagtattatttttttttttttttttttagaatttttttattattttttaacgcgtttcgggaagtgtatggttttaaggtttaaggcgttaggatttaggtttttagagtttttaattagtgttattttttttcgtagcgcgggtgttagtcgcgagttcgtagtttttcgatattcgtttttttttggggttttcggggatttttttagaggttgtaaaggtgttagaagtttaaggtaggaggtagtttggtcggcgtatttttcgggttattgttgttattgtcggggagagttagtagtttatttttggggtcgcggaggttttgagtttttgtttgtcgcgtatcggcgttaggagtaagttcgcgcggtcgcggagtcgtagagttatagttttaaggcgcgcggcggatttcgttcgttttattttttcgtttcgcgtttcgggatagttttcgtttttttcgagcggttttagtttcgttgttagcgttttttttgttcgtttagtcgcggtatgggttgttattttattaatatacgcgcgcgcgtatatatatatatatatatatatatatatatatatattttttgtttcgttaagcgtttatattcgttaacgttttcgtttcgtttttcggttatcgtagtagaggttacgcgtgatatttaggattacgcgtgattatcgcgattaaacgacggttacggtttgtgttcgtagggaagtgaagttagatttttgttggatgtcgtgtgttttttaggattgcgttttttcgcgtagataggtacgtgtttggggtgtgtatatagtttcggtgataagtgttaaagagaattttcgtgtttgtagtttttgttttatagttaagattcgcgttggtgtttttttttaaaattatgtttttagggatgtgtgtttatgttgttttatttgtataagatattttttttcggttcggtttttttcgagttattttagcgcgtttttttagatgcgacgacgtgttttttttagcgaagttattacgaggttagttatttcggatattttttcggtagttttaagtttacgtagagatcgtagatatagatattcggcgcgttgtaggtttgtaggtagtaggtttagaggtaagcgatggtaaaggttcgagcgttgttttgtcgtaaggggttcgggggcgtgtgaattatatttgttgatttttttaggattttcgcgcgcggttattcgcgtttttttttaaattatttatttcgatttattttagattgtggtcggggaggttattttttgtagaagtgttttttttttttaacgtcggcgaataattttaaagtaaaggaggcgcggttaggtgggtttttaagtttcgcgtagatttttgggttagttttggtcgttattcgagcgtttttttattagattttggagggaagttgggggaagggcgggagagtatcggcgtttagggcgtaggggttagagcgagtttggcgtttcgtcgtagtcggttgagattcggcgacgcgggggttgtatttgtggttgcggggtcgacggtcggttgtagggcggttggttttttcgtttcgagattaggcgtatttttattttcgtcgtatgttttttacgcgggttttagcgcgtttattatcgttatcgtcgtcgtttcggttttatttatttagttcggcgcgcgtcgttcgggaataggaatagcgaggtttttttatgttttttgattgtcggttttagtcggcgaatattttgcgggcgcggtatttacgttttcgggcgggtggagaggaagcgttcgcgttcgttcggtcgcgggggttgttgttaatttttagtagaggagtcgttgtcggggagtttcgggttcgtcgagtttttcggagtcgggcgcggtttttagattcgtcggttttgtagtcgtggagtagacggggttttttttttcgtattttaggagagaaattggagaagttgtcgggagcgttcggtttcggttttagaagttgagaggttgcggtgtaaatttcgtgttttagttggttcgattgtcggaaattttattgcgcgtggttaggcgggagaggttattgtgacgcg

SEQ ID NO: 6570 - DNA, 2868 bp, Artificial Sequence
  Description of Artificial Sequence: Synthetic polynucleotide
acggttttacgcgaggaagagggcggggagcgcggatcgggtgtgggaggtcgaggtgatagtaggtgagggtcgggtgcggatggggaagtgagataagtatcgtgtgggtattatttatttcgttttattaaggaggttgttggtaagcggaatttttagttttttttttaatttagttgaagtttaattttattgaagttattttttatttcggttcgtttggggggaaattaggcgtttttggaagggaagggaagggagttcgggttgcgcgggttaggtagttttttttcggtcgtcgcgtgttttcgtcgtttttaaatttgtttttttttttattaagggaatttttcggggagtttagatcgcgatttttttttttggtttcggggtgcggggggcggatacgcgaggcgtgggattgatggtagttttgtttttaggaagtaggtaggcggggatttttgggcgttcggaggggtagtttcgagggtatagggtatagggagaattagttagatttttttttgtttcgggtagtcgcggcgggtgtggttagcgcggaggtaggacgtcgtcgagtttttaattttatttttttaatttcgatagttcgtcgtttttttgatcgcgtttttacggtttttcggtattcgtttttttttttttattatatttgaggaaaatttttttttcgttttttaatttaaatttagtagtgtttacggttgtcgtaaatcgttcggtttttagtaataaggtttcggtcgtagagcgagagtttttaggtgtaaggaaggtgatgtcgtaaagtcgggagtgtcgtaaattaggtgcggtggggaggggggaggggtggaggcggaggggtgggggggaagggggagggagggggaggaggtgattcgagtatttagatataagcgagaggattatggcggatggttttaggtgtaagcgtagaaagtaggcgaattcgcggcgtaataacggtgagtggcggaggggatcggggagcggcggagttagggggagttgggtagtcggggcgttttcgggggtgaggggggcgagtcgggttgggggtagtcggggtagggacggtaaagtggagtgggaaagtagaaagtagtgttttttgttttttttcgttgtcgtcgttgtcggagtcgcgtcgcggtcgttcgttttttttgaatcgttatgttttttatttggttttttttcgtttagcggttttcgtcgtttttgtcgtttttttggatcgttagtcggcgtcgacgtcgtcgtattttcggcgtagggcgggcggtcgggacgtattggttatttttttggtttcgggtggagcggttgttgttttttttcgtatttttttttatttttgtgtttttcggcgtttttttttttttttttttttggtttttttagcgcgatttttttttagcgtttaggttttcgggagtcgcggaataaatttgtgttcggcgttgatcgtgtaaagtggttttcgcgcgtcgcggtttcggtcggcgtcgtcgttgtcgttcgggtttcgcgattcgggtcgggttgtgggcgcgcggtaggcgggttgcggcggcggcgggacggggcggtcgcgggttgcgtggggtttgtgcgcgcgtgtgcgcgggcgtcggttgtgcgcgtcgcgggcggatagggttcggtcggcggcggtaaagttgggattcgcgggtcgggcgcgttcgcgtaacggggattagaggcgcgggggcgcgggtttttaagcgttttttttttttggcgtttttcgttgttcggtttagagtttcggtttggggatttcgcggcgagtttcgcgagtggggtttacgtttggcggggcgcggcggggcggcgcggggaataaggtaggaaaggtatttatttaacgtcgtcgggagtcgcgcggatgggggcgagttgggcggcgggtgtgtttgcggagttgttatttgggtttagagatcgggaagtattatagatagatttttttttcggggtagacgaggtttttgcgtcgggatgggtcggtgtgcgtgcgtttcgcgtttttttttttcggtttttggggaagttgttatttgggtcggacgtacggagcgttgaagtcggataatggggtttggatggcgttttgggtttcgggtggaaggagggtgggggagggggcggacggatcgacggacgcgcggggttgttatttgtatcgtagttgtagtgtttattgatttgtgttgttgtgttaagggaaatatatatttttttgtttggcgtgagagttaaaaaaaaagagagatagttcgagggatcgagatttgaatatgtggtggtggttgtatagtcgttttttttagtttggagagacgttgtaagttgattgtatttttggttatttcggggcgatgttatgttttttttttttttcgtgtagtagcgaaatgtttgttgattgttattgtttggatagtttttgtggcgagaggggcgagatttgttcgttcgggggcggcgggagcgtagggagagtagttttcgtttgcgtcgtttcggtatttgtttgtataataatgggcggtaacggttttgtcgtcggtcgtagtttaggttatataaggaattatacgtatatttcggatcgaggggttcgttttggtttttgcgttatttttaaaacgatttttaagagaggggtaataaatgcgtttataatgggatcgttgtagcgtcgagaaaacgaggaaatacgtgtttaggagaaaattttttcgtgtttttttagttttatttttcgcgtttgggtttttttttttttttttttttgggatgcgaaacgcg

SEQ ID NO: 6571 - DNA, 2678 bp, Artificial Sequence
  Description of Artificial Sequence: Synthetic polynucleotide
gcggttggacgcgcgtttaggttcgcgtcgttgcggatcgcggagttgtgtagaagcgcggtttggcgggtggtataagttcgatagttgcgtcgcgtagttcgttcgcgtttggttaagagtttcgcgagggtgtggggagaggatcggtttcgtagggagcggaggttgcgcggttgtatcggattttatagttttaagtcgcggtatgaggcgaattttgtaaagcgcgttttcgttatgtatcgttcgatttttagtattgtgcgtagtaggatttcggagtttattcgtttgtggaaatcgagttcgtagcgggaaggtagtgggtggagggtgggtaggtaggggtttggggttcgcggttttttattttcgcgttttttcgcgttagtttcgaacgtttttttggggcgtttttgtttagttgtttcggttgatttcgttttgtagttagtttgaggttaggcggtcgttttttgtaggttataaattttcggcgtaaaagtagggttttgaacgcgatatcgtattagagcgtttagttaagcgagttgtttttatttttattgtgtcgggcggcgtaaattgcgggcgtaggtagaggagtcgcggttttgcgtcgggcgggagtcgaagtttagagtttcgttagggttttttcgtcgagcgtatttatcgtcgttgaggtagagcgcggttagtacgaggattagtacgattacgattttggcgtttatggtgcgggcgggcgggcgggcgggcggacgagcgcgggtcgggggtcggacgtcgagcgggtaatgcggttgacggagagtgaaagtgcggcggtgggaggcgcgcgtcgggcgttttagaggggagagttaggcggggcggggcggggcgcgcggtgaggggcgggttcggagtcgagtgttggtcgtggtcggggtttttgacgcgcgattttttcggcggtattttttatttatttttttcgtttttttttcgttttttttgtgttttcgaggcgtagtgcgtttcggtttttgatttttttaggtttcgttgggtttcgtatcgttggttcggtttgtagtgaggttcgtagtttgagcgacgtcggttggagggtcgtttattgtttttgtgatagggttttattggagagattgaggattttaggcgtaaagtggggcgcgcgtggaaagttgcgggacggggtttttcgatggcgggaattgaatgagaattaatgaaaagtaaataagttagtttcgggcggagggtttgttggcggtggcggtttaaggtagtcgagggggttttgttttttgtgcgtgggggtttaagttcgttatttgttcggtttgcggcgtagtcgtcggtagagttcgatttgcgggaatgagattcgtttttgtagttagcgtggttcggattttaagtttacggcgttattagtcgagttttagttttttcgtttgtataaataaagtagaaggcgtcggcggtttttagtaaaagcgaatgtagtttttgtattttcgattttttaatggtgaaatgagttaattataggtttatttcgcggagtgggacgggagatttaatgagattcgttttacgtcgcgaaattttttgtatcgtgtttgataagtagatagtatttaataaatggtagttgtaagtaagttttttaaatttaagtatttattgttttatttaagaaaagtttcgtgcgatttaaagagttgagaatttttttatttcgattttcgatttttaggatagtattattggcgtttgttttttgggtttagaaaattttttttacggagtcgtttttcggcggtgtttagtttttcggatattttcgagatattttagatggttttagttcggtggcgaagggagggtgtaggtcggtatttaggagacgtgggggtgaggagagcgtttttttgggtttcgttttgtgatcgtaggttgttttagttatttttttgtgttttttttagtatagcgtttagcgaagtggggttagtcgtcgcgtttatttaggggtttgttttggggatacgtttttgtttttggggagttttggtcgtcggggagtgggcggttagcggttgtattaggcgggagcggttaataggaggttgcgagggtttcggaatttcgttggtgggagtaggtgttttttgtgtattttttttttaaaattattttggtcgttagatggttgtgggtcggtattttatttatttatttatttatttatttatttatttatttatttatttatttattttgggtattgggtttggagtcgggaattttattgatttggttttgtttttaaagaattgaaggtagtgaggtttagtgaagaaggtagtcgtcgggcgtttttaggtttttgttgggttgggtcggggagtttggtcgtttatcggtcgtagcgttggggtttcggcgttttttggtggcggcgttttttttttcgtttttagagttttggttagttttatttttgcgtagttgatgaaattcgggagggcgaaggggttcgcgggaaatttatattcgggtggaggggcgttttggagttcggagattcgattttgcgggagtcgcgcgtagtttcgtttgtttttaaatttggttaaagtaaacgttatcgtttttcg

SEQ ID NO: 6572 - DNA, 2756 bp, Artificial Sequence
  Description of Artificial Sequence: Synthetic polynucleotide
gcgggagggcggtagcggttaggttaatattcgcgatttcgattggggcgcggtaatttttgtttttagtttttataagttttcggtcgcgattcgcggtcgagaaattttgcggaggggtcggtgggttagagttaggttaggtagttgttgagtttttttttttttttttggcgggagtgtgtgtgtaaggggttagggggcggagtcggagaaagggttgggggtgttcgtgtttagcgttttttcggacgcggttttataatttagttgcgagaatagatggacgtagcggcggtttatttcgggggttttttgttcgttgtgcgtcgaggtttaggttgaagcggagatcgtaagtttttggttttcgttttttttaaggggtttcgaggaatcggttgtcgcgtttttttttttaagaggagaagagcgggcgttgatttcgcgagttttagaatcgcgggcggggggtaggtagggggcggggggtagagggttagttatcggcgcggaacgtttattttaggggttggtttaagatttttatatcgagagttttttttgggtttttagttttggagtatttggagagcggatttttgttcggttacgtttcgttttcggttttcgtttcgtcgacgtcgtattagtatgagcgacgtaagtggttcgggtattattcgggggttgggattcgtcgcgttatagtttcgagtggaagggaaaaaaaaagaggaggcggcggaggaggtaagagtcgacgcgaggggaggggagcgtagcggcggggttaacgggcgggtaagcgggcgggcggtaatagtatgtttttcggttagcgcgggcggttttttagcgcggcgggggttgttttgggcgcgtttcgggcgaagtgcgtttagttttcggtttcggtttttcggcgcgttcgatttttcggtcgtttttgagtttagtagtcgcgggtttcgggatcggttaagagtagttgtaacgtttcgtcggacggagtttttttttttttcgggacgttgggttatgagtttcgcggttatttgaggtataggggagtttgttcggttaggatagttttttcgaagtttcgtgttttcgtttttgtattgcgggacgttagcgttcggttttggcggaggcgttttcggaagagtatcggggtgggggtatggaattcgcggaatttgcgggttaggttcgggcggcggttattaagttgtcggaggttgtgggcgcggcgttgtaggagtttcggcggtagaggcgtttggtgtttgttatcgtgtgcgtggcgttgttattggataatatgttgtatatggttatcgtgtttatagtgttcgattatatcgtttatatgcgcgggggcggcgagggttttattcggattttcgaggtgtgggagtttattttgtcgttgtttatttcggttaatgttagcgtttatacggttaatatttcggcgttttcgatagttgcgtggttagcgggtttagtttttcggtttcgttattttacggagagcgaagacgtgaagatcggggtgttgtttgtttttaaggttattttgtagttgttagtgaattttttgagcgggttttttatcgatcgtatgagttacgacgtgtcgttgttgatcggtttgggcgttatgttcgtttttatagttttgttcgttttcgtcgaggattacgttacgttgttcgcggcgcgtagtttgtagggtttgggtttagttttcgtcgatacgtttggtatagttatgatcgtcgataagtattcggaggagtcggagcgtagtcgtgtattgggcgtggcgttggtttttattagtttcggaagtttagtggtttcgtttttcgggggtattttttatgagttcgtcggtaagcgcgtgttttttttggtgttagttgtcgtgtcgttttttgacgcgttgttgttgttggtagtggttaaatttttttcggcggttgtacgggttcgggttaatttgttagtgggtatttttatttatcgttttatgttagatttttatattgtcgtggtggtcggcgcgtttattatttgtaatatttttttcgtttttttcgaatttattattgttacgtggatgaagtatacgatggcggttttcgagtgggagatgggtatggtttggttgtcggttttcgtgttttatgtgttgggcgtttattttatcgtgcgtttggcggcgcgttatttatatttgtagtggttgtacggcgcgtttgggttggttgtgatcggcgttagttcgtgtatcgtgttcgtttgtcgttttttcgcgtcgttagtggttttattatgcggtttttgttttggtatagttttagtcgatatagtattgttgtttacgttcgtttttttggtggacgtgcgttatgttttagtttatggtagcgtttacgttatcgtcgatattttttattcggtggtttacgcgttcgggtttatagtggtaggttatattgtgtattcgttgggttttgagtagtttagttttggtatgggattggttaatttgttttatgttttcgttttgttgttgtttcgtaacgtgggttttttgacgcgttttcgtttcgagcgcgatgtgttgtttgatgagttatcgtaaggtttgtacgatgcggtgcgtttgcgtgagcgttttgtgtttggttaggacggcgagtttcgtagttcgtttggtttttttgatgcgtgcgaggacg

SEQ ID NO: 6573 - DNA, 990 bp, Artificial Sequence; identical to SEQ ID NO: 6343
  Description of Artificial Sequence: Synthetic polynucleotide

SEQ ID NO: 6574 - DNA, 829 bp, Artificial Sequence
  Description of Artificial Sequence: Synthetic polynucleotide
gcggtgcgacgaggttaggttcgcgttcgttaagttttagggtcgttgtcgtcgacggttatggaggacgagtagttcgatagtttggagggttgggcgtcgtttcgggagggttttttcgtcgatttttagaggtatcggttgcgttttttggtggtttggaacggcgcggagggtaagtttgttgtgatttgttacgatcgtatcgcgtagtagtcgtagcggcgcgagggggttcggttggggttggagtataagttcgaggtcgtcgtgttttcgtttagttgggtcggtcggttttcggtcgcggggtttcgcggcgcgcgtcggtagttagcggcgttgtggtcgtttttggaatattgttttttacggttgtcgtcggagttggacgtgggcggcggcggggtttgaggtttggggttcgggcggtgggcgttgttttggtcggcgcgcgtgggtttcggcgaggcggcgttgtaggagttttgcgggtagttggagcgttatttgggcgcggcggtttacggttgtggcggcgttatcgtgcgcgacgtttttttcgcggttaagggtcgcgcggtcgattgcgagagttcgcgcgagtttcgggagcgggttttgcgcgtttgatgggtcgaggcggacgcgcggttgcgttaggtaagcgaggtcgggtcgtcggcgtttgatcgcgtttgggtggtttgggattttgtgggaggttttttcggcgtcgagagttttggttgacggttgatggggaggagtcggcgggcggagaaggttacgggttttttagtatttttatttgcgcgggatcgttgcg

SEQ ID NO: 6575 - DNA, 4119 bp, Artificial Sequence
  Description of Artificial Sequence: Synthetic polynucleotide
tcgtgatggtgttaaatcgagaggagagttcgagaagggggtgggtgatttttcggttgttttttattttcggcgttttgtgtttttttttttttttttttttcgttgcgttttagtcgagggttgttggagcgaatgggggatgtagaggaaggagttcgtaggttttcgtgtttttttaatttttttcgtttttttcgatagtcgcgcgttttcgttttagtttaaggttagtggttcggtttcgaggaaggcgcgggggtcgcgagagacgattttttatagtatcgttaaggaaatcggcgtcgtcggtgttttcgcgggtttttttcggtagttcgggggttgtttttcgtcgttgcgcgtttttttttattatttattcgttgttttcgtcggtcggagttttcgttttattaatttttttaatttcgcgggcggcgggtaggtgggggcgcgtttttaggtcgtaagaagggagcgtttcgagattttttcggggtcggttttgtttaggagggagttatcgacgtttttttttggcgttttttcgtcgttcggttttttaggcgcgtagtttttttcgagagtttcgaattttatcgttattttgtttttgtttcgggagaggggaggtcgaagtgttgtcggttagagggtttacgtaagtttcgaaattcggggggacgttttttttatttttatttttgcgttcgttcggggttgggcgcgtcggggcgtacgtacgtcggtttgttggcgatttggcgtatttgttcgcgcgttttggttttagttgtcgtaggttttttttgtatttatttttagtttttaaagttagtgtagttagtatcgtttatttggagttttaatttttttttgcgattttcgtatatttattgtattttatttattattttcgggtcgcgtaggttcgggtttgcgaagatacgcggtttattttcggttatttcgtttatttggttaaaggggttttttagttcggtattgggaaagatggttatcgacgtggcggcgaggttttttatcgggtagatgttgttagatagttggtgtataaaattattgagagttattgggattttgtttacggttttggcggttattatttgtttttcgtataatttggagatttaattttttcgttatttggagtgttagaaaagtcgttttggagaggggttggattgagtttgggatggtatttttttttgttttttatatttaaaaataattattatatatattaagaaaaaaaaattaatagaaataaaagtagtaaataagttgttgttttttaagaaataagaaaaatgtttatttgttattgatttttttttgtttgtgtttcggttgttgggaagttaggagttgttggtgtagtgttattataatagttagtgagttttttcgtcgagttattaattaattgtttttcgtttagttagacggaaagtgttgttttaagtatttatgggtaggtttttaatattcgtgacgtcgttgtttatatatggattgaggaatagggttgggttaggcggtttttgtcgttatatggttgatttgtatatacgggttcggtcgcgcggatttcgtcgggttcgcgatttttagttcgtaggcggcggggatcgttggggtttcgggcgcgcggttttagttgtagtttgggttcggggcgtagggatcgcgggggagagggcgcgttatggatttagttatagttatagtaggagagcgagttgttttaggttgcggtttagtttttcggggcggggaggaatttcggttttttgggattttttaaaaaaggcgaagattcggtgtcggcggtttcgtttttttagtttttgtttgggagttatttcggaaaattaaatttcggaaagaaatcgagcggagtcgagatattatagttaaatttttatttatttttttggtagtttaaaatcgtaagtaaaaggaggtagcgaagaaaaaaaaagttatatgtatttacggaagttgattgtttttttttgaattatttggtggaaagaagtggttggtgataagagtgaatgcgtattgtttttttggaaagtttgttttatttatataggagcgaaaacggaataggtttgggttgtttgtttgtttaagtattttgggtattttgggattgggagggtaaattttaggaggagtagaattattgtggggagtttcgagagaaatttttagtcggagatatttttttttttttgttcgcgcgtttttcgtttttttttagttgttgcgcggagcgggcgtttttttcggcgcgtttgggcggtcggttgcgtgggggcgtttagatggaagtttggatatttattttgtttttttagatatatatatatatatatttatattcgttttattttcgttatatattttcgttttcgttgttttttttatatattcgtttatatattttatattatatatttttttgttgattgcgttcgcgcgtcgtcgttgttagtagtgtttcggcggtagagcgggtttcgggttcgttggataggaggttttatgaagatattggtttaatttttattatcggtttttgtagttatagaatttttttgatttttatagtttaggatttaggatcgcgttttgttcgtattcgagttagaatatacgtattagaataaatattttttttttttttttaaaaaatatttcggtgagtttagcgcggtttttagtgacggtcgaaagtatttttaattatttttaagacgttatttttattttttaatttattcgttttattttgcgagatttcggtagaaatttttttgtttcgtttttaaagtaatttttaaaaatttttttaaagtttaaatagtagtaggttttggtttgttgggcgtaaagtttttattttttagtgcgttttagttcgtaatggatagtcgggtttgttcggggttttataggaggttggtttcgggtgtttaagtttagcgtatcgtcgtttgtatgatttatttatggtcgtttgtgtaggttgcgaattgttttagagttttttttcgttttaaagtcgcggaggttagggataacgcgtagggttagtttcgtaggtttgttttgttttttttttatttcgggttcggagcggttttagtttagtgtgggtcggggcgggcgggagttacggcgttacgtcgtggaggaagcgcggcgttgtaggcgggtttttagtcgtttatttgtttcgatcgttgtagtcgtgcgttagttttcgtcgggtttagcgtatcgcggttagggttttgaggttgtcgggagcggtttttttttttgtttttttattgaagcgttgtttttttttttttttttaaaatagtcggtatttagcggtcggttatttttttgatttaagttatttagagtatatttgggaaagtttttcgttcgcgttgtgcgtttttttttaattggggatgaaaaggatatggaaagaaatcgtagtaaggttagtattttagtagatattttattttagtaaaaatgtgtaaagttttattttttaagaaagaaagaaagaaaagaaaagtaagaaaagatagttgcgtttttattacgtgcgttagtttatttcgtttgcgttttggcgggtttcgcggttttcgcgttgattatgggtaagacgacgtttcggaagggagttcgattcgtatttcgggttttgagttcgaaagaacgggggaaagtcgaattatgtaaatgcggatttttgcgatggggttcgggttacggttttcgtcggttttttaggtgaggtatttatcggtagtaagcgcgggcgaggcgattgttcgcgtttcgtttttttttgcgtacgtgggcggatcggtaggcgggcgagttgttcgggtcgtttcgcgattggcgttgttgttaaattcgtcggcggtcgtcgcgcgttatttcgagggggagtttttggacgttcgagtgttcggttagtagggcgcggagggtaggatcggggttgggggcggggcggggtgtttgagcgagggaaaatcgcgaggttttcggttgttatttttttcg

SEQ ID NO: 6576 - DNA, 1575 bp, Artificial Sequence
  Description of Artificial Sequence: Synthetic polynucleotide
acgcgtttatggaaggtggtgttcgttttatcgttttcgtggaaggttaaacgagttttcggtgtgaattcggagaaagagagggaagtgtagcgttagttttattttatattttttttttgtttataaataattttaagtgttattttaaagaggacggggagcgcggtagaggggttttcgggtcggcgggttggggtcgtcggatttgtttattacgttttttattttgggcgagtttgtataaataaataaatttaagtcgtcggtttcgcgggaggtggaggaggagtgacgaggaggaggaggaggagggaggggggagggagagattagtttgggaagtagtacggattgtttattcgattcgtgtcgtcgtagggagtgtgttaagttatagaggcgtcggaatcggtttttgcgtttttcgttagtcgttacgatttatttttgtttatggggtttttcgtgtgcgttttttcgttcggggattgaaattgattggttcgggagatacgaggcgtttagaaggattgatagcgcggtattaattgttttgtagatatttgaagggaaagattgggcggagagaaggagagtcggttagatttttttaatttttttggatttggaacgtttttcgaaataattttttttttatttaggtgtattttaattatcgttggttgtgttttttcggtatttttttttttattgttaattttttcgttttttttgtcgggagtagcggaaagggacgttttttagcgatataagttttttttttttgtttcgtagtttggatagagttttttggtagcggttgtcgtttttatttattttatttatttatttattggtttttaagacgcgagaggatggtagcggagcgtatttataaagcggtagttatcggtgttcgcggttttggggagttgggcgcgttcgggacggtggttttggtggcggcgcgggcggagcgcggcgtacggttgtcgagtttagggtcgtgcgggttgttgacgttggttttttgttcgttggtatttagtttgttcgtttattttcggacggtcgagttgtaggttcgggtgttgcgtttggaagcggagcgcggggagtagtaaatggagacggttattttgggacgagttaattaattgttggacgaggtttgtgttttttgttgttggtttttattttttttcgcggcgttttttcgcgtagtttttagattgtttagtcggtgttcgcgggcgttcgttttttgcgagttttaggttcgcgcgagttgtttgcgggaggggtcggggatacggatagacgttgttttattagggattcggaggatttggtgggtaagagtatgatttagcgattttcgtttcgggtaagcgttttcggtttttagcgttgggagcgttttgggtacgtcgggtaggtggaggaaggttgggcgcgcggaggttcgcggaggcgggtaagttttatttttttttttcgggattcggttagggtggtgtgatagtcgtttcgcgttcgcgtagcggtaagcgcgtttagaggtttaggtcg

SEQ ID NO: 6577 - DNA, 2401 bp, Artificial Sequence; identical to SEQ ID NO: 6353
  Description of Artificial Sequence: Synthetic polynucleotide

SEQ ID NO: 6578 - DNA, 1579 bp, Artificial Sequence
  Description of Artificial Sequence: Synthetic polynucleotide
tcgaagtcggggagcgggagcgtacgtgcgcgtgtttattttgttttgggtttttcgttcggggaatttcgggggtgttagggtatttagggttagggaagtaagatgtcgggtcgtttattttttttatttcgtagttcgtttcgaaaattttttaaatcgagatttaatttggatgtttagtttcgtttttttttttttttttttttttttttttcggtcgaggttttttttagtttagtttttttttttatttttttttcgtcgtggatttttattagtatgtttatttgggaggattcgttggggggcgggagatattcgaagttatttatcgttagcgttttttcggcggttttttcgggcgatagcgtttcgggagttttattcgtataagtgttgtttttaattaattgtttgggcgggggaaggaaaggggtttcgtcgtcgttttcgttcggaggttggagtgttgttcgtcgggtcgtgcgttcgttcggtagcggcgtgtattagtattatttttgcgtgtaagtttgaaatgtgagttgttttcgatttatattcgttcgcgttttttcgtagcgaagtggttgggttgacggtttgcgcgcgcgagtgagtgcgggcggcgggttggggggcggggtgcggacggcgaggttcgcggggcggggagggcgcgcgcgagtcggggttttttggagacgttaaggtaggtttgttcgttttttatttttttttcgcgtttttttttttttttttttttttttttttgtcgcggttggtttggtttttttcggagtttttagttttacgcgggtatacgtagggtgggtggttacgttcgtagggttcgcgagcgcggcgtagagcgcgggtcgtgggaagttttttcggcgcgtttcgtgcgttttcgtttttcgcgcgttttcggtttattttcgtttttggagagttgtcgtttgcgttcgggcgcgcggttggttgttttttcggcggcggcggcggcggttttattagcggagttttcgtttatgattggtttcgttcgggaagttggagacgggcgatgaataattgatgtgtgcggtgcggtagtcggacggcggcggcggtggcgggtagtagcgagcgggagcgcgggagtcggagcgttttcggagcgggtagcgcggagcgagcgggcgtcggattcgttcgggttttcgcgtcgtcgtcgtcgtcggggcgcggagcggggatgtaggcggcgttcgttgtttgcgcgtagtttttgttcggcgttggttgaattttattcggagtcgttcgtcgcggtcgtcgtcggtcgggttttaagttttcgagggcgttagggcgggatcgcgatcggtgtaatttttaggtaagtgcggggtcggaggggtcggcgtttgggcgtttacgggtcgggttttgggtttttttcgggcgcgggggtgagtgtgcgtgtttgtgtgtgatagaggagggtcggtgtattgtgggtagcgtcgtgtgttgtatggtgttagttttaggtttggtcgcgagagtggtatcggcgtgtatcgggtcg

SEQ ID NO: 6579 - DNA, 919 bp, Artificial Sequence
  Description of Artificial Sequence: Synthetic polynucleotide
tcggggcgtttagtgtggtttttttattcgggagtttggaagggtttttcgtagttcgtaggagacgtagcgtttttcgtttagggggagtaggaggatagttggtcgttttcgggagttttaggcgcgaagcggttttttttcgttttaggtgagttttgttcgacgtttaaggtttaacggttagaatcgtttttgttcgtcggatttagcgaagttaggggaataaattttaaaaatagttcgggttttttcggtgcgtttatttttatatacgcgtttgttcgttatttaggagcggcgtttcgttgttaggtaacgagagttcgcgttttaggagttagtgtaggcgtcgtaaagcggaaggggcgcgcggataggtgagtagagggtacgcggtgggtagcgaagggggaacgcgtagtagagaggagagggcgtgtaggagtaggagtaggcggtagagtagagggggcgcggtagagtagagggggcgcggtagagtggagggggcgtgtaggagtaggagttcgtcgtagagtagagggggcgcggtagagaggagggggcgtgtaggcgcggggcgttcggtagagagaaggggtcgtgcggaagggggcgcgcgttaggggagggggttagagaggagggggcgtttaggagtcgggtttgcggtagagatgaggcggtgtgtaggagggagagcgcgtacgagggggtaacgggtagagaggagagggaatgaaagaaggggagcgtggtagagagaagcgggcgcgttttagggggcggggtttagggaggagggggagcgtaggatcggggcgggaggtagagaggagcgggtacgcgggacgggcgtgtgttcgtgaggggtcgaggaaaggcgtatgtggaggcgcgcggggtgggtgagtcg

SEQ ID NO: 6580 - DNA, 944 bp, Artificial Sequence
  Description of Artificial Sequence: Synthetic polynucleotide
tcgtcggagcgcgcggggacggcggcggcggcgttatttggaggcgcggtggcgggtaggtgttcgaattgtacggcgatgtagaggtcgttgtttagggggaatttgtggtagtgtagtattttaggttaggggaagtcgtaggtttttatgagcggcgcgtagtcggcgcgtacggtttcgtatagcgagcggtacgggtagatgggtcggtcgagatagacgggcgtaaagagcgagtataggaagatttgcgtattcgagtggtagcgtttggttagtagcggtagttagttgttcgtttgttgttttatttcggttaggttttcgtgttttagtaggttgggtagtcgtatgcgtttgtagtttatcgtgtggtagagcggtaggtcggtagggatgttaaggtattgcggcggtttggagtaggagcggtcgtgtagcggttcggtttgttagttatagtagtcgtatttttcgtagcgcgtcggcgtttagtgtagcgtttttagtagtagcgttagcgcggtcgttcgtacgttttttttcgtcgtcgtcgttcgtatggttgcgttttttttaggtgcgcgtcgcgtagtttttcgacgttcggtgttcggcggtttaggtgtttcggcgtgcgttttcggttttgattttatttagtcgtcgtcgtcgtcgtcgtggaggtcgtttaggtgggtggtagtttgcgttgcgggcgtttcgattgattttggcgttttttatttcggggttttagttcgggtttcgtcgtgcgttttagttaattttcggtcgtttggttttagttttaaggcggggaggtagtgggggcggtttttagtttttttcgtattttgttcgagcgtttcgtttagcgttaggttttgcgtttttttttcggttcggtttttttgtcgtagttttggtttcgtttagcg

SEQ ID NO: 6581 - DNA, 1096 bp, Artificial Sequence
  Description of Artificial Sequence: Synthetic polynucleotide
tcggttacgcgttgggttcggggaagaggcgcggtcgcggtcgaggcggggatagggaggcggtagttttttttgcgtagcgacggcgcgggcgggcggaggtcggggcgttttagtttttcgttttcgtttttttcggtcgtgacgttagagtcggacggggtaaattgagcggcggcggcggggcgttggggcggagattgcgattcggagtcgttcggattgacggagtttattgcggtgcgggcgttggcgcgggtacggaggattcgggtaggtatcgtaagcgatttcgaggtaatacggtttcggttttttgttcgtagggcgcggtgtcggaggggagcgggttcgggggaggtagggaggtagggaggtttttagagttacgcgggcggggttgcggggatttcggggtagtcggggcgtagggcgtagggcgtaaggtgtacggggtcgagcgtgtagtttgggaggtggtatagttgggggcggcggggattagggtagcgttttgggggttttaggttgggtttttagattgggttttcgacggcgttcgcgggcgttttttttagggagcgcgggttttcgtggggacgcgttcgaggtaggtgagtcgaggttggggcgttcgggggtgttttcggatgtcggtgcgcgcggttttttgattcgttttttcgcggtttgggggacgggagaatggggggtttacggtcgttttgggtttttatcgcgtatcgcgttcgtagcggagtttcggagttatggttttgagcgagttggcgttggttcgttggttgtaggagagtcgtcgttcgcggaagtttattttgtttatcgtgtttttggcgttgttgttggataatatgttgtttattgtcgtgggtacgtgcggatagggtatttttgtttcggtattttagttttagcgtttttttttcggtattttatttatttttgcgcggtttcggagtttcgttaaggttcgggaaagttggagaattcgttttgtaaaaaagatattttttttaggttgtcgcgtcggggttaggaggagtcgcgttgtgtggtttcgtttttttgatgttcg

SEQ ID NO: 6582 - DNA, 4048 bp, Artificial Sequence
  Description of Artificial Sequence: Synthetic polynucleotide
acgttagagatcgtggggcgagagagggagagagttggaagtttattgtttcggcggggtcggtagttttcggttttaattcgtaaacgaacgagtcgggttaagaatcgcgaacgtatcgattttgggatttcgaggttaagcgtggttgatggggtgggaggatttcgtattttttattttaggattttttttggtttaggaaatcgttgggagttttgttaagtgtggggattggtataatcgaacggcgtttttagttcgggaattagtttttgttcgtttattttcgcggtgtttttggggcgattttagttttttcgacgcggggtcgcgtaaggtagtagcggcggagcgttaggttagaggaatttgtttgtttttttgttttattagtttgggcgaggtaggttcgggatttagggggtcgtagcggaggcggcgtcggttagggattttgtagggatcggggtgtttcggagggagtggtgttggtggaggaggaggcggtggttgagggggagtaggtggggaaagaggaggaggaagaagaggaggaggaggaagaagaggaggaggaggagaagaagaaattggaggaagaggaggaggcgaaggaggaggagaagtcgtagcgggcgtcgtaggagcgagtgagttgggagcgaggggcgaaggcgcggagaagttcggtcgttcggtgggcggtagaaggtttagtcgaggcggcggcgtcgatttcgttttattttcggttcggatttaggttttcgggtttttaggcgtttatttttttttgacgtattttaaagagtttttttttttttattttagggcgagtaatagcgattaattattaagttatttattaggtttcggaggaagttgtttatgtgattttcgtattaattaggtttatgaattaataaatcgtttgtataatttgtgaagaagcgaatatttttatggattgtttttggatttagggcgttttgttcgttttttgtagaggagaaaaaatttttttttttttttgtttttttcgagaatttttttttttttttttttttgtttttaatttcgatttttttacgttatttcgttaaaaaaaaaaaaaaaaaaaaaaaagaaaaaaaaagaaaaaaaaagaaaaaaaattattttaatttacgtttgtaaatttttttggaaggatttttttttttttttttaggttgggcgcgtttggtgtaagattttcgggattttcggttttgtttttttttttttttttttttttttttttttttttttttttttttttttttttttttttttttttttttttatttttatttttattttaaataaacgagtttttaattttcgttcgttttcgtcgcgggtagcgggcggcggaggtagcgtgcggcggtcgttaggagttgggagtttagggcgttcgtttttcggcgtagtatgttttagtcggcgtttaagcgttgttttattatcgagtcgttggtggttaaggatagttttttgttcgtttcgcgtttcgaggattttattcgtttcgcggtatttagttacgttaattttagttttataaattcgttttttaacggtttttattcggtcgtcgtcgtcgtcgtcggtaggggcgtttattttaattcggatttggtgttcgtcgaggcggtttcgtattcgtttaatttcgtcgtgttagtgtattcggtgtcgtcgtcgtacgttttggtcgtttattttttatttttttcgtattcgttatattttttattcgtttcgtagtagcgggattcgtttattttttatttttggtttatttatcgttatcgatatttgggttatcgtttttaaggtacgtgttacgtcgcggaattgtagcgcgtcgttttcgtcgtattttttattgttttcggtttgtttcgggtgggcgtttggtaaggtttgggcggaggttttttcggttcgcgggttagcgcgttttgttgggaaattaggcggcgcggggtcgggcgtggtgtcgatttttagttttcgaagttacgattggtttggagtgatggtttgcgggtcgtttgattttttgggaaggggtgcgaacggagaagttgttttttagtgcgttcgaattagagtaggttgggttgtgcgtgttcggcgtcgcggagtttagagttcgcgggatttttaggtttttggtattttcggtaatgtttttaatcgttttggtttcgaggggcgcggataggattcggtcgttaggtttgttttcgattgcgttcgattttgtttattatttattttgcgtttttttagtttagattcgcggttttttagttttttatttttttttggaggcgagaggattttcgcgtttcgggagaaaagtatgggatttgtttttttttttttgtttttcggaggtttggggaggggcgggaattcgtgcgggaggaaagttttagggtttggcgttttcgtcgcgatttgtttaattggggcgtcgagtagttatagcgggaaggtaggttcggtttggtttttgtttttttttttttttttaaaaaaaaaaaaaaagaatttggttaggaaattgttttagagggaaatatttgttcgtgtgtttttattttttgcgatattttttatttgtttgtttttttttgggtacggggtgggaggaggagagttaaaattttagaaaaaggagtaattagtttacggattggagttagtaaaagatttattttcggcggtagtcgattaatatttcgcggtttgtttatttattaatttattgcgtttttgtcggagtttagaatcgggtagatgttatttttttttttatattttaaaaaattaaattaaaggaaaaaaaatttaaaaagttttttatttttaatttcgaattggatttgtttgtattttgtttggattgtcggtttgtttttttttgtttgggttttcggtgaatcgattttttatgttaatgagtgaatttaaaattttgaggttttgtttgaaaagtttagggttgtttttttttattcgttattagttatgtttatggtttttttattagattcggagtcgttgggatttttttgcgttatagattgttttggcggtgtttgtaagtcggtaatttttcgggtttcgattttttcgttcgcgttttttttttagttttcgggagtcgggagtttcggagtttagttcgcgagaggtagtagcggttgtagttaagtatattcgtcggttagatttttgtttcgatcgggttttaacgattcgtttcgtttttatattttttcggaggggtaataaaataaataatttaaaaataaatttttatgaaaattttggagagtagttcgtcgtttttttatcgtgggttaaagtttttcgagaggttagaaagaagagaaagtagttttttcgggttgtgggcgttaattttttggttaggttttgcggtttttttttttgtttttagcgttcggcgaggaggtggcgaggttcgcggcgttagggcggttgcggagtcggtcgaggttaggagtttggggattggtttttttgcgatagcggttggttgggtgtcgtatcggtggagattcggcgtttcgggtcgggtagttgagtaggcgtttttttcgtgagtttttgggaggattatcggttttcgtaggtcgagcggcgcggttatgcgaaggttttgagtacggtgtcgggttagttcggttcgggagaagtgcgcggtttcggttagagtagttttttttaatgggatttttgttgtgtttttcgtagggaacgatattagtttcgagagtttttttttgtataacgcgttggttcgaaagtttaagcggattcgaatcgtttttttttcgttttagtttttaaggttggaatacgtttttgagaagaattattacgtggtgggcgtcgaaaggaagtagttggtatatagttttagttttacggaaatttaggtgattgcggttcgggcgcgaggaatttatttaggcgtgcg

SEQ ID NO: 6583 - DNA, 3292 bp, Artificial Sequence
  Description of Artificial Sequence: Synthetic polynucleotide
tcgttgtcgtcgagacgcgtagcggatgtcgttgtttgtcgcggcggaggaagttacgtcgttgcgttttcggtttattttgtttttattaaagcgttagttagatagttttaaacgttagttggtcggagagattttttgggagaaagtgttgtcgtcggggttatagattcggagttgattcgcgagttttgggtatcggcggttagagtagaggggtgttttttcgagagtagtcgtcggtgtcgagaagttgttgttttagtagttttatcgagtgacgcgcgggttttggtcgggttagcgcgtatacgtatataggtatatttatttttggtttcgggggaaggtttatttttcggttttttagggttaaaggttaaggttacgcggatttttgagttcgaagacgtagtgcgaggatttatatttggatttttttattatcggttggatggtgggtggggaatttaaatttttttttttttggtttcgttttttttagtaggttttaggaaaaatatcgaggtcgtcggattttaaagggtaggaaaatgatgagtttttcgagggtcgaggttacgttttgttttttgggtcggcgttgcgtggttttttagttgcgtgggggcggcgggtttttgtttagttttagggggcgggggagcggtagttgcgagcgtagataatttcgaggtgattcgggagggtttggttcgttttttttttttttcgtaggtttggcggcgggaagcgggtttttgcgtcgtaggggggagaggtaggcgcggttttcgggttcgcggtcgttagtgcgtttcggttaagggcgtcgtttgtttcgcgtttttcgttcgttttttgcgttcgtaggagcgtttcgagtgtttttttagcgggagttaatatttttttgtgttaataggtttgtttttatttgttgtttaattggattatataaagttaataacgggcgggtttttatagttcgaagttaaagcgttaaaattcgagggaaggcgaggagggggcggtggcggaggcggttgcggggtcggggttcggttgagttttcgtttgtttaattttatttgttattgtacgcgtttaatcgtcgtatatttttcgtatttaatttggatgatattttgattttattattagtattcggcgtcggattgacgtagtttcgagtcggggattgtttttgttgtttttttcgcgggagtcgtagtcgtagtcgagtcgtttcgatttttcggtgtcgcggtagggtcgtttttcgttttttcgtattttttttttatgcgagttcgttcgtttgggtttttatttcgttttttcgtcgttggatttgcgttcggggcggttttcgattttgcgtttcgtagttgagtttcgtttatggtttgattttcggtttttcgtttgttcgtttcgtcgttcgtttgtttcgttttttttttttcggggattcggaggagaggggattatgtcggaattcgggtcggacgttgtcggtatcgttagcgtatagttttaatcgtcgtcgttttttttattcgtttttaaggagttttcgttttttattaagaatttgtttaacggagattattatcggtcgttttttaagttttagtcgtttttacggacgtttttcgcgttagtttcggttgtcgtcgtcgtcgtcgttgtcgttgtcgtggcggttaagggggttttggagggcgtcgcgggtttcgcgttttcgtaggtgggcgatttggttttttttcgttttgagatttcggcgtagaggtttgttttgttcgcgtattatttggagcgttttttagtttggtggtatttttatattttgattttcgtcggcggttatttttcgcgatttgaaggtatcgatttttttttgaattttcgttgtttttttgcgcgttcgtttcgttttcgtttcgcgttgttttttttcgtagttttgggattttagtattcgtaaattttttgttcggttagtttttttcggtttttagtttgttttcgcgttgggttgcgttgttcgttaatttaattttatttggtgagaaaagaagtggaattggagtttcgggtacggtgtttttcgggaaaagtggtttcgggcgtgaatagggaggtttcggacggtcggggtttgggatacggtttggaaggagggggtgattttaatgcgtttaagtcgaaagggaatcgttttgtcggtttttggcgaggaagttgagggaatggaaggaggtggtcgcgttattattatttgtttgtttgttttcgggaggagggggattttaggattcggcgttttttttttggtttagtcgagaaggaggtagttcgcgggaatggtgaggttttatggtttgggatttggaggtcggcgcgggttgagtttgtcgtttttaggcgtcgggtttcgtttaaggttgtgtcggtgtgtatgtgtgtgcgttcgtttgtttgtttttttagtttcggagaaggttttgttgagagatttttttttcgttttcggtatagatcgcgatttttcggagttattgtttaaggtcgatttcgattataaggagttggattttaagagttcggacgagattattttggaggagagcgatttcgaggaaagtaaaaaggaaggcgaagcggcgttaggcgcggtcggggcgagcgtaggggcggcggcggttatttcgggcgtagaagattggaagaagggcgttgaaagtttagagaagaagtcggcgtgtcgtaagaagaagacgcgtatagttttttcgcgtagttaggttttttagttcgagtttattttcgatatgaagcgttatttgagtagttcggagcgagtcggtttggtcgcgtttttgtattttatcgagacgtaggttaagatttggttttagaatcgtcgtaataagtggaagcggtagttggcggcggagttggaggcggttaatttgagttatgtcgcggcgtagcgtatcgtgcgggtgtttattttttattacgagaattcggcggtcgagggcgcggcggttgtagtcgcgggggtttcggtgttagttagttagtcgttgtttattttttcgtatttcgtttattattcgtattcggtggtttttttcgtgtcgttgttacggtcggtttgaggttttagaggggtgggggagggagcgttcggtttttttgttcggatttcggaggagattgggtcgggtcgagggcgtcgagaagtttagcggtttttaggaattggggtttgggcgcg

SEQ ID NO: 6584 - DNA, 3753 bp, Artificial Sequence
  Description of Artificial Sequence: Synthetic polynucleotide
gcgcggagattcgtcgtttgcggaggcgtcgagttattttagtttcgagtttcgtatcgtttttgtttttggagagaagggtttaaggggtttaaggagtcggagttgtcgtagtcgttaggaattcgggttagaatttgtagttgtttttagttttggttgtttttggttagacgtcgttgatgttcgttaggttttcggcgcgttttgggggcgtatcggtgttgtgtgtttggtcggagcgttttgaaatttttcggggtcgttcggcggcgttgcgattggtcgcgttcgggtaatttttatgtaaatgaggtcgcgtcgttttcgcgtcgtcggagattcggcgagttggcgggcgaggaaggggtatttgtatcggggttgggcgggcgtatttagagttaggcgggtaggaatttttgcgtagttattcggtgtttgtatgtttttggcgcggaagggacgttttattagtttcggcgttttttttttttagatttttttttcgtttttttttattgtttgtttgttgtattattttttatttagattatttagatcgtttttaaagggagtttttggtttttttcgattttttatgaatttaggatgggtagtaaagaagatgcgggtaaggggtgttcggcggtcggtggcgtttttagttttattatttagtttattttgggcgggggtttttcggaggtatcgcgggagttcgtcggttggttagttaggaagcgtagtttgttcgtgttttcggaggaggaggagtcggacgacggttggaaggcgttcgtttgtttttgtttagattagtacggttttaaggagtagggttttaagtattatttttttattttttttttttgtttgggtaaggatcgtacgtcgttagtgtggtagcgagcgagcgcgaggggagggaggttgagcgtttcgttaagattttcgcgtcgggttttttttggttagagttgcggtagtcgggggttcgggatcgcggggagaggggcgcgtattgtggtgtttttttcgttcggtgggtttttgggagtaggcgaatatagattcgtgtcggtttgggttttttggggaaggttgagttgttgagagagtggattatagcgagagggatacgcggtcggttttatattcggttgtttttaattattgtatatttggtatttttttttcggatacgaggtggagatttgtaagtcgggtttgggtagtttgtttttatcgtaatttttttttgagtttttttttttattcgtttcgtatttttgttttttttttttttttttttttggaatgattagtattttaagatgattgataatggtgtattttagagacggtttttttttataatatttgacgaaggggagttttgcgttagtttttagcgtgatttttaaataaacggtttgtgaaatgatgttattttataaagttcgaggaatttttttagtttaattattattaagtaaattcgttttttaaaattatgttaatgtttttttttttagattttttttttttgttgtttttggtttatttataaaggtgggagtatagagattttatattttaagtagttgggttttttttttgtcgtttttaaaggacggggtgttgggtttggggggttagtgagagggataagaggaggggattggtaaggtgggattaaggttgtaggcgtttgttaatcgtttggttttagggagagttggcggttttcgaggttttttaattaattttatggtttttttgtttgttttcgttttttaggtatttttaagggtagcggaggttcgggttcgggcggtttggagcgtacgttttttttttttttttcgtattcggattttaaagaagagaaagagaggtttttgttcgcgggttcgttttcgtcggggttcgagcggtcgcgggacggcggcgttgagcggtaggtcggcgcggttaagaagaagacgcgtatcgttttttcgcgtagttaggtgtattagttcgagtttattttcgatatgaagcgttatttgagtagttcggagcgcgtttgtttcgtttttagtttgtagtttacggagatttaggtaaagatttggttttagaatcgtcgtaataagtggaagcggtagttttcggttgagttggaggcggttaatatggcgtacgcgtcggcgtagattttggtgagtatgtcgttggtgtttcgggatagttcgttgttgcgcgtgtcggtgtcgcgttcgttcgtttttttcgcgtcgttttattattcgggaagtaatttttcggttttatttttttataatttatataataagttcgattattgatcggttcgtcgtttcgcgtcgtttttagttgttcgtagagtcgggcgcgtattgtattgtaagtagggtttcggagtaaggcggcgtgtttttagaaatatgaagaaatatattatgtgtatttattagtttttatttatggtttttgttttattttttgttttgattgtttcgggtatttattggtattttttaagttagagagtttgttttttatttagatcgaattagtacgttttgaaaattattcggagtgagatgttttcgggtggtggtgggaaagggagttttggttagataggttgtggttggtagggaaaaaaattaggaaaatatttataaaattaggtatattttttttttatatatatatttgtatatatgtatatgtatatacgttcggttaagttaggtttttagaggttttggataattattaaattgttttttttcgttttttttatttcgaggatggtagggacgaaaaggggagagtttagatttgtaaatatttttaaaaagaaaaaaaaataaaatattttaaatatttttgttaattttggtgggtttggttattcggtatgataacgtacggaaggtttttaggtttttcggtggaaagatttgtatgcgtttgtttgtggaagtttggttcgttttacgtggagggtgggatcggggttaggggttaaaggtcgggattttggcgtcgtttagattgtacgtggttggagttgttcgtttatttttttttttaacgtttagaatcgtcgcgcgggttggggcgtatttcggttggaatttagtttaagagttcgcgcggagaaagataaagattgggaggtaggtttcgttatttaagcgattgttttttgggaataagcgagttgggtgtttagcggtatattttcggtattgggttcgttttgagtttggttatagtagttttcgttatgatatgttttgtgtcgcgtattttttttttaggggtataaagtaggcgatggcgttgtttgtatttagtaaagtttttattttgttcgtcgcgagtttggcgcgattagtttgtcgttgcgtttagttattcggtcggtggtagagttatgtgtttcgcgcggagagggaattgggcgcggtgaggtagttttgcggtttaggagagattcgaggttcgggattaggtaaagaaggtgagggaggtaaaggcgtttttttatatttttttgttgttaatagtttgtattggtttagcgtgtggttggattatcggttagtacgcggtcgtttgttttgaatggaattttgacgcgcggcgggggcgtttacggattttttcgttttgatatttgcggtcgcgtaggggttgggagggcgttgtatcgagagaatagtcgcg

SEQ ID NO: 6585 - DNA, 829 bp, Artificial Sequence; identical to SEQ ID NO: 6574
  Description of Artificial Sequence: Synthetic polynucleotide

SEQ ID NO: 6586 - DNA, 1328 bp, Artificial Sequence
  Description of Artificial Sequence: Synthetic polynucleotide
gcggggtcgttgcgcgtttttttaagtgtgttagcgggggaggcggggttggaaaggaaatttggtgaagggttggttcggagtttggggtggggatatttattgcgggatagggttagtaagaggattcgatacgtatcgtttcgagtgatacgtgtaaatgttaagatatagagatatttgtaaatgttatttaagagggtgaggacgggggagcggtttcgaggttgtgtttttcggggtaggtattggtttttgtggggttgcgggttaagtgtcgtttttttttaaggaattggtatttggggggggggggtcggtttcgtcgcgttggaagcgtaagtttcggggtttcggagatgcgtcggggcgcgtcgtttttcggggtagttttggatttcggcgcgtttaggcgtagcgtgcggtgttttcggcggggcgggtagcgagtcgttttagttcggcgatttatttcgggtttcgtagggcgcgagtagagtatcggttagggcgagtaggagggcgcgggcgggggatacgggtagcgggcgcgttgttatcgtcgtcggtttttagtgtagtagttttcgggttcggcggcgagcgttgtattattttacgcgggcgtcgagtcggggtcgggcgtcgcgatcggagggattttttgtttcggcgagttagtttcggagttttcgcgtagcgttcgcgtcgtcgttgagtttttttagttttttatttttaaaaaagttttttttcgtgtgtgtgcgtgcgtgcgcgcgcgcgcgtcgttttggtataagttagttttgatcgttgtaataaatgagtaaattgttcgagttggttcggggattaggaagagcgttagtgagagaaggtaggtttgtgaaatggatttacggttagtagttatcgtttttattatcgcggaataaattattgtttttttcgtattttcgttagttggcggcgtttcgcgggttttagagatcgttcgggttttttcgttagggtttcgtttcgagtcgcggttcgtttattttcgagggtgggcggtttagacgtggtttagtggcgttcgggcgttcggagcgtatacgttttcgttttaggatgatgtggtcgtagggttcggggcgttcggttgttaagcgtatatgcggcggtacggtttagttttttaggttgaagttggaaacgatgattttgttattcgtttttcggttttttgggaattttcggagtgcgggttaggtttttatcgcggtttatagttcggcgcgcgatttcgttcggttttaagcgtttaaaggggtatttttcgttcg

SEQ ID NO: 6587 - DNA, 2957 bp, Artificial Sequence
  Description of Artificial Sequence: Synthetic polynucleotide
tcgtttttttcgtataggtgttcgattcggagttcgggaggcgggttttttttttaggtatttagtttagcgttagtttgggtttatttttcgttattttatagcgcggggagtaggggaggtcgaaagtcgggtagtttggggggtcgggataattcgggttgtagtaatttcgggcggtagtaggattggagagttggtgtcggacgtattgtagagacgtttttgttttcggcgcgtttttcgatatttagtagagagtttggcgtttttcgttttgcgcgttcgaggttatagcgcggagaaatttggcggggtttcggatttttcggtttgggaaaagcgatgattgttttgaattgttggggcgttcgaaatttttagggtttcgatttttcgtggggtacgcgcgatttcggcgtagatgttagttcgttgtttttcgggttgagggagcgaggattttagacgattttagggtcgttgtttaggtttagtttcgcgttttttatttcgttatttcgttttgcggttttagtttggagatttacggattttattgcgattttttgcgtagtgtagtcgttttttatttttagtttcgagtttcgggtaatttaggggtttcggcgaggcgagtttttttggggcgagatgtttcgagtcgagtaaaggggtcgcgtattggacggggtttttaagttatagttttgggggttttgaggagtcgtggtacggtttagggtagtcggggttgcggggttcgtgaagttagacgaggttacggatttagggtttttgtaattaagatcgcgagcgattgtggattcgggacggatcgtataaaggaggaagggggaattagaggggcgttcggtttaggacgtgttaggtttgggcggggcggaaaattgatattagggcgaggataaggatttcgtttttttagggttgttaggggaggggttcgttatcgttattttttatgggttttggtttcgacggtgtttaaagggcggagggttgggtcgggttggtcgtattcgggcgttgttggcggttaagttggatgggtcgttagtgagtttcggtgcggtatcgttggtttaggttcgggcgcggttggatatggttatttattgcgacgatttgggttttttttcggtttcgttcggttaggtttaggttatcgcgtatttttcgggttatgagttaggggatttgggcgcggtgggcgggggtttttttttgtgggtgaacgcgttagcgtttagttttaagttttacgtttcgggtttcgggtttgcgtcgttttacgcggtttcgagttacggggttttcggttcgtttttcggcgtttcgggcggtttggcgggcgtcgatttcgtttggttgagttttttcggttagtaggagttgttgaggttggtgcggtcgttttatttttattcggcgtttatcgttatggttatttagagcgcgtcgttgcggaagttgacgtttagttagatttattagtacgtggttggtaatttttttttttataagcgtagtaaggcgggttggtagaattttattcgttataatttgtcgtttaacgattgttttaagaaggtgtttcgcgacgaggacgatttaggtaatagcggcgcgtcggttcgtttcgtttaggattttttattttttcgtcgggtcgcgggtatttcgggggtgggagtattttagataatttaatttttttttgcgcggttggggatattcggggaggagggagaaggggaagaagtgtttgggtatggataggtttttagatagcggttgagtttattataggttcgcgtttatagtgcggcggtttcggggtttttaatttttgtgcgttttttcggaggaagaagcgggagagttagtaagttgggtgattttgggagtgatttaatttttttgggttttagtgttttatttggtaaaatggggaagatagcgtttattttaaggatgggtaaaataaataggatgttcgtttggaaagttttggagtttatttgggggtttggcgtggtttgcgttgtttttggtagagcggttggcggagttttattattagtatttcgtaggtttttttttattttaacggggttcggttttttttagggttttttttttttttttttttggattgttattttttttttagttttgttgtggaggtttatcgggtatagagtgttcgttaagggtggaatgggggcgaggatttagattttttgtaagggttagtaggggatttttttgaagttgattttttcgttggtttatattacggttcgttaaagttcgaattttttgaattgggttgtttttttttttgtaggtaaaggtaattattggattttggattttaattgcgagaagatgtttgataacgggaattttcgaaggaagaggaagaggagagttgaagttagcgcggtcgtgcgttcgggagttaggagcgtgggaggggtcgaggcgttagcgttggagttttcgagcgcggtttgtttggatttgtaggtttcgttttttttattcgtattcgaggtcgttatttgttttttcggtttcgtttttgttatgagcgttttggttggcggttttggtatttttttcgggggtttggcgggcgatttttttttcgggaggcggttatcgatagtcgttatttacgttttttagatttttaattttttttttggtttcgtttttggttattagatcgcggtcgtcggttttcgttttagttattttttttatagtcgggaagggatcgaagtttgaagggaggttggaggttagtcgggtgcgggtttagaggtgttgagtttaggttttcggttttttttggtgatagttttacgtgttggcgttgaaggttttggtgttttgggaggaagcgtagagtcgggggcggttcg

SEQ ID NO: 6588 - DNA, 1860 bp, Artificial Sequence; identical to SEQ ID NO: 6360
  Description of Artificial Sequence: Synthetic polynucleotide

SEQ ID NO: 6589 - DNA, 1422 bp, Artificial Sequence
  Description of Artificial Sequence: Synthetic polynucleotide
tcgtgtagttcgttcggcggcgttttcgggcgagggtttggtgttggggagcgagcgcggagcgaggtgtttttttaaatacgttttgtagtgtgacggcggtcgttcggttggaagagttatttttattttgcggtaggagttcgttcgtcgttatcgttcgtttcggtttttatggttacgcgtttgttttcggtttcgggttttcgttgtcgtcgcgggaggtgcgcgtagaggcggcggcgttgttggtcgggttgggtcgttcgtgcgcggggttgtgatttatcggtcggcgtcgtagtttcgtaatttgttgataattcggttttagttcggtcgttgttttcgcgaatggagagcgggttttcggcggggggagcgtagcgcgtttgttttcgggagcgcggttcggtcgtttcggtagtcgtttcggttatagtaggtgggaaggacgcgcgggtttgggcggcgggagggacgcgcggggtcgcggttcggtagaaaagttcgcgtttcgaggtgatattggtcgcgaggaaagtagtttcgagtaattttcggtttcgttggggcgggaggcgttacggataatttagggttttcgtttcgcgcgttcggttcggagttcgagttatatttaggtagagtaggcgtcgcggtcgggttggggcgggcgggttattcggtgtcggttttcggtgtaaatttttcggcgcgtttttggttttgtgtagttcgagatggttgagtttggtttcggagtcgggagtggggcgtagattgatttttaaatatggagaaggagacgtatttgtcgttggcgcgttcggttcgagttttttatcggtttttatcggtatcgttttcgttagttttaggcgtagtttttaggtcgttcgcggaggggagggagcgataggggtcgcggttgttttttggcggggtcggggttgcgagttgtttttcgcggggatttttcgttcgtttcgttgatcgtcgttgtttttatagatgggagtagttttcggattgcgttcgtttcgtcgcggttattttgaggttaggggttcgggagcgcgattttttggtcgtcgtttgggattttgattttttagaggttatggaggttggcggggagtagggcgttatttgatcgtttttttttggacgttttttttagcggcgtttacgttttcgtaattttgtagcgtttatggtgagtacgggggtttcgggggttttgtagttgggggttaggtcgttgcgggggggcggttattcgtatggggatttttaggttggaaaagttgtggaatggcgagttggtgatcgggttttcgggtttagtgtcggggtgggaggttttgtggagtgggggtcggggataggtcgcgtgtttgggtatttttgtttttcgcg

SEQ ID NO: 6590 - DNA, 1479 bp, Artificial Sequence
  Description of Artificial Sequence: Synthetic polynucleotide
gcggttttttttaagttcgaagtagggattcggttttgcgtatttggcgggtgtgtttagattgtaattttcgtattaggtatttaagaacgtgttttggatatattcggcggtgggagcgggtgtttggtttgtattagggatgaggggtggagtagcgaaagcgttcggagcgcgtatttatttatattttttaagttagggcgcggtcgttttgggcgcgaggttttaagttaagtttcgcgttcggttaggagtcggggagtattttaggttttcggtttggggtcgtcgttattttattttgcggcgcgtatttttgatttggtttcgtttttcggcggtcgcgagtagcgggcggagcgtaagtagagaggcgttttgggttgtgcggtatcgttttttttcggtgtttggggagggacggagggatcgggcgggagagagagaaagtttgatcgatcggttggcgaagagttgtatgtaatcggtgggaggtcgggtcggttgggtttggggttcgggtttaggttcgtatcgtttttcggtaggtttttggcggtgagcgcggacggttcggaggcggcggttttgagttggtaggcggagggttgttttttgcgttcgtttgttcggcgcggttcgaggatgcgggggggcgatgttcggggttagggacgcgttttgttattaggcgttgtagttgttggtcgagttttgtgttcgtggggttttggagtacgatagttgttaggattttatttattatttgcgggatcgtgttagatttcggtttcgcgatttaggtgagtgtcgttatcgtcgtttggagggatttaagggttttgggttgggatttggggtcgtatcggggtttgaggtagaatagcgacgcggattgggagagggcggggggcggttatcgagttaggagagtgattaagaattagcgtattgtggtttgatgttgtaattaggcggggattcgggcggtggttattgtacggaggtcgatttcgggtcggttagggtagggttggagggattacgttcgttatttgcgtttttatcgttaaggtttttgggggcggttttttagtttcgagttacgttttttatttttcgggttatttgtatttagagcgaggggaggtcgcggcggtttcggagtcgtgggaagggggacgaggtcgaaggaaattttgggaagttgggagttggggacggtttcgggttggggtcgaattttatcgggtgttgtttatttttttttttaagcgtttagtttttttttttggtatggggtgagaagggcgggacgcgattcggcgttgggtcggggatagggtgtttttggttttgggtagacgggtttgaattcgttttcggcgggtcgtacggtatggaggtggtttgggtttgggcgttaggttcgattagcgattatcgtcggttacgatggggttcgtagattcgtcg

SEQ ID NO: 6591 - DNA, 446 bp, Artificial Sequence
  Description of Artificial Sequence: Synthetic polynucleotide
tcgttattcgttgataataacggaatcgtgggtattggttttttaacgtcgtttcgttcgttttttttagttagtttggtggatatttcggtgaaggttgtagatttttagagttattttttttttaagtagcgtttttcgtatttttcggcgtcgggaagtttagagggagttggtttgtttttatttttaggtgtcggcggcggtttttgtcgtttttcgcgggataggaaggttttgggtagtagtagcgatagagttaggataagtttagaagttagagcgattttttgtattgtggagtacgttatgattgtttacggtggtcgtaggtgtagacgttagtcggaatcggaatcggaatcggagtacgggttgtcgttttcgatcgaatcgcgggcggcgcggacggcgtcgcgcgagggataaggtgcgcgaggcgtacg

SEQ ID NO: 6592 - DNA, 2991 bp, Artificial Sequence
  Description of Artificial Sequence: Synthetic polynucleotide
gcgcgcgtagttagcgtttttcgcggatatagtagtcgggtgttggagaggtttggaaagggcgtgtcggagagttaagtgtagtcgtttagggttgtcggtcgttttttttttttttgttcggtaggggatttagcgcgtacgttagtgtggaggggcgggttggttggttagtttgcgggtttttgcggttatttcggggatttttttaagtttcgtttcgtagtgtttttattggtttcggatttttttttttttagttgttcgtttgggtttcggggcgtttaggttattacggataaatagtttagggcgtttggcgagaagttaggggtgaggaagttttggggcgttgtcgtcgttttttttaattataaattaggtcggataggagagggaggggtgggggatagtgggtgggtatttagattgttagtattttgttatttatagtcggggttttcgagcggtagaaagtttcggttattttttgtcgtttgggttgggcgaagttaggatcgtgtcgcgttatcgttaggatatggagttattgtcgttatcgtttcgcgacgtagatttgacggttttcgacggttttttttgtttttttgttataacggacgatttttatgacgattcgtgtttcgatttttcggatttgcgttttttcgaagatttggattcgcgtttgatgtacgtgggcgcgtttttgaaattcgaagagtattcgtattttttcgcggcggtgtattcggtttcgggcgtacgtgaggacgagtatgtgcgcgcgtttagcgggtattattaggcgggtcgttgtttattgtgggtttgtaaggcgtgtaagcgtaagattattaacgtcgatcgtcgtaaggtcgttattatgcgcgagcggcgtcgtttgagtaaagtaaatgaggtttttgagatatttaagcgttgtacgtcgagtaatttaaattagcggttgtttaaggtggagattttgcgtaacgttattcgttatatcgagggtttgtaggttttgttgcgcgattaggacgtcgcgttttttggcgtcgtagtcgttttttatgcgtcgggttcgttgttttcgggtcgcggcggcgagtattatagcggcgatttcgacgcgtttagttcgcgttttaattgtttcgacggtatggtaaggtcgggattttaggaagtgaggaagttagggcggcgttcgggatattagggacgcgttttcgagggcggggagttggttttgcgggaggtttgggttaggatttttttcgagagagaggatttttttgttttgggtagttgttattggggtagtttgttttggaagtgtgcgggtaagcgttcgagttgttttattgggggcgttattagaatattgtagcgcgaacgtgaagatttttttttttatttatttttatttttaaaatgtaaatttgcgttttttggtgattgttcgtttttggtttggttttgtatgttgtagattttattttttatttattcgtaattatttttttaattaggataggtttgggttcggaattagagttttaggttagagttagggagggggcggttataggaattggtgttcgggtttcgagtcgtttcgcgggtttgatttagtcgtttttgttgtttgtagatggattatagcggtttttcgagcggcgttcggcggcggaattgttacgaaggcgtttattataacgaggcgtttagcggtgggtatttcgggtttttttttgttcgtttttttttttttatggagttgttttggtttttatttaggacgtttttatttttatttatatacgtttatgttttgggaagtggtgtaggagatgaaatattaagtaagtagttttttgttttttggattgtttcggattttaattaaagtttttagtttttaatttgttttaaagtattgggttcgggggtgggaggtttgtcgcggttttatttttgtttattaatcgagtttttttcgcgtagaatttaggttcgggaagagtgcggcggtgtcgagtttagattgtttgtttagtatcgtggagcgtatttttatcgagagttttgcggcgttcgtttttttgttggcggacgtgttttttgagtcgttttcgcgtaggtaagaggttgtcgtttttagcgagggagagagtagcggcgattttatttagttatcggacgtcgtttcgtagtgttttgcgggtgcgaattttaattcgatatattaggtgttttgaggggatggtggtcgtttattcgttcgagggatggtgtttttagggtttttcgcgtttaaaagattgaatttaaatgttttttttttaatagcgttttaaaagcgattttttttgaggtaggagaggcgggagaattgaagttttcgttttcgttttatagggtaaggatatagcgcggttttttttacgtagtatttttttcggagatttattgcgatggtcgtttcgtgtttttcggtgggttagagttgaattttgaggggttaggtttagttttttcgcgtttttttttatgggggtgagattttcgtagatttaagttttgtttcgggatgtatcggttatttgggggggcgtgagatttagtgtatttcggttttaaatgtagtaggtgtaatcgtaatttatttttaattcgtttttcggtttaggattattttttgtaatatttttgtaatttatttttgtaaataagagttgttttgttagagtaggagtttttggggttgtatttatttttgaggtatggtgtgtggtgttatagggaatttgtacgtttatatcgtaggcgggcgagtcgcgggcgttcgtttaggtgattaaaataaaggcgttaatttatatcgtcgtggtttcggttttttttggatatgggtgtgggattcggaggaaaattcgtaaattgggttagttgttttttagcgacgtttgtaggcggtaggcg

SEQ ID NO: 6593 - DNA, 928 bp, Artificial Sequence
  Description of Artificial Sequence: Synthetic polynucleotide
gcgggggcgagggggcgagggttggtcgttcgtgaaaggaaaaataaattttaaggaagtaagaaatcggacgaaaggattttattttaagtgatttttttgaacgcgtttttttaaatttcgcgatagtttaaggagttgcgcggcgcggcggttgcggttaagatttgtgattaatgttatttgatttgagtttatggggttttgtgcgttttgttatttattgttatgtcgttatttttaagtttatttcggagaaattattcgcgttttttgttttaaggttgagttttttgtttattttttttttaagagaaaagaagacgggaggggaaaagagagaatcggagtttttggtttggggtttaaggtttttgtttacgttgcgggggaggtcgtagtagattcggttggggtttttcgggtttaggtggttaaagttgtcgaaatttgttttggatagtagaaagagcgtgtcggaacgtattttgggggtttcgtttttttcgcgtaggggagagcgagtatgtttttgtttcgggcgtcgtgcggtcgtagtagtagcgcggttttttttagtgcgagtcgtgtttggaatgtttcgggtaagcgaagggttagtaagcgaggcgaaacggatattataaagtagagagtggtgtgagttttttcgttttttgaaaagatggtaagttttcgtttcgggaaggttgtaacgttaaggttattttttgtaggtttcggatttttagttttttatgttttttgtcggagtagttaatagagtgagagcgtattttggaaagattggtcggatgtcgggcggcgatagggaaaagcgttcgacgtttggttttggggtggggggtgtggggagggggggtagggagttaacgggcgaggcgaaggaggagggttgcgaggttcg

SEQ ID NO: 6594 - DNA, 1267 bp, Artificial Sequence
  Description of Artificial Sequence: Synthetic polynucleotide
gcgaatttcgagtaattgtttttcgagggggttcgtgcgcgttcggtggcgtcgtttcggtttgggttttttcgaggaaaaatatttattcgcgagggttcggcggtttttcgattcggcggggatgaattgtggtaatttcggtagtttttatcgcggtgcggaagtaaagagggtaatattggcgattgcggttcggaggggttggagcgcgtgaagtcgtgggggcgtcgtgcgtttttcgttttttcgtttcggtcgtaggttttgggatttcgatttcggtgtttcgggtgatagcggttgcggcgtttgtagtttagattttcgtagttttgcgggcgaaggaggcgaacggaatcggtttttagtggggagcgtaataagttatagtagttaaatttcgcgtttttgttcgggtttttagacgaacgtagtcgtagcggggggtcgggtttcgagttttacgtcgtcgtcgtcgcgttagcggtggggggcgggttgggggcggggcggtcggggttgttttttcgggcgtatatgcgagcgtagtattcggcgttgtcgagttatttttttcgtcgttcgttagtaagtttggcggttttaagttaggcgcgttttaggatttaggtttatttgtttttatttagtttcggtgttttttgttaggcggggattttcgagagcgatgtcgatggatttgattttagttgtgtggttttgtgtgtgtattgttaggataggtaagtatgattgtggcggttagagggattcgggaaatgggggtgtttatagattacggcggcgtggggagatttggagtcgagttttgcgttggtttggggaacggcggtagcgtggatcggtttttgggatttttttgttttgttcggagtgatagggtgaaaatagggatttacgggtttgaagatgttttcgttgagtgtttttttttaggggattcggttttaggggcgtaggagtgaggggcgcggtcgagtaggcgtatttttttgttgttagtaatcggtttttcgttttagggagtcgaaattcgtagtagggcgggttcgcgtgtttcgagttttcgaatttgtaaggtgttgtggaaattattttcgtcgattttcgttaggttgggaaggggtagttgcgggagtcgtattcgtagagggagcgttttcggttggcgggcgcggtcggggttcgggagggcgcggtgcggcgagggtagagagttgcgggagaattttgggatttcgcg

SEQ ID NO: 6595 - DNA, 1225 bp, Artificial Sequence
  Description of Artificial Sequence: Synthetic polynucleotide
gcggaagtcgtttcggattatgtatggaaggttaattgaaaagattagtcggggcgtttgtggtagttttgttattttgtgatagtgtttcgtttcgggaaattgtatcgttacgataaacgggatcgtgataaaacgatttttttcgtttttatttgtagattatttagacgagattgaattgtatttgtttttttttcgaggggagtcgcgtttttagggtagtcgaaggtttggggttgagggggggtttttattaaggcgcgggtgggggtcggagttttaattcgatgagaagtgataggcgtttgggggatttgggtttcggtcgggattagcgtaagtagggattttgcggggatatcgtttttttaatagagtaaggtttggtttacgttttcggttttttttaatttttttttattgtttttttttgtttcgtaagttttatttatttttttagttatagagttttatttttaggtataggaagtttttcggaaaaagaaaggttgttttagaaagagatcgagagagattttttaaatttcgggtatagttacggtaatttttagtttgttaatgttaaggcgggcgcgtaaggtcgtttaaatttagatttttttttttatttattttaaaaaataataacgtgttagttattttcgtagatatcgtcggttggtgtttgtttaggagacgttagggttagagcgttatttttagtatcgaaatggtagagagaaagcgtagttttaaatttttttttagaggttaagttttaattattgtgttttttttttagggattgttggcgttttcgtttattggcgatgattatgcgtttagaattcgatcgcgaagtaattaataggaaaatatatggtgttaatttggatgtttcgcgtttcgcgtatattcgggaacgagcggtataaagttttgtcggtcggttcgcgatttcgcgtttttcggggtttgttagtcgggtcgtagcgataaacgtttagggttgcgcgttttggttggggttcgttcgagagatagtttgcggttggggagtttgagttttaaggggagagtttagtcgtcgaaggcgagtttatcggttaagttttggggttcggtaggttttgtataattattttcgtaaagttcgttatttttgtgttttttttttagttacgcgtttattagtttcggaagtattagggggcgatcggcg

SEQ ID NO: 6596 - DNA, 1627 bp, Artificial Sequence
  Description of Artificial Sequence: Synthetic polynucleotide
gcgtagtagagcgtcggagaggagggacgcggaggttatcgaggggttagtagggtcgcggcgttagggtgggggtttttaggcggcgttggttacggtttattcgcgagggcgagcgcgttcggtcggtcgcgttttttgtcgttcgtgttcgggggtgggattcgcgtcgggagttgtcgagtgcgtggagggagttaggtttcggttcgtttgatggattgatttggagatggatcgaattatattatttgtcgtgtatcggtttgttttgtttttgttttgttttgttgttgttgttgttgttgtaaggggtggtggcgagttttaggattttattaaggaagttaagatttaaggagatagagggatatttatttttataatatttttttttatttttttttttttttgcgcgtggtaagtttttttttttttttttttttttttttattagtttttttttaatgaggtaagatcgtttttaataatttgttaatgtttttgtggcgttcggtgggggtcggaatttgagatttcgaatcgttgtgtgtgtgtgtgtgtgtgtgtgtgtgcgcgcggtgggggtcggaatttgagatttcgaatcgttgtgtgtgtgtgtgtgtgtgtgtgtgtgtgtgtgtgtgtgtgtgtgttgttattggatagttgatttattttttaagttgttttttttgtttgtcgtgtaagggacgcgtaaagggttagagaggtttggcggacgcgttaaaattggtaaagttggcggtttagggggaggggtaagtggatttggaggtttttttttattgtgtatttttttggaaaaaaagcggagggggtattaagtaaaagttttttgttaggtagagttagttcggcgtttttcgtatatagttggggttagtaggggttgtttttttgtcgggtatagcgtttttaggagttagtcggggagagttgagttaaggtcgaaggagtcgtttgcgggtttagtcgttttttttcgttcgttggttttagagcggacgttgggacgttcggggtttggtagttttgcgttcggttaggagcgggcgggcgagtattagtttgcgttttggagaaggggcgtagcgtcgtagttgaggtcggagtagtttttcgcgggcgtaggatatttgttagtgagcgttcggattgtacggttttcgggtagtgtttgtcggcgaggggcgggagttcgggtgatttggttatttttattttcggtttaggttcggagggcggtcgttttttatcgtttttttttttttattggtagagcgcgttgcgggcggattttcgggttcggagtagtttatcggttattttatcgtttattcggttttcggtgttttttttcggtcgttttatttagtaatttttcgtgttttgtttttcgattggaaatgttttacggaagcgttttggatagggttttcgttaggcgataagagttcggtgttgagatgtgttacgtttttatttttttattaattatggatggaaataaataaggaagagttaattttgttgagtttttttttcggtaacgagaggcgttttgtagtcgggagggagtcgtcgttcgcgtcggtagtcg

SEQ ID NO: 6597 - DNA, 1857 bp, Artificial Sequence
  Description of Artificial Sequence: Synthetic polynucleotide
tcgcgttgtttaggtaaagggattcggcgattaagatattttcgcgagggtttagggcgcgtttttttcgttaggttttagatttcggttttgcgttatttttttttacgtttcggcgcgggcgtagttagttcggttttttttaggtttttaagtttcggatcgagtgtggggtcgtttttttttttcggaaggagttatcgtcgttttaagtggaagaggagaggaagggggcgggggagcggggggcggggagcggaggcggaggagggggagggggatttttttggtttttacgtggttcgggcgtttgtgaatcgcgtttatcggagggttttatagcgaaatataaaagtagttgggaagcggcggggattcgagtttttagcgtcgggcggagcgtcggatagagtttcgtagcgtttcgcggtcgcgatggggtcgaagcgttcgaagtttcggagtttataaattgtcgggttcgtttcgtcgtcgggattcgggtgtttgggttcggtttgaagcggcggcggcgtatcggtatagtcgcgggagtatgggtaggaggatgcggggcgtcgtcgttatcgcggggttttggttgttggcgttgggttcgttgttggcgttgtggggagggtttttgtcgtcgcggatcgagttgttcgtttttcggtcgttcgaagatcgatttttacggcgttcggttcggagcggcggtttcgcgttcgcgtttcgtttttttttgttttcgtttttggcgtgggacgttcgcggcggttttttgaaaatttttcgggcgttgtttattttggcggtcggcgcggacggttcgtttcggtagtttcggagcgagtttaggtggtacgtgttagttaggtagtttcggtcggaggagagcgtcgcggtgtacgggggcgttttttggagtcgcggtttggaggagtaggtgttttcgggtttttcggaggtttaggcggcggcgtggttggaggcggttcgcggcgttcggatggtggttttggagcgcgggggttgcgggcgtagttttaatcgattggttcgttttgtcgacggtattcgcgtttgcgtgcgttacggtattaattcggagtagatttagggcgaggttttgttttattatttggcgcgtttgttgggtttttagcgttacgtgtcgtcgttggtattggttcgggtggaggttcggggcgcgtagtgggcgtaggtgtaggaggagttgcgcgttgcgtattggatcgagggtagcgtggtgagtttgatacgttggttgtttaattttacggacgtggtggtgttcgcgttttggcgttcggaggacggtcgtttgcgtttttttcgggatgtcgggggtgagttggttaattttagttaggcggagttggtggatttagtataatggatcgatttaatttttttcgattatttgacggttaatttcgatcggttcgtaagtaatttttttagtttgtagtgggattcgcgcgttatgtagcgtgttattagtaatttgtatcgcggttcgggcggggcgttggtttttttggataatgaggcgggtttggtgtacggttatcgggtagtaggtatgtgggataagtataacgagtcgttgttgtagttagtgtgcgtgtttcgcgagcggatcgcgcggcgcgttttggagttgtatcgcggataggacgtcgcggttcggttgttgcgtttttatcggcgttacgagtttcgttttttcgagttggtcgtttttgtagatttttacgtttagttgttatagcgtcgtttcgattttttcgttaagtatattttgtattgtaaggttaagtacggtcgtcg

SEQ ID NO: 6598 - DNA, 2423 bp, Artificial Sequence
  Description of Artificial Sequence: Synthetic polynucleotide
gcgcgcgcgcgtttgcggaggggggtggtaaggatttagaaggggagtttattttttttttcgagtttagttttggggagtcgggcgtttaggttcgttaggttgtaaagagagttgagagttgtttcgcgtttcgcgtagaatcggcggtggaataattagcgttttaagtgtgtgtatttgggattagggggcgggggagggggatttgcggtttcgcggttaattcggttggtgtagatttggggattttagaagggatagtgttcgtttagtcgcggcgattgagggtttttgttcgggcgtagttcgggttagtcgcgtgtttcggggtcgcggtttttttcggaattttcgcgggcggggtttgtttttcggagtcggttggcggggggcgggcggcgtcggggaaggggtcgttatttttttagagcggcggggcgacgttaggcggaagggcgcggggcgcgtacgttttaaatggtattcgttgttattcgagtttagagtcgtgtgggtagtcgcgggttatataagtcgcgagtttggtcgtcgcggggtagacggcgatagtagcggcggcgagcgtttcggagcgcggcggaatagcgtttttcgagtttcgtgtttttcgacgggttcgttcgttcgttcgttttttcgaggagcgtcggttcgggttcgcgagggtcgtcgttatttcgtagtagatttggatttttcgttcggcgagttttcggttgttgtttttcggggggtttcggcgtagcggtcgttttcggagagtttcggcgtttcgtcgttcggtttcgtagacgtcggaggcgttatggtcgttaagttcggcgagttgatgggtatttgttttagttattaggcggtgatgtcgtatttcgtgtgtttggtcgacgagttttcgtagttcgtgcggttcgttaagttgtttaagggtcggggtcggttgcggcggtcgcgttagtttcgttttaagacgtagtcggtgattttcgacgagatttaggaggtggaggaggagggggtgttttttatggaggaggagaaggttaagaagtcgtttttgtagagtttggagtgtttgcgtcgtagtacgtagagtttgtcgttgtagcgggagtagtttagtagttgtaaattgaggaatagtttggattttagcgatttcgattcggttttgtaaggggcgtcgttcgcgggggggacgcgcgcgttcgcggttcgcgcggggatcggcgtgtgaatttcgagagtgttcgcgttttgttttcgggggattcgtaaggattcgggatcgtcgtttttcgcgcgttcggattttcgtttcgttgcgaatcggtcggtgcgtttttcgtcgcgttcgttttggttcgggagcgtcgggagcggggtcgtttttttcgtttttgtaaatgtttattttttaattttttttagtgcgaattttgttgtgagtgtgtgcggggaggcgcgttcgcgttgagtcggcggcgggtagttattttatgtttttgttcgatggtttgtaatttcgattttgtatatcgttttatcgtgttttttagcgtatatttatttatatttacgttaatattttcgttgaatatttttataattgttaggcgtggtcgttgggattttgggcgtagcgcggttgttattgcgtttggaggattgatatttatttttgtattgcgatggttgaaggtatttatttaacgatttttttatttggatatgtttgtgaggtttttgaaaggagataaataaagttaatatatttgtatagtgtagttttttaggtttttgattttttgtattttcggggtttaggtttttaagattcggggaggtgggggaggaggtggtagggggatgtcggattagggagtcgggagtggagttatttttataagtttcggttatcggaacgaggttgcgttatcggtgcgcgggtcggttgtttgtttttttaagtggatttattttcggtttagtgtgtttttgcgtttttggtttattttttatcgtcggtattcgggttgaagtgaagtcgtaggaggggcggaggtagagttgacgatggagagttttttttttcgtatagtttattttttagagttggggttagggttttcgtttcgtattcgttatagaagacgtatttttttttgcgttgatttttggcggcgggtggggagatgtcggagttagtaatgcgagatgtttgggcgttgggattcgagagtgggttggaggttagtttgggttggtcgagagtgtgggtgcgcgttcgttgtcgcgggtaggtgattttttgatcgtagttgatttagcgtagtgtttggcgtttttgcgttgcggggaaaatcgcggtcgttatgtttttagtcgttttttgcgtttcg

SEQ ID NO: 6599 - DNA, 1146 bp, Artificial Sequence
  Description of Artificial Sequence: Synthetic polynucleotide
tcgtcgtaggatttacgttgattacgtttaagtcggtttcgtttattcgtttcgtttatcgttaattttacgcgttttcgttcggatacgcgttttcgtagttttggagcgttcgtatttatttataagttttcgtgtttagttttcgtgttttaggagtttatatatatttcgatttttacgaagcgttttaggtttttattttcgcgtttaggtatcgggcggtcgtttttcggggtttattttcgttgtagaatttgtcgtcgaagttcgtgtggttgtagtcgtagtttatttcgtcgggggttagtacggtgtagaggtcgtcgttggcgtaggggttgcgcgcgggcgcgtatagcgggtcggcggtggcgtcgcgtaggttttggttgtttagtagcgcggggggtcgttcgtttagttttaggttggttaagaggtcgcggaagggcggttcgtatttgacggtgtttagcgtaagcgtcgagaggcgtacgtcgggcgggatgtcgtttacgaataggtcgttggttatttgtatttcgcgtcgtttggagcgtatttcggcggcgcgggtttcgtcgtttatcgttagcgtcgtgcggcgcgcgtcgcgggttagtagtattatgtgttagcggtcgtcggttatcggcgtgtttagttgtagcgtggtcggttcggcgtacgaaagcgtgaagcgtagtcgtaggcggtcgtttattagtagtagttttaggaagtcgtagtcgtcgtcgtcgtttaggtagagtagtagcgcgcgcgtggcgttggtgcgtaggttgaagttgagttcgtcgttgttcgtcgcgttcgtttagcgcgcgtagcgagtttattgttcggggtcgtcgtcgaattttaggtcgttcgcgcgcgtcgttagcgttagtagtagtagtaatagtagcggcggtggtgtcggtcgttatcggttttcggacgttatgtttacggcggtttcggtttcgttcggttttcggttttcgtttaggttttagagtcgcgggcgtatggggcgggagggggtcgggcgtttttcgcgttgagcggggtttttttgtaggtttatagtgttatgggttcggtcgcggggcgaggcgcgtagaggtttagatgtcg

SEQ ID NO: 6600 - DNA, 577 bp, Artificial Sequence
  Description of Artificial Sequence: Synthetic polynucleotide
gcgggtatagtcggtttttgacggcgtttaaggtttcgttcgtgcggcgttgtttattttttattattagagatcggttcgtttagcgggtaggttttattttaatgttaggttaaagtttttattttttggattcgggtttggcgttttcgttttcggcgcgtttttattcggcggacgcggtcgcgtataaggtttagtacggttcgcgttttcgtagttcggtcgcggttgaatatttttagcgcgaagcgggtgggcgttagtagtttcggggacggcggtttttaggtttgaaagttggcggttcggggttgggcgggggcggttattgcgttcgggagtagttttagtagcgataggagttgtagttagggcgttatggcgagggcgaagtcggcggttcggatttaatagacgttttatcgatttatcgggtatcgagttcgcggttagcggggtttgagttttttttttagcggggcgacggtacgtcgattaatgggcgttggtttgcggcgtttgcgcgtttttttgtttataggaggtacgtggggcgcgtagggtagggagagcg

SEQ ID NO: 6601 - DNA, 1721 bp, Artificial Sequence
  Description of Artificial Sequence: Synthetic polynucleotide
acgaagaatcggttggttacgtcgaagatgtttattacgtttcgttttacgggcgagagttttagtaggtttgggggcggggcgtaggttattgcggggtaggtgatttttggtttatttcgtttttcggtttgttcgttttcggggattttatttttggggtggggttggggataaagggttagggttttcggcgtagtcgtttttaagggtttttagagtttaagttgttttttagggttttcggagtttaagtttgcgttagtttagattagtttgtttgtgtaggggattttcggcggtcgtatttagtttcggatttttagacgcgagttcgattttagcggttttttagtttgggttaggtcggggcgcgtgtttcgggttttttgtggttgtatcgcgcgttttgtgtttacgggcgaaggcgttggaattcggcgttcggagttcgagtttttgaaggcgggaggcggcgttcgattttaggggttgcgttgggttgtcggagttaagagtgtttgcgtttttagtttcgcgttagaagggatcggagttcgagttcgtttcggttttcggggttttcgagtaggtgttcgtcgagggttttagagtgtgattgagcgggttggttcggcggtcgttgtttttcgttttcgttttttcgcgtttggtcgcgttatttattgtcgcgggtgttcgcgtgcgcgtcgtcgatgcggtcgtcggggagcgtttggaggtggaagtcgatgtttacgttgtagtagagtcgtcgtagtcgtttgatgtttagtaggtagtcgtcggcgtcgttttggacggtcgtttttttgggttgcgttgttatcggtaggcgcgttaacgagagcgttattaggtttttttagcggcgttttagttcggtttttagcgtgtcgttgggtgtagtgggtgcggcggcgttttttcggttcgtttagggcgttagtaaggttagtaggatcgtcgggagtagcgttatcgcggtcgtttcgggtttcgatatttcggttcgagggtcgtgcgtcggttaggcggttagtgcgttcgggaagttggggggtagagttgcgtttgtggcgtttcgcgggagcgtacggtcgatttcgggtaggagtgcgtaatcgaggaggtgcgggaggtaagcgacggggttttcgggcgtcgggttttatttcggttgtatggagcggcgagtcgggcggaaagcgcgcggttggagttgggattttgaggagtagtgcgcgtttttttgagcgttaggttcgttcgaggtcgagtcgttatatatatagttcggcgtttttttttattcgttcgttttcgcggggggtcgttcgcgtttttttgggcgttcggggcgttgtggcgttcgcggttggtcgtaggtcgtttgttaattagggtcgggggaagggaggaggttggggattagcgtcgcgagtgttatttggagggatttcggtttttatttttggtttcgttcggtttacggatttgttcgtttcgttttttggcggtttttatatttttgttttttagttagttttgttttttgtattttgtttttgtttgttttcgttttcgtttttttttttgtttcggtcgttttggcgtagttttaattcgggtattcgaagtttttagtgggcgtagaagttagcggttgttgtttgtttttcgtttttcggaggtttacg

SEQ ID NO: 6602 - DNA, 1721 bp, Artificial Sequence; identical to SEQ ID NO: 6601
  Description of Artificial Sequence: Synthetic polynucleotide

SEQ ID NO: 6603 - DNA, 615 bp, Artificial Sequence
  Description of Artificial Sequence: Synthetic polynucleotide
tcggcgtttgtcgagcgcgtagcgtcgggcgaggcgcgcgggattagcgggtgttgcgggcgcgcgggttagaggcggtcggcgttttttgttcggtgggttcggggtcgggtcgcgggggtttggggttcggcggggcggcggttttagtagcggcggcggcgcggcggtcgcggagggaggttgagcgcgggtcggttgtgttcgttaagggttttaggcgtcgcgttcgggcgtatttgtattttgtcgcgggaagtaggtagttcggtttggcgttggtttagcgttggcgttttttttggggtatcgcgggttcggtggattggttattcgagaaataggtttatttttttttttttttttttgtgcgggttttcgggacggacgttttaggcgcggcgtcgagtggaggcgagggggttgcggagggggaaggggttacgcgggttacggggtttaatttttgatttttcgcgacgttaagaatgtaggagggtagagttgagggagattttaggtggaatttttaggtggggaaggttgagttgtcggggttgcgggtatcgggaaggtttagggtaaggcgttcggcggtgcgtgttcggaatttcg

SEQ ID NO: 6604 - DNA, 1542 bp, Artificial Sequence
  Description of Artificial Sequence: Synthetic polynucleotide
acggaggcgcggcgttttttatagtcgtttttaatgaagggaagcgtgtttcgaagttagtttcggtgcgtttttttttttttcggcgtttttttttaaatttcgtcggatttttaaaggttggaataggcggtgcggttgtagttcgcgttgtaatcgtaggatatttgatggggcggcggcggcgggggtagggcgtagtttggaaagaagggggcgaaagaggttaaatggtttcgttcgtttttttcgtcgggagaattcgtagcggcggggtatagggggtttaagggttcgtttaaggttaagtcgtcgcggggggtagttagggggttttttttggtcggggagtagttcgggacgttttagggttcggggtatagtaggttttttattattgtcggcggcggtttaaagaggtcgggttttagtttcgggggttttcgtagtacggaggtttcggcggggaatacgtcgagaggttcggcggtaagtaagattgtcgttttcgtgtcggcgtcgtagtcgggttttagtagtttaaagaattttacggttttcgcgtttttttttaggtcgtttaagtttacgttcggtttcgacgggttatattcgtcgtcgtttgttcgggacggtttcgtgaagaaggacggaggtagattgcgtgttcgtagcgggatttttttggtttttgggatcgtcgtggttttcgcggggtttgttacgttttttttcgcgtttttagtgttcgtattttttagttcggtcgtcggcgtagttattttatttttcgtcggttcggtattttcggggacgtggcgtagcgagtcgaagagcgcggttagatttcggttttgtaagttggcggtcgcggcggtttgcgacgtttttcgtcggggggtagttttgtcgtgggtcggggtcgcgattgtcggggcgttaggggcggttagcggtcgtttggttggcgtgtcggcggcgttcggggagggcgggtcggggggcgcggcgtttatgaggtcgttgtagcgtttgatttgtttttgtaggtatttgcggtggtttatttttcgtttcgatttgttcggtttgtttagcgttagtttgatgttgttggacgtcgagttaatgaagttgagtagatcgcgggtggtttcgcgtacgttttttttttcggttttcgatagtagcgtattcgtcggagtttcggttttatcgttttcgaaatagtagtttttgtttagggtttcgaaggcgttttttagttcgttcggggagttttcgaagtcgaagggtacgaaagggtgcgtgttgaggagcgtcgtttgtatcgttatcgtcgcggttttcgggttgttcgtagcgttgttcgtgcgttttcgttagtttttgttcgtcgtttagatttagttttcgtttcggcgcggcgcgcgcggcgtagtttattagtttcgggtttggttcgttgcgttgtttttcgggggagtttattaggttttgtaagtaaggggcggagggagggagcgcgcggcgatcgtttcg

SEQ ID NO: 6605 - DNA, 1542 bp, Artificial Sequence; identical to SEQ ID NO: 6604
  Description of Artificial Sequence: Synthetic polynucleotide

SEQ ID NO: 6606 - DNA, 1768 bp, Artificial Sequence
  Description of Artificial Sequence: Synthetic polynucleotide
gcgcgtcgtgttttttatcgtttttttttttggttcgattggttttggttttttttacgtttttagtttttaaattggcgttcgttttatggttcgtgtaggacgttaaaagtacggtaaattttagggcgatttttagtagacgttttcgacgtatgatgtcgagtcgttatcggttttcgtcgttttttgtcgcgttcggggttcggtttgcggtcgtcgttgcgttttgaagcgtatcgcgtcgtcggggtttcgttatttcgtcgttcgtttttcgggtcgggtttttttcgttttttttaggcgttgtttttattttaggcggtttttgttagttgtaatatagagataaattttcgaggcggggagatttttagggtatcgggatgttgaagtttcgcggtttttatttttaagtttaattcgtgcgtcgtttgcgcgtggcgtagttaatttgggtaagggaagatcgtttggtttatagttggttggaaagtttaggttttcggcggtagtagtttcggtcgatttttcggtttttcgggtttcgttagaagagcgcggcgtaaagtatttatatttttagcggttttaagtttcgggcgagttttttgggtttattttttttagcggtacgaattgcgcgcgatgcgcgttttgaacgttttattttttagtttgtttttttcgttaggttggaagttagtcgcgtcgttttcgtcgatttcgggcgatgttatcgtttttcgaatatttgacgcggagttcggtattaagagtttcgggttaggaagttgttaggtaggggagggttagcgttagttgtggacgtttcgggatagttttttattttagtttttgtttttgttttcggcgcggcgtaaacgtaaaagttttcgtggtcgtagttttagtttcggtggtcgttcgattttcgtcgggatttcggttgtatttattggagaagcggcggtttcgattttcgaggaggcggcggcggttgtttttagtcgtggtcgttatagttattgttcggtttcgttcgtagttgttttagttgtggtttttgttcgtttgtggtatttatagtttttgtcgcggttttcgtagtttttttttttttttatttttttaagtatcgttcgcgtagcggtttttcgcgagagaaatattttttttaaaaaaagaaagaaaaagaaaatgatattttttttttcgtcgtttttattattattttatttttcggttttatttattttttttttttatttttttttgttagttttcgtttcggtgcggggtttttcgttcgtaggattagcgtagtgggaggaggtagaggtgattaggttttgttcggtttgggattttttgttttgaggtggggaggggagaaatgggaagaggtggagtagcggttttagttcgttttgcggttgcgaggtttagattcgagattaatttttttcgcgataggtgaagttttatcggagtagaaagttgttttatttgtattaagaatgcgcgttggagacggttgtttcggaggttttggttcgagagaaaattagttttcgttgttcgcgtttttcggtagcgcgttttttgcgtttttttcgtcggatatttagtagacgtcggaggtcgggaggttaagattgggcgcgtcgtaggtcgggatcgcggtagaggttgttgtgtcgatcgaggagagggttttgtcgtttttatttgttttgggtgtcgagagtttattttagacgcg

SEQ ID NO: 6607 - DNA, 2656 bp, Artificial Sequence
  Description of Artificial Sequence: Synthetic polynucleotide
acgtttttttcgcggtaggaaagtacgttggtgttattttagagttttagagggttgagggaagattcgagttttaaaattagtcgtttttaggttcggcgtcgggaatgttttttagttcgtcgcgtttttttcgtcgttttttttcgcgcgtttttttttttttgcgttacgtttttagatcgttagttattttcgtcgtcgaggtttttttttttttcgtttttttcgttcgcggtttgggaggaggagattgcgagagataagcgcgagggggagattggagaggggtttggtcgtgcgtcggcgtcggttgtgatggggagttcggagtagttaggcggcgagtagtagcggcggcggttgtagttcggagtagataggagagtcggcgttttttttcgtaggttgcgttgtgaattggtttgcggattgggatttcgcgtttttcgttttttttttttcgttgttgttttttttatttcggtttttttttttcgtttgcgaattttcggcggcggcggcggcggcgtttcgagcgtagagcgtttttgttcgcggttttagtttcggttagcgcgcggtgggcgttgcggcggtagtagtcgggggatcggttcgttcggagtaagagcgtcgagtatcgggtgaagaagattacgggggaggcgtttcgtagagtcgtggatcgttagcggaggtaagggtgcgtggggatttgtagcgtgatgatttggttgtttggtgtatcgattggagcgcgtttgtcggagtatagttttagttgttgggtgtaaatgggttgcgaggtgggttggggaggcgagagtcgacgaagcgcgtgggggaaattttttattttgtaaagttttaattttcgcgtagtttcgagtcgtcgttgttatcgttgtaaataggagaagagggtggtttggtttcgcggcgggagtcgggaggtttatacggagagttggttaagtttggggttgaggatttggggaggggttgcgaggggggttgcggattagtgtatttattttcggtttttagtcgtttttgtaggtggatgagaaggtttaggtggcgagtttgtttggtagtcggtgtttttcgggcgtagtgggggatgtttagatgtcgatggatgatgtatttaggggatttcgaggtgtaagttgggttatcgttaggcgaggcgcggcgtagagagggagtttagtttttattttcgttaggaaagggaaagggttattagtttgcgggttcgttttttacgtttgattcgggtttgcggggtttgtggttagggtgagatgtagtgaacggcggcggcggtttttcgattggggacgatattttttacggagtggttggggatagagattgtttttgttattttgataaggagagggaatcggaatgttttgcgagagtgtatgatttttggcgggcgtgtgggaaggttgtttgtttttgaaaagaaagtagcgcgggtttgattatttttaggagtgcggaggagttgttttcggattgggggcgagaacgttaggggtattagtttcgagtttaggttttattttcgggcggttcgggacgaattttttttataggttagtgtgtgtgtagggtaagtgtagggggttgaggggcgttggcggggaggtagtagaggtggtttggattattttggcgcggcgcgcggtgagcgcgaggatttcgttagtgggagtcgttgagttaaagtgtatttggtttttcggtttgtatgatggcgagttcggatatttttagttgtgttgtgatttgaattttttttttttttttttcgttgatttttgttatatgtgtttttcgagatggtttaatattgaatatgattgggttttgcggaaagtaatttttatttattttttatcgttttttttttgtgggcggggggtggcgggggcgtgtttggggtaaggatgtaggggtggtcggagtttggttgcgagttaagagagtcgtttgggttgttcgggatgagaggaataggggtgttttcggggtgtgggtgtgttggcggtgatattttgaggttgtagttcgttggaataatgggtttaaattaggcggtggagaggggttttcggaatggacgtcgggggcggggaggttgcggagattttgcgaggttttcgtgaaggattaggaggggttttcgggagggagtggcgtttgcggttcggagcgtgggcggtcggtggttttggtacgcggaatttggtggatttttagcgtttcggtcgggagttttagttttatttcgtcgtcgtcgcgcgtttaatgggatttagtttcgggtttgggcgaatttgtagtagtcgcggcgggagggagggacgttgggatcgcggtaatgattgaagttttttttttttttttttttttttttcgttttttttcgtttttagattttggcgcgtttgttttttaagttggattttatttttatttataagtgttagataaattcgcgagaattttttttaattcgtttcggttttagttagattagggagggcgtttagggggagggggcgagttgtttgggtagtgtttggggaggtgcgacgcgtttattcggggtttgagcggttggggtttttgtgcg

SEQ ID NO: 6608 - DNA, 623 bp, Artificial Sequence
  Description of Artificial Sequence: Synthetic polynucleotide
gcgtcgtagcgttttttgtttataaagttttgttagtcggagaaggtgtagttgttttaagagaagaagtgcgaggtattgggtacggttagggtcgttttcgcgttttgttcgtcggttcggttttcgtggggttcggtggttcgtattaaggggaggagatagagtagtaagaggtgagggattattttgtaggagttattttttttttgggagtttgcgggtcgggcgttttttttcgttgggatcggagcgcgtagtcggggtgcggggcgtatagtatataaggtcgtttcgaggagttagggagttcggacgcgcggagtatcgcgtcgttcgttattagttcgcggtcggtacgttagtttcgggtttgttggagtatttttatatttttgtttttattaggttgttagggagcgtttttgtttattgggtagcgcggcgtttttcgcggcgacggtgacgcgttttggttttgataagtttggttttttttattttatcgggtggcgtcgttgttgattttacgtttagtcgtttttattttcgtttgaaattttttcgatagggtttcgtttcgggggtttagtttttagcgcgtatatattcgcgtggtgtcg

SEQ ID NO: 6609 - DNA, 1967 bp, Artificial Sequence
  Description of Artificial Sequence: Synthetic polynucleotide
gcgcgtcgtttttgttgtttagtcgaatttcgttttttttagggttgcgttgtacggggttgttttttcgagtcgttagcgttcggcgttttttcggcgcgttcgttttttttattttgtgcgttcgcggcggtgggagtagagtcggtcggtttttggggatttagcggtcgcgttggtgatgggtagcgttttttttttaaaggcgggcggcggggcgggggaggtcgcggttcgggtggtgtcgtcgtacgggttcggatttcgagggggaagtggtttgttagtttcggtttcgggaagagtgaataataaggttagggtagtcgttttagatcgttatatttttgggtttaataaagttaggatcgttgttttgtttttttcgttttagaagaataacggtttgtaaaatggggtaaaatgggtagaatcgtacggtcgttgttgttggtgtgatcgttgttgtattttagtcgatatgacgttagttttttatttgttaaattgttggttagttgtaaagtttattttcggtcgcgagtattgaaggatgggagggtcgagcgtcgcgttttgataggaggaagtgcggaggggcggagggcgaggagggcgtgattggggttgtttggtgtgtgcgcgcgcgtgtgcgcgcgtgtgtttttatacgcgtcgcgtgtttagtgttgtacggggcgggagaagaatggtaggtagtcgttcgaaatatttcgttttgttttttttttttgggcgaggttttcgattttggtaaagtgtgaataatagggagttgggaggaagatagtagtgatgttgtcgcgggtggcgggggttgcgtcgtcgtttagagaatttcggtagtgtgtagggaggtgtattttattttggttatttttatttcggtttttttggaaaatttttttgtgcgtgtttatttttttttttagttgttatttttttatttttatttaaggatttgcgttttggttttgatggacgggagggaaggaagaaaagtaggggtcgtagagagttgggtgggttgggcggatattttgggcggggggcgtgtgttgggaagcgatcgaggaaagtcgggcggaggggttgtgtgtcgcggtcgtagttttaggtatcgttgtatttgttttggacggtcgattttcggttggggagcgtacggggcgggttagggagtatttagtgcgtttttttcgcgggcggtataagagtagcgttcggtcgtcgtttttagttaattcgggttttttttacggcgattaattagtgcgaagttggttgggcgggaagtcgcgagaggtttttattgcggcgcgggtggcggttaggagttgttaggatagtttttcggtgttttagtttaacggtttcgtttatttatcgttaagagaaatttcgttttgcggtcggtttttcgtttgttcggtagttttcgaggaaataaaatggagattaggtggttatcgggagtgtttttggttcggtcgttcgtgttcgtttattttcgttttttttacgtcgatttggagtattttatcgttttcgttagcgtttattttcgcgtcgcggaattcgggtttgagcgcgtcgtcggggagggtattttggtaggtatatttacgcgcgtgcgttgatcggtcgatcgcgggtcgggggttttattgacggcggggcggggtcgtggtagggttcggagaggaggggtggggattaagtttagttcgtttggttttgggttttcgttgttatttgggcgggggttatttcggttatgttttttttcgcggtgttcgtgggtgtcgcgacgcgatttgtttatatggggcgggggaaggggggtgtttttgagatattttcgttttcgggtgggagcgtgataatggagttcggatatttggtgggttttttgggggatcgtttggcggttttttttattatcg

SEQ ID NO: 6610 - DNA, 2558 bp, Artificial Sequence
  Description of Artificial Sequence: Synthetic polynucleotide
tcgcgatagttaaaaacgggtgtttcgtttcgataatagattttcgcggattttttggtatttggtttattagcgttcgcgaattttgtttcgggagatttattgaaattcggatgtttaagtcgggaggcgcgtagtaattaggaggatgagagggtcgggtttgggttaggaaagcggttttttaaaatagatgttagggggattgtagtttcgagttatgagaaaaaagttaaaggcgagatgatacgtattgaattggggtaaatattggaagaggagataaaattgcgtgtttgagtatcggggtgcggggagggggggataaaattcgtatttagtgtaaattaaaattttgggagtaggtgggggttgttgcgcgttttttatttttagtttttttattaaggattttgagtttttatgtatttttgttttttggttttttttttttttttcgttcggtcggtgagaggcggtcgtcggcgttttagtagtagttagatgttaggcgaagttcggagcgcggagcgtggggaagggaggggaagggaggggaggggaaaggaggggtggggcggggagcgcgcgcgggttcggttagtgcggggtggtgggcgggttgagttcggggacggcgcgggaggggggagggaaggggggtagttgtgggtagggagtcgggttcggtcgttagtattaaagatggagaggcgtcggggttttgtaggggagggggttcggcgttgacgtgggacgcggcggaggcgtagtagtcggtggtgatttgttaatttcgtagtagagaggagttgagggcgatgagagcgggtattgcgaattgtcgggcgatgttgtcgttgtcgtcgtgatacggagagtaatagttttttagtaatattttttttcgatataggtatatatttttcgataggtacgtatatttattttatagtgttcggttcggttgcggtgagtgaggggtcgggaagaggcgtatcgtttagcgagcgtcgcgcgtcggggtttttcggggttggagaggtttggggggcgcgcgttcgtttcggttattcggtcgttgggtttgtgttttttttatttggcgtgttttttttttgtcgttgtagtcgtcgtcgttatcggttgggggtcggttagaagggggagtttcggttgttagtttgggcgtagttgtttttttagttttttttttttagggtacggtcggggtgagaggtggggggcgtagcggtgtgcgggggttgagggcgtgagtagaggggtcggggattcggaggttttgtatcgttaggggttggcggagtaatagagttcgtgggtgtttttatgtatgcggatcggtgcgcgggcgtaagataaggttgtggtttatttatttgtgtgtttattcgtcggtcggttgggaagttagaatcggaggagttgacgagtagatttgggggcggaggggagtaggattgggattgtttacgttttgtttttttttgagaaaacgtggtgggtttttttttgattggatttgatttttattttttttttgtaggggagggagggaagttttagagggtttgtagcgttgcgggtttttttcggttttcggcgggatcggcggtgatatcggagttcgtcgtgcgttttcggtcgttttcggtgggtgtcggtttttgtatttgatgcgttcgggatgttttttttattttggcgcgttcgtcgttagttcgtatagcgtttcgtatattttcgtacgcgtttgaaatgcgtacggtttcgtcggttcgcggaattattcggacgtacggagcgtttcgtatcgattcgttcgtcgttttttcgagacgttcgtatcgtgtttgggtcgggcgcgttggtcgttggcgtcgttggttagaggtttgggatttagtcggtcgtttttagggggttacggttttgggtcggagagggagggcgggtagattttttttcgtttttttttttataattcgttgcggggtttttgtgtttttttttcgtcgcggggcgggttcgttttttttgtcgttttcgtcgcggagtttagttcgttcggattgtcgtcgttttttttcgtttttttcgttttttttcgtttttagtttagtttttttttttttaggagtttagtttttcgggaaaagttgtttttttaagtttgttgaagtcgtttttaagtttcggtgggggtcgttgggaattgggggggtgtgagagcgcggtcgattttcggagttcgggcgggttatcgtcggttttttttcgcgtcgtttggttggacgttgtagttagcgttagtcggatcgcgggcgtcgagcggcgggtgggggagacggttgttcgtgggcgtttagattttttttaggatttaaaaggtttgttttagggcgttaagtttttatttttttggttgtttttttttagtttttagaaatttcgatgtttgcgggaaagtacgcggtggttcggttcggttgaatgtttattttaattttgacggttttcgtttttatttcggggcg

SEQ ID NO: 6611 - DNA, 2558 bp, Artificial Sequence; identical to SEQ ID NO: 6610
  Description of Artificial Sequence: Synthetic polynucleotide

SEQ ID NO: 6612 - DNA, 1508 bp, Artificial Sequence
  Description of Artificial Sequence: Synthetic polynucleotide
tcgtttcggggcgagaaggagaaaagttagagggttgaataggtgacgttgagtttgttggagcgtgtgtgttttattacgtaagggcgcggagttcggtcgttttatttttcgttatttgcgcgttcgggggtacgttttttgcgatagtttggaatttagattatttgcgtttgtttggtttcgatttagtgtttaggtggttttagtcggaaatgtttgtttttttttaatttttcgatttcggttgtttcgcggattaggtacgtagcgttttagtcgtaggtttggatatgtcggatatttggatttatttttagtaatttttttttttcgggaagagggatacgttttttagtttgaagatttgtttttaggtttaattggttaggcgcggaagcggagaatttcgtattttggggcgcgttgttcgaggtggttacggtggcgtattaagtcggggttaaagtcggggtagaggggtggggtagggtcgggggagggtgatttttgggtttggagaataaatttgttattcgagggatttttagttttcgggatttttattatttttattttgtttttagttaatgcgcggataagcgttatgcggtgcgttaatattcgcgttagggttggggttcgcggcgggagagggacgtacggatatagcggaggaattagtcgtcgagttcgaggtttgaataagtaaggatttttaggttaagagttacggtttgaggatttttcgattcggagggtatttcggggttttagtgttattaagtcgtaggaagagggtaaggggttgggggaggggtttagggtagaattgtcgtcgtgtagggagtagggagatgaggggtttttttgttattatttttacgggcgcgttttaaaacggtagacgcgggtggttggcggagcggtcgggggttgatttttattcggtttttgttagggtgtttgttttttttcgttgcgttttattcggggttttgtatttcggtcggtttttttacgtatttggagttcgtcgggtatttcgtttcgtcgttagtcgcgttattttggtttcgtcgttttcgtcgtttagtcgttcgcgtaggttttatttttgtgtaaagagtttaggagtaggaggaaagttattagttatatgttataaagaggttttatttttcggggaggtggttttgtggtcggtcgtgcggtagcgtttttttttcgtttagcgcgtttttagtcgttcgtattcggcgtttcgttttttttgttttttagtttagcgttcggttgcggcggcggttttttttttttcggtttttcggtttttgttattcgcggggttgggttaggcggtcgtttttttcgttttttcgcggtatttcgggtggtgagcgtcgcgcgagttcggagtttagacggattttagttttataagtttaggaataggagcggcggttcgggttagatcgtttcgattcggtttcgttgtttgagaggcg

SEQ ID NO: 6613 - DNA, 1119 bp, Artificial Sequence
  Description of Artificial Sequence: Synthetic polynucleotide
tcgggcgcgtaggcggcggttagcgttggagttttagttagttttttttttttacgtgcgcgttaggttttggttattttggtaattcgtttcgtttagacggtattaggtagttgaatttagttttttgttacgggggaaaatgtttttattgaagcgtcggagcgtagtttttgttttttattgtaagcggcgttatcggattttatttgtaaatttattagtgtgcgttcgcggggagggggttcgggaattcgggttcgggtaatcggcgtcgtatgttaattagggggcgttcgttttcgttttgttcgtggtttttttttttcgatttttcgacgtttcgggaggagtggggtcggagcgtagggttgggaagggttttaggatttaggaaggagacgggtgttttttagagaggattttatttttttcgaggttcgggcggttttcggtttttttttggggtgtcgtagtttttttcgattcgttttttcgtagtcgtagtcgttcgggtttggaggtggtcgggtatcggtgtcgacgtcgcgagggtagcgttcgcggcgggaatattaatgtattttaaagggtacggtcgtcgtcgtagtaggtaattagttggatcgcggcggagcgcgcggaggtggttgttggttgtaaggattgcgtttagttttcgtttcgtttttcgaggttttcgcgtgggtcggcgggtagtgcgtgggttataggaagcgggttgattggattcggtttaggatttcgtataagggtagttttttgtttatagttttttttttagtttttcgtttttttttcgtttatcgtttttttttttcggcgatcggtttcgtcggttgcgggggggtggggggggtggggtgttttgtgtagtcgtttattttttgtttcggtttcgtgttttcgttggggattgtttgcggtgagtttgtcgtacgtacgttagggtcgaggtagtgatgcggggtagcgtgggaggacgggttgcggagttcgcgttattttgtttgtggggagcgttgtgtttgtttttttgttagcgcgtttagttgtttcggtcgtcgttacgcgggattgtttgttatgtcgttatcg

SEQ ID NO: 6614 - DNA, 1119 bp, Artificial Sequence; identical to SEQ ID NO: 6613
  Description of Artificial Sequence: Synthetic polynucleotide

SEQ ID NO: 6615 - DNA, 653 bp, Artificial Sequence
  Description of Artificial Sequence: Synthetic polynucleotide
gcggagaagttaggagcgatgaggggcggggcggttttcggcgtttttttttttagtttcgttttcgcgttgtcgtcggagagggattcggggcgtagtcgtttcgtttttgtcggggttttaggaggaatttaagaaaagagagatggagggaggaaatggtatcgttttaggaaggggtaggatttttaggatcgaaggcgttttttttttttttttttttagcgatattgggaaataaagtttcgcggttgaaaagaatattacgcgcggttaggattcgagtagggttttggggcgttaagggcggggaaaatagggtattcggagtgtaggagattttttagggtcgttttttttttcgggggtgttttgaggaatcgcggcggggattcgtcgttggtagtttgcgggttttggtgttagcgcgtatgggcgggttgtgcggacgtggttggttttttaaaggttttagatttcgttcgggtcgtttagttttttaaagttgtgttttaaagtttaggggagatagcgaggttggggacgtcgggaagtttttttgaggtgtggggtttttgagtagaaacgcgcgggggattgttagggttgtagaaattttggttcgaggcggtggttggttcgttttattttcg

SEQ ID NO: 6616 - DNA, 1768 bp, Artificial Sequence; identical to SEQ ID NO: 6606
  Description of Artificial Sequence: Synthetic polynucleotide

SEQ ID NO: 6617 - DNA, 1101 bp, Artificial Sequence
  Description of Artificial Sequence: Synthetic polynucleotide
gcgttaagtcggttttttaatttggtttgttgaacgtaaatcgttgagagtttgttgtatcgttttttggggtttttggttgtcgagtttcgttaaggtaaagacgttagtaagcgaggaagcgtagcggaagaaaaataagcgggcgcgcgaggggagttttaggagggttgtcgagtggttggtaggcggttttcgtttttttcgggtggtttcgtcggcggttgacggttcggaggacgcgcgtttcgaaaagttagatttcgggcggcggcgcgttacgtcgcgttttttcgcgtttttttttcgttgcgtttcgggaaaggaatttgttttttcggttttaggattggggagtgtgtcgcggggtcgagggtggggaatagttagagggagacgcgaattaggtcgttggcggagggtttagggggagcgtagaggcgacggtttttatgtcggcggttaatatgatggagaatcggtcgttgttcgttttgtaggtgttcgagtcgtagggtgcgttcgagggtagttcggtttggtttagttcgtcgatttttacgtttcgtcgtcggcgttttaagatgcgtcgtatgaagaacgtataggagtagagtttggaggtcgggttggttcgggatttgttcgtcgttttggttttcggtaaggagtttttgtagttgtcgtttatcgagattacgttttttagcgacgaggatatttcgtggtttaattgttttatatttagcgcgttttcgcgtcgaaaacgttttttttttcgtaagtggttgagggtgagggagcggaaggagtgtagtgaaagtaggtacgttttcgtttcgttcgttttttttttttttttttcgttttttttagagtcgtttagggtttcggggtattttgggggaaacgttttgggggagaataggagttcgttattagaggcgtttttggagggcgttgcgtttggttttagggatggtggtatttagtttttacgcgtgttattcgttttttaatttagggtgaggggttttatgttgtacgatacgtttacgtggggttttacgttgtattttattttttttgattttcgtagcg

SEQ ID NO: 6618 - DNA, 1101 bp, Artificial Sequence; identical to SEQ ID NO: 6617
  Description of Artificial Sequence: Synthetic polynucleotide

SEQ ID NO: 6619 - DNA, 2341 bp, Artificial Sequence
  Description of Artificial Sequence: Synthetic polynucleotide
gcgtggttcggagagcgtggataaggtaatttgttttggatgttcgggagaagggagttcggtcgaaagggtttagtttttcgaggttgttttaattggggcgcgcggcggtttaggagggaggcggggaggttttcgggttgggtcggggaacgtcggtttttaggttgggtagggaggacggtttagagcgcgggttttcgggttttatttcgggaaaagtttgggtttgttttgcgttgttgcgtgttgcgtttttgggatttgttgattgttttagagggaacgtttcgcggtagtgttagttttttggggattaggaagggcgatttttgtttgggagttagtgtttgggtcgtcgggttcgggtaagcgttgggggtttggttcgagaagatgcggataggtggtttagggcgtcgcggattttcgttttttgcgggtatcgggagtttagggtcgaggcgcgtcgtttcgaggggtttttttttttaataatgcgttcggaatggagttcgcgttttgatagcgcgggttagttcgaaatcgtttagaattcgtttcgatgagtgggtgagtcgttttgggagtttgtcgcgtttcggtagcggagggtttgagtggaaaaatttttattggatgtattttttaatggttggtttgtttcggttttcgttcgagtttttttcggtagtaggcgttgggttattcgtagttttagttaattttttttttatattttttttattttatttttaaaaagtttgttttcggttggaaaaagtattaatgaacgtatttgtgggaagaaacggaaagtgaatgagttaggagggttattttcggttaatcgttttaggaaaagtaaagaagttaaaggtttttggttttggattttgggggaaggtgatggggggaggtttagatttcgggaattagggcgcggacgttgggcgtggatttcgttattgttttcggttagtttttattttttaggagtaagtattttgtgtgcgtagcgtatgaatgtgtttgggtattttcgcgtatatttatatagtgtgtgatgcgaaaagtaggattagtaggggaggaagagggggtgtggggggggagggaagatgagggagagtagaggggagagaagagagaggagagttcgaggcgagagagagagagagagagagagagagagagagagagagagagagagagagataggatttttttttcgattcgtaaagtgaagttattttttaaaattagttgaaaaaaaagttttattcggttaattgtttttttcgtttcgttataataataaacgtgtataggggagtgagggtagggcgttcgtagggggtacgtagggagggtttagggcgttagggaggtcgcgtcgggttaattcgaaggggttgcgaggttaggttgtaatcgggttaatgtgtggaatattggggggttcggttgtagatttggttaaatggacgggattattaaggtaagcggcggggtaacggacgcgggcggcggggatcggtcggggaggcgaagcggcgggcgggtaggtgcggggttcgcgtttcggaagacgtggtttttttttttttttttcgcgtttcggtttcgcgtcggttttttcggcgttcgggtggcgagttttattcgcgggttagtcggttaggcgttcgtattgagggcgattttttttcgaaattttagtttttaaagtggagtttcggttttttttttatttcgttgttcgtcggggttgtaggaggggacggcgggaaatcgggggattttagggtacggaacggagttaagggcgagagatttcggggtttattatttttatcgatattcggggttttcgtggttttagcgttaggtattgggtttttttttcgtagaggcggaatacggcgggggcgggggttgtagtcgttcgggttcgggtttttgtttggtgggttttggggtgggtaagtggtttcgttgtacgagggtaggggtgtaagtgagtgtgtcgggggatttatttgagcgggtttttttagatggaagtttttgtttatatgttagcgttttttttttttttcggtatttagtcgttcggttttaggcgttggagagtcgtcggtttcgcgggatttttgggtcggtttcgtcgttttttcggcggggaattttttttagttttcgttcgtatagatttttagcgtttcgagttttcgtttttcgcgtttaggcgtgcgtcggttttaggattagggtttttggagttgtcgttttcgaaagggttttgcgtttttcggagtcgttttcgttgtaggggtcg

SEQ ID NO: 6620 - DNA, 3857 bp, Artificial Sequence
  Description of Artificial Sequence: Synthetic polynucleotide
gcgaggggcggggggcggggagggaggcgggtcgcggcgttggtttcggggttcgcggtacggttttttttgtcgcgttgtttagggttcggattttgttcggcgttgcgtttatcgcgagggtgttagattcgtcgcgtcgtcgtcgcgtttttttagtcgcggttttttttttcgtcgtttttttttgtttttttagtttttttttttacgtgtggatgacgttaaaatttcgcgaaaaagtcgcgtggtggtttttcgagcggaggcgcgatttcgtcgtttagcggttttttttcgggggcgtttggagggggagaagggcggaggcggtcggtttttttttttttcgggaggtaggatttttcgacgtcgatcgtcggacgtttttcgttttaaagtttattggaaaatttatttttgtaaagtaaatgtatttttagagttattttcggtcgcgtgaggcgtgttttaagttgaattagataggaagagggggaagttcgggttttttaatttttttttttttcgaagggaggggagtgagatgttaggtgggtgatagacggtaggcgttcgtttttttaatttacgtttgtcgtatttgtcgttttagtaatttagtttcgtttaagtcgaaattcgtcgaagggagtgcggatgtataggtttggcggattttgtttttttttagaacgtagcggtttagcgtttcggcgggcgcggttgcgattagagggtttcggaagcgagtgaatatttgtaatcgtattgttcgtttttatttattttgttttttcgtgtttttcgtttttcgacgttttttttttttttttgttcgtatttttttattttgtttgtattttttttttttttttgatgtgttttttatgtgttttttcggatttatgtgttttttcgtattttgttagtcgggttttcggttttgattgatcgtttatttttttacggagaaatataaatatagttttattttttgggggagtcgaggggaaggtagtggtttttatttttgagtttgaatttagttattattcgttttttatttggtttaggcgtttttgcgcggagaaggcgggattcgaattcgcgttgttttcgggttttgagtcgatcgcggaattatttggttgggaggtattttttaggtaagtttgggagtatgtgtgtttagtgttgtaggtttttgtagaaaagtgtttataaatatttaatattttgttgtattttttatttttaggttttgtatattttttaatcgaaattttaaaacgttagcgtagagggtggggagtcggtcggaaaaagaataaaagtttaataaaattggcgttcgttaaagtttattattagttttatatgggatatatatatatgtattttttttttcgtgaagggtgaaaaggagataaggaagaattaataatttattttttttcgtcgttttttattttcgcgttacggtgattagtttggattttaaagttagagtataggtttttgcgtttttttttgaaatcgaagtttatattgaaagaaagtgtgtatttttgtttagaaggtaatatgcgttttttcgcgtgttaggtggagtgtattttaataagatattagggttttaatatatggttggagtggcgattaaaagggaaaatttagtttttagtttaagttttttagagatatttttgttaattttcgtatttttttacgttttattttacgtgtgagagtttgtaaaattatcggggattggattcgatggcgagttttacgttcgggaatagttagtaatcggaaggggaagtggataggggaattttaagaggcgagtttgttacgcgggaagcgttcgaatttgcgggtttttatgaatgtagagggcgtcgggaagggggggtattcggtcgcgattttttttgttttttttattcgttgttttttttttcgttggaatttttttgtaaagtaagacggagtagggggagggggagagggaaggggcgagagggttttcggtttattttcgagacgtgaggattcgttatttaggtatttttttcggggtgggttgggtttcgggacgattattcgtttttttttcgttttcgttgtttttatttcgggagatttagagttttggatgttttttttcggagaagggggggtgtgcggagtcggggtggaagagattttgttcgtagagttatattaagtgatgtttagaggttgggagtttcggcggtttttgttttttgtttgtcgggttagatttatattttaaaaatatttttcgttttttttttttttttcgttttttttcgttgtaattttttttgattcgtttaaaggtggtttaggtgaaattggagtaatttttttatgggggttttaaaatgtaagtgaatgtttttattcggggtgatttaaaagtttaagtcgggaagtttaacgtgattaaaattaataggtgattgttcggggtcgattgtgtgcgggtgtatacggtattcggttcgggtgttattcgcggcgttggattgttttattttgagtttgtaatttgggttttttagcgagttttttttttttttgaaagttaatggtttttatagtaattagatatttttttcgttcgtttttttttttttttttttttatatataggagatgggatatttattttcgttgttattgataaggtcggaggcggtcgggtttttttttagttttcgttcgttttagcgttcgtttttttttcgtttttttttggtttttttttgatgtagtggggaacgcgttttattaaaaaaaaaaaaaaaaaaaaaaaaaaaaagtaatttgttcggtaataattagcgcgtagtagtaggagttttagagttattggttatgtaaatagagggaggggagacggcgttttaaatttttttttatttttttaaagcgatattttttttttttttttttattatttttttcgttttattttcgtttaaagaggttggtttcggggtttgagttaatcgtttgtatttttagtttattcgtttttttttttcgttttgtagggaatttagtgtacggtttatttagttcgcgttttatttcgttttgttggtttttcgcgtttttgttcgggttttttttttcggtgagggaggtatttagtcggtttcggtgtgtttagagagttcgagttacgttatgttcgttgtacgtgttagtttggttagtatattagggcgttggtttttttttttttttttggagtgaaatatattaaagggcgcggtgggggtggggggtgacgggaggaaggaggtgaagaaacgttattagatcgtattttttgtaaagatagttttgatttaagtatgcgttagagtacgtgttagggtcgatcgtgttggcggcgattttatcgtagtcggtttttagggagaaagtttggcgagtgaggcgcgaaatcggaggggtcggcgaggatgcgggcgaaggatcgagcgtggaggttttatgttttcggggaaaggaaggggtggtggtgtttgcgtagggggagcgagggggagtcggatttaattttttattcgttttttttttttttcgggttattttttagaaagttgtatcggtgtggttacgtttagcgtagatatttcgggcggtttgttagtagatgtaggggcgaggaagcgggttttttttgcgtggtcgttggtcgcgggggaatcgttgggagttttgttttcggtttgcggcggttttagacgttgtatcgcgtcgttttacggcgttcgaagagtttttagaaatacgatggtttttgttcg

SEQ ID NO: 6621 - DNA, 1439 bp, Artificial Sequence
  Description of Artificial Sequence: Synthetic polynucleotide
tcgttattatcgttattttttcggaattttttgggttcgcgttagttttatttggttacgattcggtaggcgaaggggtgcggaggcggttttattagttcgtttttagttttgtttcgagagagaagttcgttgagagggtagatagttgagaaattcgattttaattttttagtcggcgtttttcgaatcgtttcgagagtttagattagtcgggtagtggatttcggagtaaagtgttatgtatattttggagaggagggaggcgtggagggaaagggcggtaaaaatgaaatgtttttaagttagtttcgtaatttttttcggttcgagggacgggcggagggtagaggaggtagcggcggttagcgcgaggtgagggatttatttgaaggtgaggacgtagagcggtcggtaggatttgtggttggtgttttcggttatgtttttgttttagaagtcgttggtgaagatgttttagcggagcggggcgtcgggtcgtacgtcggggttgtttacgatcgtttatacgtcgtcgtgtacgaattcgttttgtagggagcggtcgtagtataggtagtttgtttcggttagtagcgtcgcggtttcggtcggcgttagttcgtagtttcgtcgtcgggagggtgtgcggttttcgtcgtcgtttcgggtagaggtggttattattatcgcgtcgtcgtcgtcgttgttgttttggtttttttcgggcgtttggtatttttttttatcggggtttcggcggcgcgcggcgtttgttcggaggggggttcgggtatggtgttgcggtagttggattcgtcgcgagtttttcgcgtttcgtcgtcgtttgcgtcgcggagttggtttagttgtaaataaatagtagttttttcgtttttttcggttatcgttatttttttcgttttattgcgtatgttcgttcgtttttttttttatcgttttttaatttcgggacgcgggtcggttttttcgtatagttcggcgttttttgttttcggttcgttttgtttgtaggtggatcggggttcgcggcgcgcggttgttcgggagttgcggggaaggatattttaggtttttatttgcggtgttcggttgtgtttatttttacgttttcgtttttatttttttttttcgaatggggttgggaaggggtatatttggcggatttttttcgggggatttaggagggtttagtaggtgcgtagtttggaatttttatatttattttttagggagaaaagtgtcgttgtttttcgggaagttttcggttttttagtattcgggataatagtagcggcgttcggagagacgttttttattcgtttcgcgttcgcgtttagtcgtcggttttgtgtttttttgttcgggtttttttttattcgttcggcgcggcgtttcgtttggcggaggaattcgcg

SEQ ID NO: 6622 - DNA, 1288 bp, Artificial Sequence
  Description of Artificial Sequence: Synthetic polynucleotide
tcgataggttgtagtcgcgggttatttcggaggttaaggtagttatttttgtaagggagttttgcgtttaagtatggtttgttcgtttcgtttggtttttattaataaggtcgggattagcggtcggtggaacgagcgagagtagttttagttttataggtgagtcgtttttataagtagttaagtcgcgagtcgtttcggcgtcgttatcgttcgtatttatttttttatttcgggagggagatgggaggcgtgggagaacgcggagaggcgcggcgaggttgggagcgggagacggcgtcgggaggcgggaagcggattagagaatgggagaagttcggtaggtggataggaggaaataaaatttaaacgttttattttcgaagtcgttaggagttgagcgaaggaaggagcgaggtaggaaagcgtggcgttttaaatatgtcgcgggagcggcgcgggaggcgtagaatttcggagtttgtagtttagcgcgcggggttttagcggagcgcgaggacgcgagcggagttttttcggttatttgtgttgttttcgttttggttgtttttgtttcgagggaagatgttcgagtattttttttattttatttggtcggcgaagtatagttcggtgacgatgtgtagagttttttggtatagattgtttatttcgttttttttgtggaaatttatcgtttggtttttttttcgtttttttttttttttttagttagtcgttttttttttttttcgtatttttaatttttttggcgttttaagttatagttcgttcgcggtgattttggttggagattgcgtcgttgagagtcggtaatttttaggagttttacgttggttttatggcgggagcggagggcgtaggggaaggagaggcgcgcgaggaggttgcggttgtcgcgaggtttgcgttaattttttcgtcgcgcgagcgagtcgaggcgcgttggaattagagattcggtatggagtgttgaggggaggggggagtcgtaaaaaagttaaagtaagttttcgattcgtaagtacgttttttttttttttttagcgtattggtgtttttggcgggtgtttggcggcgacgcgtttaatcgtagttcggcgcgggcgttaggtgataggcggcggagcgcgtagattcggtttttcgcgttttttgaagaagggattcgtgagggagggagggagggagggcgggcggttcggcgtttttgtcgaggtcggggatgtttatcgttgtttagagttggttcgaggagtttttttcg

SEQ ID NO: 6623 - DNA, 1006 bp, Artificial Sequence
  Description of Artificial Sequence: Synthetic polynucleotide
gcgcgtgaagaatttagattttttaatgcgtatattatttttatacgtagggtcgaggcggtagcgcggttcggagggggttcggagggaggggtcggattcgtttcggcgcggtttcgtcggggaattagttttcgagtcgaataaaagtagttaaagattcgtatattcggtagaaggggggcggttttaagaaagttcgggttggggcggtttcgtattttttcgtttttttcgtcgttcgaatttgttgtaaaggtagagataatggagaaagtttcgggagacgcgcggagagattgtttttttggggagggaggggcgggtcgggggaggcggggtaaggaggagggaggggtcgtcgagggcgaggtcggcgtttagcgtcggtttttcgtacggttttttggatgttaaattcggtttagggagtttaggagtcgttgtagttttagtttttttttttttttttttcgatgattcgggtaatgttaattttttttcgggattgaaagttttaaatttaaggtgttaagttgatgggcggtttttgtttttatttttcgatttcgggcgcgtgttttgaaagataggagagaaaaaagattatttagttgtaggaggtaaggttggagcgagtagcgttcgtttgttttttaagtaaaggagggaagtttatgtgtattcgtgtattgggtttcggagtagtttcggggtgtagggtattttttttttagggcgtgcggaggaaggttattaaaatacgttgtattgtcgaggtggagttgggtaaagtaggtagagattggtggggacggatggcgagtttgggaagtttcgggtgttttggtggagaggttttttgtcgggggcggggcgttggagagttttttcggcgcggagagtttttcgggcgcggagagcgtagagaatttggttaggaggtgttggatagtttcggaattcgcgcgttttttgttaaataaagcgtggagattcggattcg

SEQ ID NO: 6624 - DNA, 1185 bp, Artificial Sequence
  Description of Artificial Sequence: Synthetic polynucleotide
tcggttttttttgggcgtagtgcgtatcgtcggcgtttttagatttttggattattcggtttgggggcgcgggcgcggttggggagggaggggagagttggtttatttggcgttgaaggttggaaggtatagtttcggtttttcggagttcggttcggtagtttcgtattgttcgtagagggattgagtatttgaaaagtttatcgcgtttcgtagggcgtttcggcggggttaatttgttcggttgcggggtatagttttaggggaattgggttagtaggtaggggtcggagttgcgcgttcgcggtggttagggcggtcgtcgggtcgtggggcgcgggcggttgtagtttgggcgttggggcgttttcgattcgtagtaaattttcgattaggaaatttttgtttaggttgttaaagtcgggcgtagcggggaggttgaggagcgcggaggaagttataacgttttagtacgtatcggcgtgggttgcgatcgcgttggggagtatagtgcggcgttaatcggtttgttgcgcgttcgttttgcgttcgtttgtcgttcgggcgtttcgtatcgtatttagagtcgtagtttttcgtcgtcgtttttcgtagggttggagcgcgcggagttaggtagggaggaaaggttattcgggacggcggcggatttggaacgatattatttatttgcgttgggcgtttttttaagggatgggaggagtgagtgtgggagggggaagttgtgagtttttttggtcgatagcgtaggttttgggagcgtaggggggagtttttttttttttttatgtagatttggacgggttttttttttgttttttgtttttttttggacggacggaaggtgtgtttagtttatttatttatgttattagttttataaagtgatagacgcggttaataataagggtagtgttgtggtaaggggaggggattcgtagtgggaggaggtgggcgtggaggcgacgtgaatcgggcgcgttcgttattttttcgttgtcgtgtagagtcgtggtattttcgttagagtttaagtagttttttaggcgtggggtttggtggacgttggtttggagcgttcggagggcggggtgggggtgggggggacgcgttgtcgtttggggtgttttcgcgtatttttgttgggcgaattttggtttttcg

SEQ ID NO: 6625 - DNA, 409 bp, Artificial Sequence
  Description of Artificial Sequence: Synthetic polynucleotide
tcgtttttcggggaaggggtttttgaggttcgggtggtcgtttgggtaatcgtagtttgtttgcgttttttttttttttcgcgtgggttttagtaatatttattgtagtcgggttaggcgagtcggcgcgtattatcggcgcggggggaggagagggtcgggtttgggaagatgttgcggaggacgttgcggattcgcgagttcggggtaaggcggcggcgtatcgttttttttcgtcgttttttttttatttcgttttttatcgtcgtttttagttttttttcgggatgagagagagtcgcgttgcggagtaattttagtggatgggttcgcgggggttgagcgggcggaggacgcgggaatttcgtgatatcgattagttgacgttgttcgcgtgaaattagagtcg

SEQ ID NO: 6626 - DNA, 1813 bp, Artificial Sequence
  Description of Artificial Sequence: Synthetic polynucleotide
gcgggcggcggaggagggttggcggttagatatagtatcgttggagtttagagagtcgggtagaggttggcggagagtcgaggttggtttagtttttaggagatcggcgagttggggtgtgtgggagcgggatgtttttaaggcgaaaagaagcgttagtttcgtaagcggtttttatttgggttgtttaggtcggatgtttaggagtttatagtaggggggatggagcgaaggatcgaggggttgggaggcgaggtcgtagcgtattgacgtaggttagcgaggtcgttggtttcgacgtagggcgttcggtaaggtgtttggtattacgagagttaatttttgcgcgttattttcggaggttagtgcgtttagggcgcgtcggttcggtaggagggtgggtgttagtttttttttttatttttcgagtttttttttcggcgtttacgtgggcggagtagcgcgagggtgtgcgtggtaggggtcgcggcggcgtgtgtcgtgcgtggggtggggtgcgggttgggcggtttcgttttcgggtttcgcgtcgtcggggcgcggtttttagttttattttttttgttatttgggcggagatttgggggattgtgatttattttgcggaagatacggaggggacgggtcggttatatttttcgcgttatttcggtaggtatcgggtgggtttttttttcgttttttggtttgagggcggaattcggagaagagtggaaataggggtggcgtgaaggagagttgggggttgggggcgggatcgggagggggtgttgggggaagcgacgtagcggttgggagattttgtaagggggtttgaagaggagtgggggatgggtatggaagggtgggggattattgaggtgggatgcgagagtggaagggggatttagagggggcgcgatggtcggaggagggggagatggacgatggggcggggcggtatcggtcgtcgcgttttttgtcgttaggttcgtttttcggtcgtcgggtttacgggttttttttggttagcgttcgtttttcgtttttcggcgtatttgtatttatttgttcggcgtttaggttcgagtcgggtagtagtagcggacgtagcgagcgtagtttcgcgtcgtatttttcggtcgtttttttttcgttgcgagtttacgtcgttgtcgtcgtcgttatcgttttaaaaaggataaaacggaatagaaaatgaatgtatgtataaaaaaaatcgtaaaaagtaattgaggaggatggtagtcgcgcgcgcggttcggcggggcgggagtcgagaggtcgcggtattggtggtcgcgattcgggtaggcggtcggcgcgtgtcgtacgcgggtggttgtagttttttcggtcgttcgcgttcggtttaggtacggtatcgttttttttttcggggagttttttcgattggtttgtttttttgttagttaggtaggagggcgcggcgttcgtttcgtttcgttttcgttttcgttttgggtagatgtcgggagtttttttgtcgtcgtgggagggggagttgagttgtcggagcgtgcgtattgggttagcgggcggtcggggtagggttggggtttcggcgttgagcgtttttagtcgcgtcgggtagtttggcgtttcgttgagtcggagtaattttcggtaggagtttttaggttttggttaagtttcgggattcgggaagttatttttgttttcgggggttcgagtttggagtggggtttgtaggtaaagcggggttggggtcgttttggtcgttagtggttaggaagacgtagcgatttcg

SEQ ID NO: 6627 - DNA, 1294 bp, Artificial Sequence
  Description of Artificial Sequence: Synthetic polynucleotide
acgtttttttcggatgcgcgtggagcgttttataggatcgtcgttttttgcgcgttggcgcgtatacgtttttcgttagtttgggcgtcgggtttcgaattttcggtttgtaaatttgcgtattttttttcgtcgcgttcgttagataatttggcgaatagttcgttcgttcgtatttcgtttttttcggttttttttttaaattttaaacgtatcgtcgtgttttaaagaaggtgtttacgtcgtttttagatttcggagcgttttttttttattttcgggattttttaggtcgtttatttttttcgtttttcgtttagatttgagagggatcgaaaatatattttcgattcgggtagttagggtcgaaattgttaagaggagaaaaggtaaagcggaaggagggtggttataaatagatttttttgtttttttttaaaaggatattgtcgttttaaaagtttttttttcgggtttttatttttcgtattttcgtattttgggggagcgtatttaattgaggtaacgtagtttttttttagtgtttgtagaaaaattaaagttaggggggtgagttcgtcggttgttaattttttcgtcgtttttttcgttttattttgttttcgtaagtcgagaacgggttgtaaaagtttgtaatatttttggggggcggaggggggaggggaggggggtttttcgggttcggggcgtcgtcgtaggttcgcgcgcggtcgtcggatttcgcgtttcgggcgttcgttttcggtcgtttttcgtttcgcgttcgggttttcgtcgttttttttttagtttttttttagttttttatttttgttggtgttggaatagttttgtttgcgtatcggggtaggcggttcgtttttgcgggcggatttttggtttagcggggtttttttggagtcggcggtcgcgttcgcgtcgttgttgtttggttcgttggcggcggggtcgggggttgtcggagttgattttatgtttttttttaatgtagagatcgttggagatggcgagtttcgagattttttttattttttgtttttagagtaattttatggtattaaaaaaaaaaaaaaaaaaaaaaaaaaaaaaaaaaaaaaaaaaagaaggagaaggcgatcggcgaaagtaggagggaaaaagtaggcggcggcgggcgggtaagtaaaagcgcgagggagcgcgcggagtgtttgggtggacgtgtgtgtgcgttcgaaaggggataagaggcgggtttggttataggtagcgttagcgagagtttttttagtcg

SEQ ID NO: 6628 - DNA, 939 bp, Artificial Sequence
  Description of Artificial Sequence: Synthetic polynucleotide
tcgatgtcgagagtggttttgttggagaatcgtcgcgtttgtagtttttgtattttttttcggagttgcgttagggaattacggacgaattggaaggggtcgagaagaaaggttttggttattatttttagttttaagttttttcgtttttttagattttggatttttttcggggaggatttttaggagttttttggtagtttttcgtcgtttagggtcgatttttttatttttttttttattttcggttttcgggcgagggaggtttcgcgtcgttttttagattggttgcggtcggaagattgtagtcgttttgagtttattttttgtttttttataattaaggagtatggtggagttgggttaattttaggtatagtttagtcgagttaggcgaggtttagagagatttgattcgtttggtagttttaacggatttgttttcgtagtcgttgcggatttttcggtcgttatggcgattgtgaaatgtggggtggggcgtatgcgttggaagttattcgcgcgggtagtttttgagtgtttttttacgtgttttttagcgcgagtagtattttcgtttttgcgttttttagagcgtgtagttttcggtgagggtagttttacgtatagttttttatattttttttagcgtttgtagttttcggtgcgcgtaggttttaagtttatatgcgtagtttttattttgcgcgtagttttatgtatagtttcggacgggtttttagttttattggcgtagaatttattatcgtttgttttttacgcgttttattgggagtgtagtttttatttcgagcgcgtagttttacgtagtttttttatattttttttagcgtttgtagtatttttagtgcgtatagttttgttagtcgttttttcgggcgtcgtttttgtattatttcggtttataattttgcggcg

SEQ ID NO: 6629 - DNA, 939 bp, Artificial Sequence; identical to SEQ ID NO: 6628
  Description of Artificial Sequence: Synthetic polynucleotide

SEQ ID NO: 6630 - DNA, 899 bp, Artificial Sequence
  Description of Artificial Sequence: Synthetic polynucleotide
tcgaacgtagttacgcgtttattggttttttgtttttggcgtttttgggtacgggggagttggggcggtttcgtttgcgtacggcggtgtcgggattgggggcgggtacgtcgttttcgttttttacgcgttcgttcgttcgttcgttttcgtttttttcgtttcgagcgattttttgttttagttttgtaggtttcgtattgtagatgtttgttggtttttttgcgttcggcggttttcgcggtgtttcgtaagttttcgtgattttttagtattagtcggttgtgcgttttttgtttttacgggtcggttagtcgtagatatttatttagtttcgcgagtttagtcgtttagcgagtggggtagcggggatcgagacggacggtagtcgtgttagagttcggggcgttttcggatgcggtaggataagttgatcgggtttttgaggcgcggggggagatgtttgaagcggtagggcggcggcgtgggtattattttgagtaatgtgtttaagaagcgtagttgtatttttcggatcgcgtttcggttgttgtgtattttggagtcgggtgaggattttagggttgtagatggggcgttgtaaagtagcgtcggggttgttcgcgtttttgttttagtttgatttcgtttaggtcggggagttttggggaaagttcgcgtgttatttggtgcggggtatcgcgttggtatttgtagggagcgattggtttggaagggtagagggtagacgggggtttgggtggggtagcggttattttaggcgcggagaattcgttgtttttatttttttttcgcggatttttattttgcggtttgtgtgttcggtttttttcgcgtggcggggaagtgcgggtggttgttcgggtttttagaggtcg

SEQ ID NO: 6631 - DNA, 899 bp, Artificial Sequence; identical to SEQ ID NO: 6630
  Description of Artificial Sequence: Synthetic polynucleotide

SEQ ID NO: 6632 - DNA, 547 bp, Artificial Sequence
  Description of Artificial Sequence: Synthetic polynucleotide
acggtagatttcggagggggtgtttaggatagtgacggttgatatgaagttagcggtgagggatagcgttacgggtattgcggttattttgcggtcgtttattaggaagtttttggaggtttgttggtcgtttttagcgaaggcgtagtagatgtcgatggcggtcgagatgattagtatgttcgcgaatattacgtagttttatattacgaaggtgtcgatgtttcgtggcgtgtttatggtcgtacggtcgtttgagttttgcgcgtaaattggtggtttcgcggcgcgtagtcggagttcggcgcgtattttttatttcggatttttggcgcgtaggcgtggcgtttcgcggggattggaggcgttttttaggtgtcggttttcgaacgtatttcgaggcggggtgagggttggtagtcgtttttgtattcgtcgttgcgagtcgcgttttttaaatttaggtatgggatttcggaaaatcgattcgttgttttgagtgtttattacgtgaggaattggagtggtcgagttcgttaaggcgtcg

SEQ ID NO: 6633 - DNA, 2505 bp, Artificial Sequence
  Description of Artificial Sequence: Synthetic polynucleotide
tcgagttaacgcgttttagtggtaggtggcgaatggtcggagattcggttttttagtggtgtttatcgttacgggttttcgttcgataggtttatttttttttatgttggagtaaatttcggttgaaagagggtcgtattaattggtttgcgtattcgaagtgggaatagagagggaggaaaattatgttttaggtgttacggggggaaaaaagtgaaatgcgaatcgtaggggagagagcgatcgttaggtagatattttgtgaatcgcggtggagagtatatttaggtggggaggttatcggtttaatttattatttttcgggagaatgcgggtagggatagtagtagggggtagtatttacgtttttacgtttgtaagggttttttaagtttttggttattgttttttattttttgtagtttcggtgttcgtcgggggcgtgtgtgaggggcggggtcgtatggggaggagggatttaaaaaaaaaaaaaaaaagcgaggtaattagtatttttcgattttattggtttttcgtcgtttttgttttgtatacgttcgttttattggttgttcggggtttgttggggttcggtaaggtttgtagtcgttacggtcgttgttgcgtttcggtgtagggtaggttggcgtcgagcgaattagggtcgggaattgggagtcgggagtcgggagttagttgttcgcggagttgcggcggcggcggtatttggggtggttttagttttacgaatatcgtggtcggcgttcggtggttattgcgtttagcggggtttagggaagagcggtttagatattttttattttggaagaaaggggtaagtttcggcgggagtttttttttcggtttggttcgttttttattgcgtttagtttcggttcggattttggaagatgattttagggtttgttttgtatattttagcggcggtagtttcgggaggtagtcgaaagtattaatagttggtagtagcggttagtggaaaagtgagttaaggcggcgcggattcggtttttttcgcgtttcgcggtattcgttgtttttcgtcgttttttttttttggtttttaggcggttgtagtatgaagtggcgtagcgatggttaggagaggtaagaagttcgtggtgagaacgttggaggatttgacgttggattcgggttatggtggcgcggcggattcggtgcgtttttttaatttgtttttgtgttgtttcgattcgtattcggcgttttcgtatggcgggagttgttggtcgtttttagttgattttatgtatagtcggtataatagttttgatattgttaatattgttttggtggaagatttcgaggggttggattgcgtcggttagtattgttcgcggttgttgtcggatttagacgaggttttttggattttttaggagttggaggcgttgttgttgcgttcgcgggattttcgggtaggttcggcggttttcggcggtttgtttaaggacgcgttggttaagttgtcgacgttggtgagtcgggcgttggtgcgtatagttaaagaggcgtagcgtttgagtttgcgtttcgttaagtgtattaagtacgagatttagagcgttatggagatcgtgttgttttggggtttggtcgcgtattgtacggcggttgcgttggtcgtattgtttttttataatatgagtagcgtcggcggcgatcgtttgggtcgcggtaagtcggttcgttgcggttttatttttttcgtgggtcgcgtgtatcgttggatggtggatagtcgcgtggcgttgcgtatttacgagtacgtcgttatttatttgatagtttgtatggagagtttttttcgggatatttattcgcgggtcgtggttttcggggtgtttcggagttgtagtggttttgggttaggttcgggtttcggtttaggttcgagttcgggttttggtgcggttttcgcggcggataaagagcgggaggcgttcgggggaggagcggcgagcggcggcgtttgtagcgtagttagtagcgttagcgggggtagtagttgttgcgtttcgtcggtcgtcgcggtcgtcgtagtttcgtcggtagtcgtcgttaattattattattattattattatgcgttttacgaggcgtttaagtttatcgtggagattttggagtatacggttaataacgattcggagatttggggttttttgtagttttattagtatttgatttgcgggaagaacgttagcggtaagtgtttgcgcgggtgttatttttttttatttaatttggttaatttttggcgtaagtttgtttcgcgtttttttttcgcgtttttttagttacgcgttgttgttttaagtcgttgaggaggcggtcgggttggaggtagttagaataagaggttgtttgtttgtttttgtattcgggtgcgcgtattttacgttgttggtgttgttttaggttcgggagcgcgaggtttcgttttcggtgcggggcggggcg

SEQ ID NO: 6634 - DNA, 1587 bp, Artificial Sequence
  Description of Artificial Sequence: Synthetic polynucleotide
gcgcgtttcgatagtttttaagatggtcgttaatgtgggatcgatgttttaatattggaagcgatttgatttacggcgattttaggttagtgcgggtagcgtcggtcgcgcggtcgtgaggagttttcgggcgcgttttgggcgtattggggaggttttcgggcgggtaggcggacgttttggggcggcgggcggcggttgtcggggttcgtcggggttcggtcgttcgttgtttatcgataggtattaggaattgatttcgtcgttgttttttgttcggtttagttatcgattagttgtcgcgattatggagaagcgttagtgagttttcggtcggcggagcggtcgagcggttaggcggtcgggcgaggagcggggaaggtaggggttacggtttcgggtagggggttgttggcgggaattttcggcggttttttttgagtcgtattttgcgcgttttttaatttcgcggcgttcggggaggtcgcggagcgcgtcgtttgttagttcgtattcggttggggtttcggcgagggagggagggagttggcgggtagggaggaggaggaggagaggaggaggaggaggagagaggaggagggagtcggggttggcgaggaggcggtttcgcgtttcgtcgttcgtcggtattttagttttcgtcgttcgtttggttgcgtagttcggacgcgtcgttattcgggggtcgtcgtcgtcgtcgttagagtcgtcgtcgtcggattggtcgtaagcgtcggtagatttttttttttcgggtcggggttttggggttcgttttgttttttgtttttattttttcgttttttttattttttttttaagtttagatgtagacgggcggtggaggtgggttcgggcgttcgtaagtttgcgtttttgtttttagggcggtggagagtcgggagcggcgtagagtaggtgatttttagttttcgggtttaagggaatttttaaatgagagatttttttgtttgttttgttttttgcgttttttttcgttgtttttttcgttttttttttttcgtttttgttttttttttgtttttttttttttttttttgttttttttttttttttttttagggcgatttttcgaaattttattattttttttttattttttttttgtgggagtttgtgtgttttttttagatttggaggtgttttttgcggatttcgtaggagtcggggttgggaggtggaattttagagaacgtatcgtggaggcgcggtttcggtttttgttttttttcggagtgtttcggacgcgtttggtaaggttttttagttttggagtttcgtaaagtttcggcgggtgcggcggggattaggggcgggaaaatggtgcggataatagggcggttagagtattttgttttgatcgtgatattcgcggaagacgcgagattattagtttggagataaaaagggatttatttttttttttttttttaattcgtcggtaaatttcgttaagttttttttgataagtggttttagtattcgcgtttttttttcgttttggtcgttttttagttttcgttttttcgaacgttttatttttcg

SEQ ID NO: 6635 - DNA, 5693 bp, Artificial Sequence
  Description of Artificial Sequence: Synthetic polynucleotide
tcgcggttgttgggagagtattggcggtgggttgaggtttttggagagttcgcggggtggagatgggggtcggttttttttcggcgtttagtcgaggagtagttgttagttgagtgcggattcgagagagaattttcgagggatatttacgttttttatcgcgtttgcgtcgggcgttttggttttaggaggttgtttcggggcggggttttcgggggtcgagcgcggggggcggttcggcggttttattatacggcggtttcgttgagttcggggttgggatgcgataggggttcgttgtagtcgttggtgtcgtttattgggaagggcgggttgggttcgtcgttgaatatttcgtcgggtatggggtgtagcgtgttcggtaggtttggttcggggttcggtgtgttcgggtgcgagattatgtcggtgaatttggggttgttcgcggcgtgcgggtcggcgagcggcggttttagcgtttttagcggcgtcgagtcggggttagaggtcgttaggaagttggagtcggtcggggattgcgtttgcgaaggcgggtcgtgcgcgaagaagtcgtagttgtttttcggcgcgtagtagtcgttttggtagtttgtggagggggagcgggaaggagatagggcgcggtgagagaaggcgaagtaggcgggggattcgggattcggggaggggattcgggcgggcgagagaggggagcgcgcgatatcgatttaaggttagagagatttgcggaggtcggcgttttttgagacggtggacgtcgtaggtttacggggagggttggggagagagataatgagagatttcgaaagggtaagagatttagattgttagagattatatatagagacgggagagatttcgagatcgtgggggatatacgcggtaaaaattcggagattttagttataggttttttgatatttagagatggagagagatagaggcggttagagacgtagagatagataatgatttttaagtgttttagggtcggtgagagatatagagatgcgggatagcgagagatagacggagagatcggtagaggggtagagagaaaggcggaaaagagatttagagatgcggagttcgcggttgagattcgaaagttcgagatatcggagggtcgcggaggagtcgaggagacgtagagagaggaaagacggtcgcggttagagatacgcgtggaaattttcgggggcggtagcgagggagttaggagtgagttcgaagatggagagaagtcgatgcgtttagagaacgtaagacggtggattagagatgagttttaggaatttttagagaagcggaggttgataggttcggggagaggaatcgggtagggataaattagcggatagagtagagcgcgaaatggttgagatcgggaagcgatttggtcgggggaaattggattcgggtcgcggtaggagcgattggtgggttgggtcgggcggggcggttttggcgttttaaattcggtttttgcgttttattaatttagtttaagtttttcgtttcgttaagtacggtcgtcgcgtcgatttcggtgagattatttgtatcggtttagtttagtttgagaaagagaaaattgagttttagcgatttgggagagggggaggaggatacgaagattttttgggttatggttagagtttcgcgggttttttggggtagaagttcggttttttagttttgtttcgggttggttttgttagtatttttaggttttgaagtatttgaggatattgagattttttgagaagttggtgatagttatgggtttttttttaaggaaaatgtaaggatgagaattttgtttataaatttaggaggtgtagggatttcggattgtaaatttattttgttttaataaatttgtattaattttttgatcgttttatatagttttttttttagaattttcgggatattttgtttttttttattaggtggggttttgaaggattgacgtgggggacgttacgaaaggattattttgtattaggtattcgttttgtacggcgggaaaattagcgagtttagaagtttgagttttttttgtaaatttattttttttgttgagttttgggattttagttaaggggcgaatttttgatgttttttgttatttttttttttttttaaattttgaaatttgtttaaatggggggtgtttggaggcgtggtttggaggtagtttaagtaatagttaaaacggttgttaattattttttaaaattattaatttaatttttttcgaaagtgaaggggaagatggggagcggtaaatttggagttttaaagggatagggatgggagacggtcgcggttcgcggcgagtcggaaaattagcgaaggtcgttgttttcgcgtcgtgcgcgtcgttttcgtttatatggcggtcgggtcggaggtaattggaataaacgtcgtttgaaaagggtataaaagtcgtagttggggttttgttcgcgtttttacggggagtcgtcggtttcgtcgttcggtttttttttcgttcgttgtcggtcgttatcgtcgggattttttagcgcggattaggcggggttgtttcgttgggggttggggagttttttttattattacggggaacgaggggtttttagtatttagttttttattttatttagcgcgtagggagaggaggcggtgggataggtcggggcgggggcgaagtggttttcggggaaattttggttaattatttaggcggggaaaaatttcgggtcggtatcgtttttattatttcgttgtttcgggtttagattttgtagggaaagaggtaaatttaggtggagagagtcggtgagtggagatttcggaagatacgtttattattcgggttttttagggttgggggtttgttcggggttgggggtttgtttagggttggggggttgtttagggttgggcggttggggcgttttagtttgagttttgttattgtttggggtttttgttttgaaaagtatagtttggtattttgtttataatttttaggggtttcggttcggttttaaggtttaatttttttttaggttttcggatgtgttgaggttagtgatggggttattttttttttttttttgcgtttatttgggtgtttagtttttgttttgttaatattgttattgaatttattttttaagagaaattgtttttttttaatttgcgttataatttagaagtgtagatgttttttagatatagatagttttggggtttttttaaatttagaagttttagaatagaagaggagaggtgtttttttgagtttttagttttgggaagaataggatagtgagtttggtgagtttaagtaatgcggtttagggtaaggagttgaaaaaatcggatagggggagttgggatggtttattaatttagtgtgagggaagtgagaggaggaaaagttgaggtggtaaggggatagtttattttaggtttaagtttggtattattatttgaagttttttgtaaattggggtttttcgttttttgtagttttaaagacggtggaaatttggggttggtttaatatttgtgtttttagtttgtaggaattttaggggtttcggggttggagggtggattatagttttgtttagagtaattgtcggtatttgggttaatattgttagatgttgtgcgtatatatttcgttatatggaataggagttgttgttttcgatgttagtgagtaggcggtttggaatgaatttagatttttattttttttttttatattattttttagcgttcggaatttattttatgttaagtatattaggtatagggcggtaggaaggttgtgcgtttgttcgtgggggtcgtatgtatgtggatttgttagtattggttttagtgtgattggtgggagtgtgcgcgtttgtggagttgtgttttcgtgagtgtatttgtgtgtgagagggtggaatttatttatacgtgatcgtgcgatcgtgtttagacgtgtgtttttggagtttttgaacgtaagtgtgagtgtattttgtgttttgcgtgggtgaatgtgttattgtatttcgtgtgtgtttttgtgtgtattattgtatgggtgagattatgtatttgattttgtgtttaggatatgtgggtgagtgtatatgtgtttgtgatcgtgtgtttagcgagtgggcgatgttttggagcggcggaaagcgtgttggtcgggatttttcgtttttagttttcggaataggataggtgcggaatagcgaatttcggggcgttttttattttcgtagtaggtgtacggggtggattttaatattttagattcgtttaagcggtcgtttagcggacgtatgcgtcgcggatttcggaagaaggcgtgttttcgggcgtttagggcgtttagttgttttattcggcgttttttggatcgtcggttttgaaattatatttgggatagaggagggggttgtgaatttaggattaggagtgttttttttttttttttttttttttttttgattgggttgtttttgttgggtttttgcgtttttttcgtattaggattttttcgaggcggggtcgggtcggattaggtcgggaggggtggagagaggtttcggcgaattagttaagggtgaaggatttcgcggattcgtggggcgatttataaagatttgggttttttggttttcggttcgttcgcggtttgacggttttataaaggtttttttttcggtacggttttcgtttcggtttttcggtttcggagttagtttttggtcgtttgtttgttcgcgtttcggcgtagggagggagggggtatcgtttgtttttttgttcgaaaggtggaggtaaagagggatttcggattttagagaggtttataattttttataagtaaggcggggggcggaatttagagaggtaaagtgattcgtttttaaatcgtaatattaggaggatagtagggttagatggaatttttcggtttatagttttcgatttcgggtaagtgttttattcgggcgtacggtttgtttttagattagaattaggcgcgttcgtagttaaggaagtttggcgggagattttttcgaggttttcggtttttaggttagcggggttaaggagttgtgttcgtttcgggtcgtatttggatgacgcgtatgttgaggtcggttttttgcgttagttgttcgcggatgtggcgcgtgggtttgggcgtggcggcgaaggtagttttgagcgtttttagttgtttggttttgatggtggtgcgggggtcgcgtcgtttggtgttcgagttttgtttttcgttttcgttgttggtcgtttttttgttcgacgaggtcgagttgttcgtttttttggggtcgttttgtagtgcgttttggaggttcggggataaattgcggttcgtataggatgatattgcgggcggacggatcgggaaggggatagcggcgttagcgacggttagacgtttttttagtttagtggcgggttttcgtcggtttaagttacggtttgtttaggttacggttagtttcgttggatttttttttaaatttgcgatagttttttttttagggattcggtgttcgtttattttttttaggcggggttgggtttttggaggggcgtttttaagtttttttcgcgcg

SEQ ID NO: 6636 - DNA, 589 bp, Artificial Sequence
  Description of Artificial Sequence: Synthetic polynucleotide
tcgtttcgttttcggggttttagggaggcggcgattggagtttcgttgtttatttataataaaagaaagtagggttggcgtttttatacgcgtttttatttattgtcggtcgcggggagaattttatttcgcgttttcgttagggtttcggggagttttgggttggcggaggcgaataagatgcggtttgatagaattaggtcgtgtttttgtaaattttaatgtcgtttcgttagtcgcggcggttttttagattttatttgtcggggagtttcgagtcgcgtaaaatttttgtaagttgtgttttgtagaatgtaaagtcgggttggaattcgttattttcgtcgttttagtcgattcggtcgacgagtttttttttgagtttttcgggttatttgtcgggacggttatttcgttcggtgaagtcggtgtatttattatattttttgttgtttttagtagggaagtcggcggtgaggcgggggagtaggtatggtggtttcggggtttatgcggggtttattgtttatttagaatagcggttattgttgtttattagggcgtatttatcgttggagttttcgcggcg

SEQ ID NO: 6637 - DNA, 1294 bp, Artificial Sequence; identical to SEQ ID NO: 6627
  Description of Artificial Sequence: Synthetic polynucleotide

SEQ ID NO: 6638 - DNA, 1373 bp, Artificial Sequence
  Description of Artificial Sequence: Synthetic polynucleotide
gcgagcgtttggcgttttttggggcgtagtttcgagagagtttttttcgggatttcggacgtaaggtttttgagtggttttggaagttggatttttcggggattttgtttcgaattttggttatttggaagtaattttatcgagcgttttttttattgtttagtttcgaatcgtggcggaacgcgtttttcggtttttttagagttttttttgcgggagaagtataatttttttaggttttggagacggcgtttttatattttaatttcgtttagacggaagaagtgagaggtgcgggcggtttcgttatgatcgcgggaggagagcgtaaggaggtttttcgtaaagttggaggttaggtcggagcgatgtttcgggagcggagtttttttagtttcgggtttttagtcgcggatagttggtagtgttaaagatttcgttattatttgcggttcgtagttgcgattcggtcgtagagtcgggtatcgaggaaggcgtaaagttgagtttgggtaggtataacggtttttagggattggtattttttagttcgggttgttcgcgggagggtagcgagttgtgttaagggtttcgttattatcgttagcgtatagttcggagttaagcgcgcggttgaggaacgattagggttttgtaaagttggagtttgggcgcgtagattttcggatcggagttttcggtttgaggtcgttcgttaggaggaaaatgaggtcgttcgaattaagttgggacgcgtagtaaagttcgagtttttcgcgtatattaggggttcgggcgggagcggggagttttggggacggagaaggggcgcgggacgtttggattaggaatttatttgacgtcgagtcgggtagcgtcgaggttgttttttcgcgttgcgtattcgttcgttcgtttcgtattttttttttttttttcgggcgttcgcggtcgtcgcgtttcgggttttgaatttttcgagttcgtcgtttcgcgcggttggagggcgtcggttgtatttattcgttttttggtaggagtcgcgcgcgtttttttttttttttttcgttttgtgtttttaagatttttttttatttttttttttttagtttttattttttttttttttttttttttttttttgcgtttttttttttagttttagcgaatttaagttcgggacggaggttgcgggttttttcggcgtagtgttgggcgtttcgcgcgcgtttttggtttatttcgttcgttcggtcgttgttcgttgttcggtcgtttttcggaggagtcgcggcgttaagtagttttttatttagcggttggaaacgcggtataaatatgtagggattgagtcgtgagtttagcgagggtcg

SEQ ID NO: 6639 - DNA, 1524 bp, Artificial Sequence
  Description of Artificial Sequence: Synthetic polynucleotide
gcggttttgcggattttaggtttaagggggtatcgttttaaatattcgacgcgtttttattattagttttttattggtaggttttaagcgggaacgggattgggaaggtttcgggtttggggggttttatttcgatgttttaggggcgttttgaatttagttttagttaggcggcggtattttaggtagcgtagggagcgcgatcggttcggggagggggaggacgcggcgttttcgttttttttcggttcgtttgtttatttttaggtttttttgttcgtcggttttttggttttgtttattttggggttggtggtgggcgcgggtcgggtttaggtttatgttcggttttttttattgtttgttttttttttttattattttattttatttttttagtgttcggtttcgtttcgttatcggattttttggaatgggggacgcgggcgcgaaatacgaatttagttatcggtagttttttttttacgtgcgttcggttcgtagcgtagagggcggttcggggtgggggcgttttatttttgttttttatggcgtgtacgaagtttttttggtatagttggttgcgaagttttttttttaggttgaagtcgcggacgttgacgattttttttacgttcgataagttttcgttttcgtcgtatcgttggcggttaatcgggcgttgcgaggatttaaattagagagttcgggatattattgtgggggttggaggtcgttttttaatttgggtttagtattaataggtgtagtagtcgagcgttttttgtattttattattgtaatttaagtaattttgcgtaattgttaaagatgttgaaaagtaggataaggagaggggttcgtatttcgagggtttagttgcgttttacgcggggtattttttttcggtgttttcggaagtattgaagggatatttggggatttttttttgtttttcgttttcgaaatgtgttgggtttcgtttattcggtcgggagtttggttatgtaattcgcgaagggggtttcggatacgggttggcggggtaaatgtaggttttaggaggagtcgttgcggcgttcggttcggcggtaatagtagttttagcggtcgcggcggtagagtcgggaagtcggaatcgggggtcggcggtatttttaaagttggagtcgttttcgagttatcggggaagttggaaagttgaaatggaagggttgagattttagtcgttttcgtcgttcgttcgttagtgtaagaagaggaggtggggggaggagaatcggggtttggaagggggagaggtagacggttcgttataaagttcggatcggagattttaaaacgtattagtagttgttttatttttttataagcgcgcgcgtatatttattttttaaggagatttttttattatttttcgtatttttttgttttttttttttatcgtttagcgttcggttttttagttttttagatttcgggcgaatttcgagttcgtttagtttttttttacgttttttttcg

SEQ ID NO: 6640 - DNA, 1009 bp, Artificial Sequence
  Description of Artificial Sequence: Synthetic polynucleotide
gcgtttgtagcgaaggattcgcgtgggagcgagaaatgtttttgtttagtgtttcgcgcgttggatcgcgggggcgagtttgagggtggagaggtcgtcgggtggaggcgcgtaggggtgcgtgggtgggtgcggaaggagtgtagggtatggaggggaattttggggcggcgcgaaggaggagcgtttggaaaggcgcggtgtttggttatagaggggttcggagtgggagtgtaggggtgcggggagggagtgtagggacgcggggagggagtggaggggtggggacgtgttggaggggcgcgtttcgatagaattggagaaattggaaaagtggaggggcggggtagtggttggaggaatttttgaagcgacgcggggaatatgtgaaggagtgttatgttggaatttggaggggaggggggatgttggagaggtatacggtgatggatatggaaggattcgggaggtgtggagtggtgggttcggttcgtcgcgggaaggatatagagggatataggttgttttggagaggcgttttcggatatttggaggggcgtatagtgttgggatttggcggcgtttggggcggaggggcgcgtcggatttagtcgggcgcgttcgggggtcgggcgtagtgggagttgacgggcgtttagtcggcggcgttttgggttcggttaggcgtaggacggttttggtagcggtgtagtagtttaggttagtttttggggggtttttggttttcgttttttcgcgcgtttcggttagtatcgttcggagttcgggcggggaagtgggcgttcgcggtttgggaagttgttttttcgttttggagtagagtcgtcgttgcggtcgttgaggaaggacggagtagaggttcgcgttgtttggggagaagattgtggtgttatttcgtcgggaatgaagggaaatgtagcggttgtttgcgtttcgggattttaagaagtatagtaggtaaagagaatagttacggttcgttatttcg

SEQ ID NO: 6641 - DNA, 961 bp, Artificial Sequence
  Description of Artificial Sequence: Synthetic polynucleotide
tcgtttttttcgatatttaaaagtttcggttttgcgtaatattgcggattttttttagtttttcgttcgttttttttttcgcggggtttcgtttagggtcggtttttcgtttttacgtcgtagttcgggttagcggggttcgtcgcggtggcgttcgcggatgttgtcgtattggtcgttgcggtacggacggcgtagtttcgggcgcggttcggtataggcgtcggcggttttcgttagttagtagttcggcgaggcgttggtttatttatggttttcgggcggcggtttttgcgtttagttttgcgcgtagttttcgtttttcgttcggggtcgtcgagttttcgatacgggcgagatgttgaacggcgtaggtttggataaagtttttaagatgtttttgtcgcggaggtcgaggattcgttcgttcgtgggtgagttgggaggggcgcggcgagggagggtgggttcggggcgggggcggcgcggggcgcgtttgcggttatgcgatattgtttcgttcgcgtttcgtttttttttttgggttttttgggttttttgggttgtaggattcgtcgacgcggcgcgttggtcgtacgggggttgggcgtcgttgtatttgcggggttaaaaggttttaggtcggggcgaggtgagcggcgggcgttagagattttcggttcgtttttgtatagatgtgtgtgtgtgtgtgcggtttttttgtgcgcgtgttcgtgcgtttttacgcgcggatgcggtttagggatgcgatttaggcggtagttatcgcgatggtgggtacggtttggcggcgtagagaagatgtagttttttttgtcggcggtcggtatcgttgtgttgtagagtttaaaagtagagggggaaaaaggtattcgaagggtttttcgagtgatttttattatttggagtttcgggttttcgcgcgtttatagcggcgacg

SEQ ID NO: 6642 - DNA, 961 bp, Artificial Sequence; identical to SEQ ID NO: 6641
  Description of Artificial Sequence: Synthetic polynucleotide

SEQ ID NO: 6643 - DNA, 980 bp, Artificial Sequence
  Description of Artificial Sequence: Synthetic polynucleotide
gcgtgagcgaggtaggtatatacggattcgcggcggtttgtttgtaatagcgttgggaatgtatattggaaaattatattttgtatgttgaaaacgaataattgtttgatatttgggttgttgtcgagaaaattacgcggtagcggtaggtttcgagttaggggtcgttattttcgatggaatatttaaatcgtttatttttatcgaatttttattttttaaacgtatttttcgcgcgcgtgtatatttttaaacgtattttcgatcggaataaagaggggttttagatttttttcgtgcgtacggggtagtcgggagggttacgagagggaggtgtgtgtaatggaagtatcgagatagatagatagatagatgtttatgtattgttgtcgattttttggcggcggggacgggagtcggacgcgagggggatagatagggtgcggggataggcggttcgcgggggcgggggggttatcgagggggttattttggttcgtttaggtcgagggggttttttcggtgttttcgaagcgcgtgggttattcgtgtcgtatgtcggcgtagttgttcgttgtggtaaggggggggcggtcgggtttcggagcgggtcgggagggcgcggggcgcgtatttcgcggtaggtgagcggcgcggttgtaggtgagtagtagtttcggttcgcgcgtttagtttttttcgtcgcgttcgttcggtttatacgtttttcgcgcgcgcgtcgttttcgtttcgcgcgcgttcggtcgttcgttcgttcgtgggattttcgcgaggtcgcgcgtttttacgggttagggttgttttagggtgcgggtaggcgagggcggtttaggggcgcggggcgaggggcgaaggagttaggaggttgagaattgtatggtagttttgtttgtttgtcgcgttgcgcgttttattttagtcggcggtttcgggtttgtatcgggcggggtaggggagcg

SEQ ID NO: 6644 - DNA, 408 bp, Artificial Sequence
  Description of Artificial Sequence: Synthetic polynucleotide
tcgtattttttgaagttcgttgggcgcgttttgggttgtttttttttgagtagtcgggtttagagttaaggcgcgatgattgtcgcgtaagttagggtttacgcggtcggggtttttttttcgtttcgggcgtattagaggttagaaagcggaaagcggttttgttaggttaaggtcgatagaaatcgagagtatgtcgttatttgtcggagagaattgttttgttaggttgttataggtgatttgttcgcgcgagttacggtttttgcgtagagtttttttcgaaggggagagttagagttattcgcgggtttggtcggggttttttttagttcggcgtttacgtttcgcgttttgcgttcgtttttgcggttgtttatgtttaggtgtttcggaagaggcgtcgcg

SEQ ID NO: 6645 - DNA, 2190 bp, Artificial Sequence
  Description of Artificial Sequence: Synthetic polynucleotide
gcgtttcgaaatttggttttttgcgtttaggggaacgaggtataaattttcgttatttagttttattgagtagagattgcgagttcgaatttttaagtttttcggggttttgattttttaatggcggcggtttaattgttggtaaaattttcggtttttgattgttttatcgttcgttttttaaacgtttagcgaaggttgatttaggtggcgggcggattttatcgattttttaaattatatcgtttggttaaaatcgttcgtttttttttcgttcggattttaaaggttaggtttgtaagttagtaagttaacggtatttgggttttgggttgtttttgtgggttagggttattgatgttcgcgatacggattggatcgcgtattacgtttgttttcggtagaggttttattcgggtggttgagcgtagcgtattggggtttcgcggttcgagagcggcggggaggagcgggcgttcgtcgagcgtttttcgggatagttcggtttggggatttaagcgggttatgggatgtcggcgttggtttttttttgagatttttttgttttttcgtaggtacgagttttttttaaatcggttttttttttatattttcgtgacgcgaggtcgcggttagtgtttaatattattaaagtttcggttttagtttagtttcgggtagtttggtaggtttttaggagtttttgttttcggtttcgggggattttgcgtatttgttttaggttttttgggaatgggttttgggtgttaggtaggtttcggtgcgtgttgtttttagtgtttagggtttcggtagtgagattttaattcgatagttggataagggattagcgattttgtcgtaaacggatagttttagcgcggattcggtttgagcgttgatgttcgcgggtttaggttagttatttttcgaggcgttttttcggagaaagggcgtagcggttttaagcgtgttcgttgtaattagtgttttaggttttcgtcgtagttagttttttcgggttatagtttcgttttttcgcgtgtatttcgttttggtttcggaggttttgtttttcggtcgttttatcgtagttcgttttaggtttcggtttttagtcgcgttttatttgtgagaagtagatagttgagtagcgcgtatagtaggatttcggtgttttagtagttgattatggtgagcgcgacgcggtttgttcgttcggtgttcgcgtttttcgcggttaacgattcggtcgttagagttcgttttttcgttcgtcgtcgtcggtttcgcgttttgagcgttcgtttcgcggttttagttaggagataattattttttcgggtaattttcgtcgttaggcgttcgttggtcgttgtattcgagtttcggagttcgtttcgagtcgtcgtcgttgtcggggaggagtcgagaggagtgttcgtttggcgcgtttcgagtttttcgcggatttcgatgaagagtagtcgagggcgggggcgatttataatttttttttagtttattttttatttcggtatttttttttggtgacgttaaggggttttttattttttattcgtttttttatttattttttttttttttttaggttcgtttttttgcggttacggagaggggcgggggtcgacgagggcgggtggttcggggtcgagcgcgcgtggggaggtgttggcgacgcgggttcgggagcgcggtttcggtaggtttagggtttttgtttcgcgtttttttgtttttgtttttttttttgtttatcgcgtttaggaaatttttgtagattttttttattcggtttatttagttttgggggtcgttcgaaattggggaagggataaggttgaagtttcgtcgtttggttttaggggcggaaagttcgatttaagggaagttggtcgcgttttcgcgacggtgtttttggtacggaggattgaggcgtagttcggttgtttttttttgtttgtttttttcgcgttgtttcgtcgtttttgatttttttagattgtttcgagaagtttaggaaggtatcggagattttcggtataaggtattgaatttggagcgtttgaggggaattgacgtttgtttggtatttttgggaagattgcgaattagtttaggttttaggggagcgtgttcgtgtttttttcggtcgtattgatgtattcg

SEQ ID NO: 6646 - DNA, 2190 bp, Artificial Sequence; identical to SEQ ID NO: 6645
  Description of Artificial Sequence: Synthetic polynucleotide

SEQ ID NO: 6647 - DNA, 679 bp, Artificial Sequence
  Description of Artificial Sequence: Synthetic polynucleotide
tcgagtggagagtagcggtcgtagcgcggcgttaggttcgggttgggttggtcggcgcgaattttcgggggcgtttgggcggttaggtcgggtggcggttgcgtacgtaggagtattttttgagtttagtcgttcggtcggtttgattcgcgggtgatcggatacgagtaacgcgtgcgtttcgatttgtgttttgcgcggggtcgggcggggatcggtcgggggcgtcgcgcgttcggtcgggttgattgtcgggggcgattttcgcggggtaaggcgggggcgcgggagtagcgcgtagttgcggggttattttatttgagcgttttgaggttagggtcggggtttgaggatacggcgttgggtttcgggggacgcgggtttacgtcggcgttcgagcgttattttttcgtttttcgtcggtttacgtagtttcggggttcggtacgtgaagtgtcggcgcgaggttgtttaggttatcgtatgggtcgggcgataaataatcgtataggatatataatattttggattgttataagtttttcgtaggaaaagataaataatatttgaggcgttgcggcgcggttttttcgggttgaataaaaattaggaggtggggggcggtggggcgaagtaaataatagaatcgaagaattgtcgtacggagtttgggtcggcg

SEQ ID NO: 6648 - DNA, 2013 bp, Artificial Sequence
  Description of Artificial Sequence: Synthetic polynucleotide
tcggtagatttggagacgttttcggttttttgggagtttttgagggtttaggtcgggtggggcgcgttttgcggtaagttttttttttttagttatcgttttgaggagtagaaggcgcggggatatatatatatacgttcgggtacgtcgtcgtatttttttaattgaattttggtgttttttttttgtttgtaaagatattttaggttttgggtttgggagttgttttcgcgcggttttgtttgattttagcggggttatagtagtttggcgttcggagcggttttagcgcggcgtcgcgggtttaggtgggtgttttagagagcgggcggttgcgcgattgaggagttggaggcgtattttttcgttcgttagacggttcggttcgcgttttcgttttatttttttcgcgtttttttttttggaaaggaaggtcggagttgtatttttaaagcgttttcgtttttatttttttcggttcgtcgcgttttaggggttttataaatttgttgtaagtcgtcggggttgtagttgtaggtaagggtgaggcggggtcgcggtttgggttgtcgagtacgtttttttttagttttaagcgtgtacgttttttacggacgcgtatttagtattttattttcgtcgttgttttcgaggttttcgtttaattagaggtcgcgcgcgtcgcgtcgtcggcgggtagatatatcggtttttcggtttgcgtttttgcggttttggtttcgttgtagcgtttcggttcggttatatttatcgtttcgggcgcgtcgttcgcgcgcggtttcgtttcgggtcggtatttttcggttcggttgttttcggttttcgtttcggtttcggttttcgtttcgtagggttcggtttcgcgatggtggtcgcggcggcgagcgcggtagggagggcgtgtgtatgcgcgtgagagcgcgtagcgtgtgtatgtgcgtgtgcgcgggagggtttcggtttttttgcgcgtttcgtttttgttttttgttcgttacgatgcgatgtcggtagaatttttatcgcgcgtttttattgttcggcgtttatattcgcgtatatacgcgtatatttaggcgcgtatattcggtttcgtattttcgattcgtttttttggagcgtttataaagattttttgtcgggacggtcggagtttgcggagcgcggttttgggttttttcgggattcgtcggttttaggtgtttcgttgtttttcgtagggatttcgcgggcggttcggttttcgtattttgtttggtcgggtcgcggtcgcgtttttagttcgaatttgggtttaggtgtcgattcgggtttttcgtattttcgcgggaagcgtcggtttttttcgcggcgtcgtcgttttttttttttttttttagttcggttttttcggcgtttttttgttttgttttatttgtttagttcggttttcgtttttttcgttgtttttcgtttgtttcgtcgtcgttttttttcgcgtttttttttttttatcgttttgcgttgttttttatatttttcgtattatagcgggtgtcgttcgtcgttcgcggggtttagggttcgagcgcgtagtgggcggcgaggggattcgttacgttcggtttcgtcgtttttttcgtttttcgcggtttcgcggttgttagtttcggtttggcgttagggtggcgacgtttcgcgttagtttcggttgtcgttgatagtttttatttcgttcgggtttaaagggatagcgtattcggttcgatcggttttattcgggggtttcggggaagggatttcgttgcgcgggaatagttcggggcggtggtatagtcggggtcgtgcgggcgacgtttttttcgtcgtcgtggagttcggttttcggggttggaggtgagttaaggagaaggacggttagattacgttatttagggggcgtttagcggttaagtttttgggtcgataatgggtgtgcggcggtgtaggttgagcgttttggattgcgtggcg

SEQ ID NO: 6649 - DNA, 1501 bp, Artificial Sequence
  Description of Artificial Sequence: Synthetic polynucleotide
tcgaaagaggggcgcgggtgggcgcgttttttcgcgagtattttatttaagggggaattttttttagcgtacggcgaagttttttttcggttgttttatttggtagtttttttaggatttcggttagtttttaattggttttagtaatgtttagtcggagtttttttgggttttcgagtgggagaaaagtgagagtaggtgtttttttagcggcgcgtttcgttagggttcggtaggatttcgtttttaagtcggggaaagttggtcggcgtttttttttttcgacgaagtcgttttagggttgtttttagaggacgcgcggtaggtaaagagaatgaatttgagcgtttacgaaacgttttgtacggttttcgggagttgggagaaataggtgttttttttcgacgttcgcgggcgacgtttgtcgtattttgttcgttgtcgcgtttttttcgggtatttttcgttttcggcgtttttgttttcgtttttagtgttagggcggaggtagtttcggttcgtaggtaattattgttagcggagttcgtcggggagcgggggtgggcgcgtcggcggtgggcgggcgggcgcggcggggcgcgggtataaaggggcgcggcgcggggtttcggagtttggttttcgcgtagtatgttcgttagcgtttcgtcgcgtcgttcgcggtcgtcgtcgtcgtcgttgtcgttgttgttggtgttgttgggtttgggcggtcgtcgtttgcgtgcggagtcgggcgacggcgcgtagatttgggttcgtttttcgcggttttttgttttcgaggtcgcgggttttttttagggtatttttttcgacggttttttttgggtcgtgggtagcgtcgtttattagatcgagggcggttggtagtagtacggtaagggtgcgtttatttgggatacgtttatttattattttttggtattttcgggagattttcggaacgttagtttgtcgttgggcgtttcgtcgtcgttgtagttcgttatcggggacgtagttagcgatagttataataacgtttttcgcgatacggaggcgttgcgcgagttcggggttatttattatcgtttttttatttcgtgggcgcgagtgttttttaatggtagcgcgggcgtttttaatcgcgaggggttgcgttattatcggcgtttgttggagcggttgcgggagttgggcgtgtagttcgtggttattttgtattattgggatttgttttagcgtttgtaggacgtttacggcggttgggttaatcgcgttttggtcgattattttagggattacgcggagttttgttttcgttatttcggcggttaggttaagtattggattattatcgataatttttacgtggtggtttggtacggttacgttatcgggcgtttggttttcggtattcggggtagttcgcggttcgggtatttggtggcgtataatttttttttggtgagtgcgaggggttaggcggagggttacg

SEQ ID NO: 6650 - DNA, 668 bp, Artificial Sequence
  Description of Artificial Sequence: Synthetic polynucleotide
tcggggtcgttcgtacgtaacgttttcgggtcgggttaggttggttagggtagggcggtcgtttttcgaggaattgcgggcggggcggcggggttaagttgagcgttcgttttgttttcggcgtttcgcggttgcgggcggagcgggttttgcggagtttttcggtcgtttttttcgtagttttcgtttttagggaaggtaaattacgtatcggttcgcggagagacgtcgtcgggggtttttgtggtcgcgttgggggtcgttttttggtgttgttttcgtcgggttgggcgcggtcggggttgcggggttgtagggttggggggcggcggcggggtcgggttgggcggtagtagttgttggagcgcggcgtttcggttgcggttattagtgtagggatgtgtttcggttcgtttttattgaaatgcggcgtttcgtatagttttattttagtttttttttttagaggagggcggcggcggcggcggcggcgggcgcgttttttttttttgttttattcgtttatacgttttttcgttttttttttttttttttttttttgcgtgcgcgtttcgtcgttttcgttttttttggtagggcgtatttattacggttgcgttttaggttttttttttttttagcgttttttttttatcgtagtaatttcg

SEQ ID NO: 6651 - DNA, 1006 bp, Artificial Sequence
  Description of Artificial Sequence: Synthetic polynucleotide
tcgggcgttttgttcgttcgttcgcgcgttttaggatttaaagtcgggttttaagtcggcgttttacgtcgaggtttcgtcgtagttttcggagttggtcgtagataagaaggggagggagcgggagagggaggagagtttcgaagcgagagggtcgagcgttatgcgtcgcgttagtagagattatattaagtatttgcgtggttcggaggagatgggcggcggtttcggagtttcgtacgagggttttttgtacgtttcgtcgtcgtttgcgtcgtattagttttttgtcgtttttcgttttatgttcgtggtttttttggggttggggttgggttaggttgtttgtagcgtcgttttgtttttttattttagagcgtaggtgagtggttatttttttaggggatcgcggttgagagcgtttatttttttttttcgtatttggaaattgagtttggcggtagggttgggttatttagagtttgtatatttcggaagggaaagtgattttagaagggagagaggaagtgttgagtttggggataatttggcgtagggttgtcgggcgtattttgtttttttttcgtttacgtattttagtttttcggtgttttgggggcggatttttttggtcggacgatgggtttgaattttatttcgttttttcgttgggaaataatattggttttttattttttttggtagtgattgtatattttttttttttgttattttttatttgaagttaagaattaatttttgtttacgtaggaaaaaagatgagcgtttttatttgggtatttattttttttttttcgtttattattcggcgggtttcggtttttgcgtttggttgttttgtaggtgtgttggggttacggtgttggagggttgcgcggagcgggaggtcgcggtgttcgtgtttaggtcgtttaatgggtgggtagaatgatacggcgcgattagagaggcgcgggttcgggatgggggttttgcggttgtggcg

SEQ ID NO: 6652 - DNA, 867 bp, Artificial Sequence
  Description of Artificial Sequence: Synthetic polynucleotide
gcgcggaataaggcgttgattgttttttagttttttttttttcgcgttttttcggtagtagcgaaaattcggaaatttgattttggttttaggagagtcgggttttatgaggtgtattgagtatgttttgtagggttcggcgtgggagggacgcgttggcgttttttaggttcgggcggaagcggcgttcgtaggcgttgaaagcgagcgattttttgagttcgggtggttcggcgggtaagggcggcgcgggagattcgtagggcgcgggcgcggattcggggaattagggttatcgttgcgggcggatgggggttatcgaggcggttcgtttttaggcgtatatttcgtatatttttttgttaagtgaaggggttaaaatgtatagatgggggagtttatttaggaatagaggcgcgagacgtatagttatttttgggttgggagtacgagttagtagattttcggagcgcgttaaacggataatatgttcggtgttgtaaatagaggtttttgttggtagggatattggaaagaagggcggagagggagtatagcgaaaggtggggatcgtagaatttggaatttttgcggagatcggaaagaaaattaatcggagtattttttatatgtagagttacggaaattgttttggaaagagaaagtggtagcgtttgggttttttcggttagttcgggttagtcggttgcgcgtgcgaagttttttttagcggagcgggatcggtcgcggcggtggatcgtggcggtttttgtatttttgttttagtcgcgtttggaaatttgagttcggattcgcggttgttgtaaaattcgtttttagtttattttattgcgaattttgttttcg

SEQ ID NO: 6653 - DNA, 1072 bp, Artificial Sequence
  Description of Artificial Sequence: Synthetic polynucleotide
tcggttgcgtcgttttagtttagggacgttttcgttttcggttgttatttatcggttatcgagcgttcgtttcgtttcgggtttattatgtttgttgtagtttggttcgtattagaggcgcgataataaataagtgtattggattgggttttgtattcgtttcggagtagttgttttagagattcggtgttgtttatcgcgttgttattttttcggcgttcgggaggaagacgtaattttttcggagttttttttagagttatcgggttgttaggataagttataggtatagaacgacgcggttgttgttcgtttttttttttttttagaaattttaaaggatgtcggtgatagagagttttaattaatgacgattgtgcgtcgtatttggggaagggatatagaaaaaaattttgtaaatatcgtgaggatgaaattgttaaagggatgtaagagttttttaaatattaattaggggtcgcggcggcggcgggttcggcgcggagatagcgtcggcgggattttagcgcggtggtcgtcgttgcgttggggggcggaggatagcgtaggagttgtagtcgtcgttttcgttggagtagtcgaggggtcggtgttatttttgttcgtttttttattattatgtatagtgtgcgttgtaagaagaaggcgggagatgtatgtatattttcgcgattcgttttttttggttcgtttttcggcgtgcgttattgattaggggggaatgtggtgaagacggcgaggaggagagtcgaggggggaggggagggtcggtcggcgcgaatttaggtcggagggtgcgaggagttagaggaggttggagggggcggcggttatagttgggtcggagaaagttgttttttatgtagatggtaattgtgagtatttttgtgggggggagggtgtagcgaaggttgttagggatttcgcgatcgcgttttaatacgtattggagcgagtgtgcgagtgattatgagtgtgagcgggtgcgagcgttcggcggggttgatcgttacgttggcggggtcggcggggttaggtagtttttttcgcg

SEQ ID NO: 6654 - DNA, 1633 bp, Artificial Sequence
  Description of Artificial Sequence: Synthetic polynucleotide
acgcgcgtatatatattcgttttcgtttgtttatttttttttcgggggagtcggcgcgcgtttttatttttgtcgtatatttcggcgagtcgagttcgtagcgttttaggattttgcggttcggaattcggattgtagttttgaatttttatggtggttttttaaatattttttttttttttttttttcgttttgattgtatcgtttttatttgggggttagaggagtaaggtagtagtttttttagttagtttttgttggtttgttatcgtttatttggtttataaaagtttgttgagcgtagtttagagggttgcgttgttcgttttttcggttggtagaagggggtgacgttgggtagcggcgaggagcgcgtcgttgtttttggcgggttttcggtttgaggggtaaggtgaagagcgtatcggtcgtggggtttatcgagttggatttgtatgttgtattatgtttttttggatcggggttgtgatttttttttttttggggttgttgtttttttttttcgtcggggcggatgtgaaggttcggagttgcggagaggttcgttaggcgtacggtgttaagggatttagtttggcggatattttttattaggagatcgtaggtaagcgcgggcgcgttgtaggggtaggttgtagttttcggttgtcgtacgttttattggtcgttcggcgtttttttttttttttttgttgttgagttggtgtttattttttgttatcgttatgggatttcgcgttttcgtgttgggcggcggatgtttttgcggttttttcggcgggggaaggtgtgcgttttcgtcgttttattgtgtgtatacgcgggagtattttggttttcgtttttcgttgttttcgcgtttttttattttttagttgatggtttaggttcggttggttagggagttcgggttatttcggggcggttgtaaggcgtagacggagagtcgagtcgggcgtttatttcgcgttttggttcgggtaaatttggaagaattgcgatcgtagtttgtttagcgttatagtttgagtggcgttttttttattttcgtttttgcgtcggtaggggcggtggagagacgcggagggtttttttagttttttttttttttattcgtttttcgggcgatagagcgttcggcgttcgggtcgggggcgggtaaggttgggagggattttcgtcggggatttggtttttggacgtcggcgttttaaggttggtttggggattttacgggttgtttgttttagatgtggggcgggttttttcgttagggttttttagtgtttttttagttgttgttggttatttagggttcggggatattttgttattcggtttggagtcggtttcgtttgttagcgaatagttaattttagcgggtggtttagttggggattcgggttcgggttcgggggtttcgtgtttttcgtatgttcggttattggtattgttttattaagagtttgagagcgtttattttttttttcggcgttagtgtgtgtagtatttggttttcgataatttgcgcggtagtttgggtgtttgtttttcggtttttagttttaatcgaattcgagtttttttggggttttgtgaatgaaacgtgtcg

SEQ ID NO: 6655 - DNA, 1143 bp, Artificial Sequence
  Description of Artificial Sequence: Synthetic polynucleotide
tcgcggagttttcgcggagatttgttggagttaggttgtttatttttatttttttattcgcgcgttggtttagaggtttatttaggtagcggttttggtgtcgagggggtaggtgtagcgttgtagtgatgtttagtggtttcgtttttagttatttgttttttaatatttgttagatgtttaggcggggtaggttcgaggtgtcgtcggttttgggttttttaagttagtttaggggtatttcgcggtaggcgttttcgatatttacgcgtaggaatagggagggcgtatcgcggttttcgcgtttcggttaggtcggtaaggattttatcgtttcgttttcgggtggaggcgtttttttttatttttttttcgcgcggggttttcgttcgtagtttttttagtagtttttttcgtagttttagcgtttttgagtcgttttggttcggatcggttaaggaattaacgagcgcgtatcgcgggtttcgggcgtagggtacggagtcggtcgcgtcgtagtttttcgggtatcggcggcggtgattaatttgtaattttagcgtttagagttgttatggtgttcgcgggcggcggcggcggcgatagtgggcgatcggtaggattagtgttaggcgcggcgtttagggcgggcggggacgcgggttttttatttacggcggtttagtttaggtagcgcgttcggttcggttggggtcgcggtttacgttcgtcgtgttatttattgagcgtcgtcgtcgtcgggtaggttgggggaggggtgggagtcggagttttcgggtttttaaaaaattattattttatttaaatttttaaagttagttttgttatagggattgtagtgatgtcgaagggcgggtatcgtagaggaggttgcgtcgtagttggtggggagcgttagggtcggtattggtagtttttttttgtcggttgttattcgtagttagttttatagtaatagttaggtttttatttgcgagtttttttcgggggtttttcgtatttaatagtacggcggcggtgtgtacgggagttcgtcgggtatacgcggggtatatttaagtgtattgttaggaggtcgggagtttagcgtgcgagcgtgaggttagattgtgtacggtatcg

SEQ ID NO: 6656 - DNA, 1143 bp, Artificial Sequence; identical to SEQ ID NO: 6655
  Description of Artificial Sequence: Synthetic polynucleotide

SEQ ID NO: 6657 - DNA, 1371 bp, Artificial Sequence
  Description of Artificial Sequence: Synthetic polynucleotide
tcggttgagagcgtatggcgttttgagtagtgtaggtttcggtatcgagggcggaaagcgttttgagtttatagtcgtacgatagatcgtcggtttgggttttttaggaattttttgtagttttgttcggttttcgattttcgttatttattagtttttttaggtatttaagagttttttagcggcgggttagggtcggttttttttagtaggtttttttggagagcgggaggaagataggaggcgttttttcggtggagggttttttagcgacgtagttaggagcgttaggaggttataatcggaggagaggttggcgttttagttttagttttagtttcgaagcgattttttttttttcgaggtggttttggttaagtttttagttattttcgttaaatgaggaggtgggcgggatgtagacggtggagcgggaggtttgggcgcgttagtttgggagttagtgcgcggggtagggcgacgggtagcgcggggacgcgaatttttaatttttgcgtttaagacgaaggattcggtttcgatttttttattattcggcgcgtattagcgttcgtttagtgatttttaggtttggtggtggttaggggtgggaggtgagtcgaaagggaaaaagttattttatttaagtcgtcgtcgggttggagttagtttgcgcgggtttcgagttttcggcgacggcgttagtttttttcgttcgttcgcgcggtgttttcgtcggtagttttttcggatttcgcgttttttttcgggcgttcgttttttcggagttttaacgtttgtgcgcgtatttggtagtagagatagtagtagtagtagtagtagtcgcggcggcgatagtgttaggggtagcgagagcgggttagagtttatggttggtggtcgggttggtcgcggattcggacggtcgggagcgggcgcggcggtcgtagagacggttttttttcgcgcggttttagcgtagattttagatttggagtcgtgcgggcggagacgcgcggggttttttttcgtttcgtcgtcgttgggtttttagcgttttcggattcgcgggaggataggaattattcggagtgaagttgcgttaggtgcgggcgggcgggcgggcgtgcgcggggcggggcgtacgtgcggtaggggaaggggttttaggttttagtttttagcgtcgggcgagtttttttttcgtcgggttgggtgtttcggtcggcggcgttcgattagatttgagtaggtgttgttattattattaggaaggagagggatttagtttttgttttaggttttcggggcgtgtgtagttttcgtagggggttgggattatcgggttaggcgggcgtcgtaggagagacg

SEQ ID NO: 6658 - DNA, 1545 bp, Artificial Sequence
  Description of Artificial Sequence: Synthetic polynucleotide
acgcgaatttcgcgggtggtttcgggtggtgggttttttttagcgcgtagttttcgttcgtttttttttcggcgttgtagtcgcgatttgggatcgaacggatatcgttttttcggggtttcggcggcgttttgatttttattttttttcgtcgtagtttttggtagggtatttttttggcgcgacgtcgcgttttttttcgggatcgttttttcggttttttagggtgcgtttagttgttgttcgtgcgtttcgttagtttgagcgtttcgggcgggcggcggtggagaagtttagtttagttttttttagtcgcgttttcggttcgcgttgtttttagtttgtaagtttatgacgtggcgacgtcgatcgagatataaagatcgaggttgagatcgttaggggttgagggtgaggtcgcgtttcggggtcgttggagcgcgggcgttatgcgagattgtttcggttgcgcgtcgttttagaggagttcgagcgttttttttagtcgcggcgcgttggttttggtcgggattgtagttaggtgggcgtcgcgcgtgtgagcgtcgcgcgtgtgagcgtagatttggattcgggcggcggaggcgaaagtcgttttattcgcggggtgtaattttgggcgcggaattcgggttgtcgggtgatagtgattagttgattttggagtttatcggaggcgcggtatcggaggtcgtgcggattattgtcgaatagtcgttggagattcgtagagaagggcgggttttgcgttcggggcgtttcggaggtaagttcggagagttcgggtcgggcggagggcgggagcgtacgagtgtgtgtgtgtgtgtgtgtgttcgcggtgtgttcgcggttcggtgtatacgcgcgcgggttgtaaagttaggagttgcgggagcgtttttttgtttcggtttggtttcggagtattgcgggtcgcggaggtgtgggggtttttgtcgttgcgtttagggtagcggcggaaaaggtgtgtgcggatgcggggcggggtcgtatttggtggatagagtagggattcgggaagagaagttacggaagatgattatgtagtttggggtaagtttttttggttgagtatcgttttaggaaacggtgttttgagggttaaatatgtgagttatttgtgtaaaaagtttgatatattagaggcgcgaagtaagatggaaagttggataagttttaggtggatcgatcggtgtatttaatttttaaattgagatttttagttacgttgatgtggaatgggatcgttgtttttttcgagggtttgataaggatgtttaattttatttgttagaaagtacgggagttgggtttggttcgcggggagcgtaagttcgtttatacgcggtttaatttaggtaaatgtagtatgttcgatttgttttgtcgttattttttcgaaagcgataatttttttgggttatcgaatttattagagtagttatttgttttttcgtcggcggtgcggggagcgtaatatttgagtagtttaatttttatagcgcg

SEQ ID NO: 6659 - DNA, 1545 bp, Artificial Sequence; identical to SEQ ID NO: 6658
  Description of Artificial Sequence: Synthetic polynucleotide

SEQ ID NO: 6660 - DNA, 1027 bp, Artificial Sequence
  Description of Artificial Sequence: Synthetic polynucleotide
tcggtttcggttttagtttcgataacgtttttagtgttcgtagaagcggttttcggatagcgaggatagttcgtcgtcgtaggtttattcggcgtttgatggatatggtggttacgttttggagtataacgtattgtattttattgcggagaggacgggttagagtatttcgggtttttcggttggggtaagggttagcggatgaggggaaaaggtggggtaagtcgttgcggggagaggattagtgcggagggtaggattacggttagtgtggagcgggtgggtagaggtggaagcggttggtgggcgtgagggggcggagtcgggtagttcgtggggcggggtaggaggcgagggagggggcggggttgggggcggagcgtatttgtggttgcgtagtaggcgtattagcgttttggcgatgacgtttattttcgttttgggcgttaggtggaagtagagttgcgttatcgttattattatcgcggcgttgcggttttgtagtaggggtttggtgttgcgtagtagtagtcggtggtcggggtttatgatatagggttttcgggagggggcggtcgcggcggtcgtttttttagatttcgcgtttttggtttcgtttttttttgagtcgtagaaggtttttttcgcgtttttttttagtagggatttttggacggggagatcgacgggtttgtgggcgttttttcgggatatatttcggttcgttttgtttgggttgggtttatttacgttttgggtggggtttaggaattgcgtgcgggcgtagcgggtgagtatgttgatgatgattatttggttttatttttttacgtcgattagtaggttatagagttttcggtagtttttgtgaattaggtcgatgcgtttcgggtagatttttttaaaggttattattatattgttcgttattagttggggaaagaataaagacgagagggtgaacgcgaagggtggaaggtcggttgtcggttattatttttttcggagcgtttttatatacgtatcg

SEQ ID NO: 6661 - DNA, 693 bp, Artificial Sequence
  Description of Artificial Sequence: Synthetic polynucleotide
acgaataaacgttttattttcgggtagtcggcgggtgcggagcgagtattcgtggggcgggataagtgcggaagtcgttgcgttttcgtttttttattttcgggggacggttatttttagggttttcgaggagttcgtttcgtgtatttaggttttaggtcggtttttaagttttggttcgtcgttatattagcggttttttattcgtaagtataaatgtgatatagatattagtttttcgtgtttttggtttttagggttttttttatcgcgttttagtatttgtagtttttttatttttatagcgttcgtcgtcgttaaggtaatagagggatgttcggtgatagattcggcgtcggttttcggcgtcgtaagagaagcgttcgcgcgggcgttttggattcgtagagttttcggcgttttcgaagtttttggtgtggtcgggattcgggagaaggagtagggttggtggggttgttgtagtcggtgagtgtgtgttggcgttgggggttggaattttttaggttagtttttgggcggtgtcgtaggattttgttcgttgcggttttgaggcggaaataggggttggggtcgagcgcgggttggaagttttggtttttggagtgtcgtttttagtttggggtcgaggcggtcgtttgtgtagattcgggatttttaaatagaacgaattcg

SEQ ID NO: 6662 - DNA, 1496 bp, Artificial Sequence
  Description of Artificial Sequence: Synthetic polynucleotide
acgtcgagcgattagatgtaaaattttttagcgtttgaaattatcgcggacgtcgtcgtcgtcgtcgtcgtcgtcgggtgggagtcgcgaggagcgtttagtggcgcggtttgtcgggtatggtggtcggttcggcgatcgttgattcgtcgggttcgggggttttggaagcgaggcgcgtttttcgatttcgagattttgtagggttgtaatagacggtggggaggtaaaaaaaaaaaaggaaaaggaaaaaatggtgttaaagttattaagttttatttattgggtagaattaaaacggatatattacgtatttgtaaaatatatatatttatttttatatatatatatattcggagttcgaggaaaggaagagaaggaagatgtagtaggagttgtagtagtcgtcgcgaatggttcgtcgcgcggttgtagaaatgtataagtgtttcgagttttacgaaacgtacgggttatcggagcgtttttttcggtttttttttttttttttttttttttttttttttttttttgtcgcggtttttttttttcgtttttcgttcgggttgggagcggtaggagagcggaattttttttttttttttttttttatattcgttttttttttcgtttgtttttttttttttttttatttatttatttatttattcgttggttcgcggttgtagtcggtatcgttattcgtagtttcgcggtagttcgttcgttttacgtttcgtagcgcggcgttcgttagtcgtagttcgggggaaatcgagatcgaagggaaaaagttgtatttgagattgcgagggtcggggttggggagggagagttggcgagttggttgtacgatacggaaaggcgtttttttttttattttttggttttcgcgttattcggttttgttgtaattcggatcgcggtaggaagtgaaatgaacgtggcggaggtgattggggagtgtttttaagttttgggtggggggcgtttttaagtttgggtgggtggggggcgtaggtttacggacggcgacggggggtgtcggagcgtatagatattttagagaagtatttagagtcggggatcgggatcgtagacgcgtagtttttggtttgaatgatatttattttcgtaatttagagtttggggttttggttttggttgggaggggattgcgggatatggtacgttaggtgtttttcgtgttcgttgcgtttttttggaggtgggttttgtattcggttttgagtaggtatggatcggggaaggaagaaataggggtcgaaagggttgcgttggagagtcgaggtggtttcgggcgagttgtgcgtgtaagagaaatggtcgggggaaattgagatgtaaggggtatattttggtaagcgttacgttagtatcgttagaggtcggtttttcgggtttagttttcgggtgagttgagttggttgtcgggtgagggggcgggcgggttgtttttttcggattcgggggcg

SEQ ID NO: 6663 - DNA, 5820 bp, Artificial Sequence; identical to SEQ ID NO: 6416
  Description of Artificial Sequence: Synthetic polynucleotide

SEQ ID NO: 6664 - DNA, 699 bp, Artificial Sequence
  Description of Artificial Sequence: Synthetic polynucleotide
tcgtggtgggcgaggtattcggggtttttttttttttggtttacgaatttttaatttcgaacgttgtgggattgtatgggtttttgttcgggttaatgaaatgcgttgtcgagaggaggttgcggcgcggtttgaggtcggatttttataggtcggagagttttttgtcggtcgcggtcggatttttcgggaaatgggattagagcgcggagggagtttggttaggaggttttttaggatttagtcgcgacgttgaaaagtatgaagggtcggaattaggtatttatttagcgagcgttattaattcgaagttatagcgttaattttttgattcggtcgtttttatacgtagcgtcgggattagaggcgcggtcgtcgttcgtttcgtttttatattttaaacgcgttcgtttcgcgttttcgaggttgcgggtttagggttaattcgtcgcgtcgcgttcgtttggttcgagcgcgcggcgggtcgggttcggttagttggggcgagtcggtttgttcgttggttcgggcgttcggtttcgggttgggtaaggagcgtttggttatgagtcgcgggatagtttaggcgggacggatgcgttttttagggtttaggcgaggtcgcgcggtgtagaatcgtcgggatttttttaattcgggtatgcgtatttatagtagcggtttttggaggtcgcggcg

SEQ ID NO: 6665 - DNA, 1845 bp, Artificial Sequence
  Description of Artificial Sequence: Synthetic polynucleotide
tcgttttttcgtcgcgcgttgggggttgtttttaggtgttggtttttgtgtcgagaaaattttgcgaggaggcgagggagttggataaagagcgggcgagggagggcgtttgttagtttgaggggtgcgtcgggcggtgcgcgtatttttttgggtttagtttcgtattcggtcgttcgcggtggttagagtttagtttttttaggttaggagtggcgttcggttgtattttcgcgttttcgggagttgaataaagttaggcgggagaagtaaaggttagcgtttggacgttggagttggtgggaggaggcgagtagaggcgcggagtaaagttgttaaattgcgcgcggagtcgggcgtggggcgggggaagggagaggagggagggaggggtaggcgggagtcgggagggagcgagcgggttcgtcgcgtttgagtaatttttgtttgtcgttgtcgttgtcgttgtcgttgtcgtcgtcggttcggattcgttcggagcgtagggtgtttgtttagttgcgcgcggcgcgcggaggtttcggcgttcgtcgttgcgtttttcggtttttgtttttcgcgtcggttcgcgtgggtttcggcgggcgcgaatttattatgtagttgtagtttcggagttggatgttggtcgcgtttacgttgttcgtggttttttttattttcgtagatattttagagatcgaagaagaaatcgggtaaatagttgtttttaggttcgtgttacgagttttggcgggatttttttttttttttgtattttttatttttcgattttttttgtgtgcgtcgcgtttcgttgtagtttcgttggagagatggggacggtttggtagaaggtggcggcgataggggttcgggacggtttggggagaggagggtgggggcgcggttgttgtggggtgttttcgggcggggtttacgggaagtttttagttggttcgcgtcgggaagcggattcgtttattttgtttttttgtttggcgtgtttaagcgtagtgtcgtcggggtcgagggagggcgtcggggagtgtttcgggcgggcggaggggtcgagagtggagggaggtaggagtttttttgtttttagtacggtcgttttttcgttttggtaaagtgggtagggggcgcgtagggatttttgagttgggggaggggtttttggggtcggagcggagggcggggttttgtatgggttattgggaagcggaatgttttttgtatatatagataggtatacgcgtttttcgtcggttcgggagttcggcgtaggagttggtattattagagaagggttcgtatagttggattgagatttttcgttttcgtttggttttggacgtttagttaagttacggtaatttcggcgattttgggtttttgtgcgttcgtagcgcggagacggagatatttcgggaaagtttgtatcgtcgttcggtgggtttttgggtttttaggcgggcgatttggcgttttttttttttcgatttcgttagaggtagggtgggatcgcgagttcggattttttcggtttcggattttttggagtgcgtatttgaggcgcgggacgtatcggttgtgtgttttaggggttgagattcgcgtttcgtttcgtagttttcggttcgtcgggtcgggttttttttcggaatttttaaagggcggtagacgataggtggggaggtagtcggggttttgaggaggttcgaggagagttttttggttttgggtaaggggaaggtgaggttttaaagagggtagaaggtttttttttttgtgggatttgtgttttgttaggcgtttttttcgagtttcgcgtcgcgtgcg

SEQ ID NO: 6666 - DNA, 1844 bp, Artificial Sequence
  Description of Artificial Sequence: Synthetic polynucleotide
tcggcgattttttggtattttggatagtttttcggggagtagtttatcgttaggcggcggttgttaagagaggaatttttttgacgcggagtttgtcgtttcggggttcgtttttcggtaggttcggggagaggtggggtgataatgggttggggtgcgcgcgtgttttataggtgcgagatagagcgagtcgtcggggtgtgagttagcgcgttgggggttaagaagttgggtgaatagttacggaattttatttacgttcggtttttttatttatttcgtttatagcgcgtgttttagtttagggcgtgcgtgcgttcggtgttcgatttcgggttgtgtgtgtttatttggcgagatgtcgagagcggggggagtgtttttgtcggtgtatttgggtttaggttaggggattttttttttttattttcgcgtgggtgtgggggtgtgttcgggttagggcgcgtgtgtttttgtgtttgtgcgtgcgtgtgcgggttagggtggtgggatcgcgtattagggtagggtgtttgcgtttgcgtttgggtttgtttggtttgtatgtcggcgcgatttcgatttggattcgtgtttttggatgtcgagaggttagcgtggtgggggtgtttagtttttcggaggagtattatgttttgatattttcgttttatcgttttaaagttggtttggggtttcgtagggagtggtttgtatggggagggttcgcgtgttgtgtttttgggaggggtaagagagtgggggcgtagggggcgggttaggtttttgggcgcggcgcgggttcgggggattcgcgcggttgacgttaggttattttttaaatagagtcggtagcgcgtttcgttcggtatttttcgaagagttagatcgcggtcggcgttagcgttatcgttcggtttattcgttagttcgtatagtcgcgtcgtcgtcgagcgtttcgtgagcggcgtttcgaggattaggaatggggtttcgggcgttgggcgcgtttcgaattcggcgtacgtaagagtttgggagcgttcgagtcgttcggttgttcggagttttatcgtttaggatcgggagatgttggaaatgtaatcgtttgtttttcgaggagtcgttgttttcgggattttttggtattgtgcgtattttggttagtagttttcggagaagacggcgtttttaacgttcgattcgcgtggtcgtggtagcgttacgcgagttttttaggcgatcgtagggttatagtagtttagtcgtcggtgttttttcggaaattatgattttcggcgcgggtttatggagttatggtttatagggttttgggtcgcgcggggttattttagtcgcggagggcgcgtaggttgtttttcgtttttacgttttcgtttttttgtatttatttgtgttatagttttttgtgttgttgcgacgatttgggtcggagtcgttttttcggcgcgtttcgttgttttcgcggttttagcgcgggcggttagaaatttttttagaagtttcgtttttgtgattttttcgggtcgacgtttagcgagtttagcgtttttagcgcgttcgtcgtcgtcgtgttcgtttttcgttttttcggttttaattatttcggtttatttaagttgggtattaagcggttgttttaagtttttattgtgggcgtgaagaaggggggtattcgggtcgtgttggagtttattcgagtatattcggacgtgcgggttttgggtacggaattttatttttttgataggaattacggtcgcgggttggattggtataggtaaggattaggagtttcgtttcgtgcgtcgggtttttgatcg

SEQ ID NO: 6667 - DNA, 1480 bp, Artificial Sequence
  Description of Artificial Sequence: Synthetic polynucleotide
gcgggtgcggtttttcgggagttcgcgggatttttttattttttattttcgtttgggaggttcggcgtgggttggcgatgggggtggaaggttttcgggtttgtggatttgcggtaggaggggcggttggtagtaggagtttttgtattatttttatttttaggggcgtttcggggtgggtgggggtatttagtgtttcgcgaaaggaagaggaggagggggcgagcgtggagatgagtttaggagcggaaagtagcgcgcgttttttcgatcggtagcgggggtgggcgttttttcggggcgcgggagcgtttttaaagtcgcggggcgttcgtagcgggtaggagttttgttttgtatttttttacggcggggcgtttcgtacgtttttttatgttggttttcggtttcggaacggcgcgcgttttttgtttcggaacgtcgtttttagttaggcggagcgttgggagttgggtttaggcggcgggaggagggcgaacgggttcggggttcgggtttcgatggtcgcgtcgtttcgggggagtcggagtcgagttggtcgtcgttcgcgcgtatttattaagttcgttgagttttttttcgtacgagtattagatgtcggtgtggaaatttttgaagaggaagcggtcgtcgtcggttttttagttgtagagcgcgtcgttaggggggtcgtttttcgaggcggtggcggcggcggcggcggcggcgggggcggcggtgtcgttggtcgtggcgttggcgttcgagttggggtagttggcgcgttcgttttggtcgtagttcggtttggggattcgttgcgtgttttggtattagtgcgtggtgaggaaagcggtggtggcgaatagtagcgttagtaggtttagggttacggttaggagcgttcggtcgcggcggttagtttttatgtcgttcgcgtcgtcgggacgggattgtatcgtcggggagtttcgcgcgcgaagttggtagttggcgtttcgcgttagcggtcgttgttcgtcgcgtttcggggttcgggtgtttgagatcggcggcggcggacgcggcgcgggtttatgttttttttaatttcggggtgggggcgcggcgcggggggcgtgcggggcgggttggcggggcgggcggcggtggaggagcggttacggcgcgttcggagttcggagcgcgagtgtatttcggttaggagtcgttggcgtttggtagcggttacggcgtagggacgcgcgttttttcgtggggagatatttgtaggcggtcggcgatattgtttcggagttcgttcgtacggggagagggggtcgttacgtcgggcgcgggcgggggtttgggagtggagggacgttttcgaaagaaattcgagttagggtgagggtttgagacgtaaggagaattttaggtaaggcgtttttgagaaaagatttttacggcggacgtggggtaataaaattcgtcgggagcg

SEQ ID NO: 6668 - DNA, 5065 bp, Artificial Sequence
  Description of Artificial Sequence: Synthetic polynucleotide
acgagtcggggatttgggggttcgggcggtcgtagtttagtgggttgaggtgtcgattagggttacgtttcggagttttgtcggggtttagtttttttttttatattttaaaatgtcgtttagggcgtgggtatttcgagtggtattcggagtcgttgagatttcgtcgagattgttttttgtgcgtttttttatagtcgagaggttagtatcgtgtcgggacgattcggggattcgagttcgggcgtcgttatatcgtttcgggcgttaggtttgggagttttgaggtcggtatcgtgaaatatttttaggagtaaggagggattttaggtgttttttttttgtattttaattttttgttcggattttttttattttttgttatagtttttatatataaattttgttttggatttgtttagttttttcgggatttatagttgtcgtttttatcggagaaaataagtgtttttgttttaggggggattttattttggttggttattcgtaaatttggaaaattattttatgattttttttttgatttttttggaagtagggagtattacgattcgtagagggcgtatatcgattagaaagattttggggggtagagggtgtaagtgttgtgggaagagatgcggagataaattttgcgagttagatttcgatatttttttcgttcgtttgtatcgttttcggaataattggcggttagtagtattttttatttcggtcgtaattttagcgggttaggcgttggcgtttcgatattagtttttatttttttgtagttttgaatttttaaagatattcggttttgtttcgtaggtcgagggggagtgtgcgtgggggtaggggggcgtagcgaatttttttacgttcggagtttagtttagcgttcgaagtaaatttttttatcgttggtagtaaggtcgggcggcggaggtcgggtcgggtgttttggggtcggcgtcgggagcgttaggggtttcgtgcggttaggtcggggcgatttttattcgtatttacgttttatggggttttcgggttttggtcgcggttgggattttcggaaaagtagggacggagaagttaggtcggtatgttcgttttttttttttcgggaggatttaataatttcggaaagattttgtcgggagatgtgttcgtttttttcggggtagcgggggaaagtttagtaaaggtatattgaaaattaaaaagaaaaaaaaaattacgtcgagtggaagaagtaatcggggtcgcggcggcggtgaggtagggggcgcgggggttagtcgcgtgtgagtgggttcgagtgtgcgtgagtgtgagtgcgtgtgtgtgtgtttacggcgcgggtcggagtatttattatttcgtcgggggagcgaggttatttcggggtcggattggaaatgttgaggtttcgtttgtttttttcgcgatatgttggtttaaatattagttggggtagaataaaaaattattaaaaaaaaatttttttaaaattacggaaatcgagcggcggcggcggcggcggtttttttcgttcgtcggttcgttcgtttttttttcggtttttcggtttcgggcgtagcgcgtatgtgttttgttataattatgattattaataatgtattgcgattaattatagaggggttttttgaaaggcgattggtatcgggttagcgttatttaaattcgttcgttttaattaattagttcgtgatttgttgtagatttttgttttttcgcgcgttggtttaataagtcggtcgcggggttggttttgcgcgtcgcgtcgttcgatattgggttaattttttttgcgatcgttcgggatttcgcggttcggtcgtcgggggtcggttttttttttattgcgggttcggcgtttcggtaggcgtttttcgttttttttttttttttttttttttttttttttttttcgtttttttttataatttcgggttgggtcgatttaaattagtatgtttttttcggaattgagtcgtttcgggtggggggtggggtcgggcggcgagggttggggattcgggttgtcggcgcgttgcgaattttttaattcgggggcgaggcgcgtcggttcgcggggggagggagtttcgcggcgggattaggggggagggcgtttcgtttcgtgagtgttttttcgtttttttaagagttattagaaagtagtttatttttatttttattaaaaaaaaaaataagcgagtggggaagagttagttttacgtcggttcgtttttcgtttacggttcggtttttttttcgtttggttcggcgttttttcgtttcgagttttttattttttggatttcgggttcgcgggggcgcggagaagaggatttaggaaaggtttgggaatttgatgggtttgtggttggggggaggggtagttttttcgttattttatttttttttcgttaggggtattgattttttagttttttgtttgttttttcgttttttttttttatttcggatatttttaggataattagggttgaagttttcgggagaagtagtttcgagttcgtgggataagggggcggttcggtttcgtttaggatttttttcggatttttttttcggttgtttcggttggttgtagggcgcgttatttcgcggggaggcggcggtagcggtggcgtcgtagagtttcgggcgggcggagagcggggatcggtttgggtttcgagtttagtttcggtcggggggaggggaggggttgcggtttatattgagcgtagtagcgagtatcggtttagggagatatagttcgggcggattcggtattggattgggttagtttttgggatttttgggtatttcgttttggggagggggtcgcgttttagtttttcgggacgaggtggcggcgtagagtcggaaagcggggtggggggagggcggtggggaggtgttttgttcgaggttgtttggcggcgtcgaagttcgtttttattttttgggtatttgtcgagcgcggcgttcgaatttttcgttttattattattttttttaagttgagatgtaatttttttattttcgttttagagtttagagttaggagttcgatttttttgtcgggtttaggcgttcgcgaatttgagattcggtacgcggtttagtttagtttttttttttcgcgtttcggggttttttcgttttaaggttttcgaagttttgcgttcgaaggattaaattaaattaaatttcggttgagtaatgggggaggaggggggtgtagatatataatttttgttttattttacgattaggaaaggagagggtttataaggacgttttaattcgcgagcgtttttgagtttggtcggtgttacggtcggttcgcgcgaagtgggtatcggtttttcgagtcgatttcgtgtatttcggatttgtattgcgtttcggtagaggattttttttttttttttagttttttaaatttttttttttaaggtgtaaatgtgtgtgtgtgtcgatgaatgtttttgttttttatttgttgattttatttttttttattggtataattttttttttttttttttttgttcgttcgttttttatttttttttttatttattttttgttttcgtttattttttaatatatatatttatatttttttcgtttcgttttttcgttttcgttaggttttgatgggtatagtagattttgataaaaagataaacgaagttattagtggggttgatgttgaagaatgaagataataatgtttttataggtggtgttttaaatgttattattttttattgaatatttaaagagatttttcggtaaagatggatttgcgtatttttggggtgtgagcggttcgtattttttagatttcggggaacgtgtacgggagtacgtgtaaatttcgtattcgtttttattttataaataggggttttcgtatatttattaatttatattgttttaggtatacgaacgcgtttgtgtgtatttgtatatttttttttcggaatgtgttcgtgtttggagtcgttcgtatttttttttaataattttggttttttgaaagttcgggtttttcgggtatcgtatgtagttaggaatttagcggagttggcggtttcgtaaagttttttttttggtgcgcgtcgcgtgcgtagtaggaagttttcgggaataattttatacgtgtttgttatttggtttacgtgtgatttaagattaagtgtaggaaaaaaaaaaattttttttttttaaaaaaatattataataaataattaaacgaaatgaatatgcgaaaagtagttacgcgatgtttaattaaaaatgggcgagtagagacgaataaattgggggatttaaattttaataatttttttcgtttttttgcgttttcgacggcgtagaggcgggcgtttcgatttgcgtttggcgtttttcgttaattttttgtttgttttttttttttcggtggtttcgggaaaggagatgggaggtggaggagggggggatgggaggagggggatggtcggaatggcggggagaggagaattggtttttattgttgatggtaatatattaattacgggttattgtttcggttttaagtttcgtggttcgttggtgcgggcgttgtagtgttagggcgttggcgaggtttcgcgtgtcgcgatgtaaagaaatatattaataaaaatagaagtagagtgggggttattttttatttttgtgcgggtcgaaagtaggcggcgagcgggagtgaggtgttatttttggagtttttttacgcgttttgtttattttagagatttgcgcgttttacgtgcggtagtatttttttaattttgggtggaggtggggtgggggggggattattggggaattcgggtagcgaagtttggatttgtaggtttcgttagagggtttggtatttaggggttgattcgtaatagcgaatggggatagttcgaagtgaggcggtagttgcgtcggggtcgcgattttattggcggagaggaatcgtattcgggggaggcgtttggcg

SEQ ID NO: 6669 - DNA, 2372 bp, Artificial Sequence
  Description of Artificial Sequence: Synthetic polynucleotide
tcgcgattgcgtaaatttcggttttgatattttagttttaggttttaatttcggaagggtttaggtttaagtttgtacgtcgcgttgttatggcgatcgttggttgtttttttcgttttgttttttgagtacgtggtattaggatttcgcgttttttttagttcgagagttaggtttggtttagagtcgggtttattagtatttcgtttgcggcgttttttcgatttttcgtcgtgttttattaggttcgtttatttagtagcgatagattttcgtcgttcgcgcgattttatcgtttttattttagttttttttcgagggttcgtagttcgttttgttttcgagcgtgtttagcggttttgggtattggcgcggttttatttagttatgtagtgtttttttatatattggtcgcggttattggttgtagattcgtcgcggaaagggggcgttttgagtttcgttcgtaggtagcgcgtttcgagagattcgttttaaggtattttcgtaataattttgtgggggtatttaattttttcgtgcgtcggttaagatttttttatgttttttgtaatgtattagattagggaggtaaatatcgaaggtatttgtattgcgtttttattgggatgcgttgtgcgtaagagacggggatcgtttgttgtaaaatcggatgatcggagacgtagggagttaggagtgggtttttttaggatttattttatgtagtttttatatggtttttagagttttgatttcgtggttggagtgtttgtttttttttaagtattggtagtatacgggtattttgtattgtacgtagtatatgttgtggttttttagttcgtggtttgtgtaggtggagattttgcgtgggtttagttttcggtttatacgattttgggtcgggggtattaggcggtgtttggttaggggttttcggggcgggtggtagcgtaggcggtacggatcgtagtagaagatatcgtattgttcgtatatgacggtggtttttttgggcgttttttcgtagagttggtatttgagggtcgcggttttgttttgttggtagcggttaattattttttttagtacgcgatttttggggaagtcgcggagttttcggttatttaggatgaggttgcggtgatattgggggtaggtgatataggagttgcggggtatcggggttagggtcggtgataagtgggtggtcggtggcggtatagtcgggggaaatacgcggacgtcgttgggggatttttggtacggggtagtgggggcgttggcgaatttttcgtaggagttatagtcgttgttcgtttcgttgtataggtttattttgtttaggtttagatagttatagtcggagatttcggagttcgcggttcgatggttttggggggatttagattttggggtttgtattaggatgttgcgggcgtacgtttgatataaattgtgagagtagggtaggatgatgggttttcgatagaaggagtcgtatacggggtattttaattttttttttattttttttatggggatcggtttgggaggagatagcgacggttgtagcgggtgtttgagttggcgaggtggtcgacgggttcgttttgtttagtattttggttagcggcggcggttgtggtggtggtgttttttcgcgtagtattggtacggatatttagagaggcgttagttttgtgagtcgtagtcgcgtagtcgtcgcgtcgcgcgttagttcggatcgtttttatttgtttttttagtttcgtttcggtttatgagtagcggtttattgggcggggggtaagagatcgaagtttttattggttattagattcgttcgttttttcgttttcgtaggttatagggggttcggtagagtttgaggatagggtagttttcgttcgcggttgtaagatttttgaagggggtcggcgtgcggaggttaggggatcgggaaggaggagttaggcgggatgatttattttcgttcggtttattttcgattttcggtgtagttttttaggagttgggggcgtgagaaattttttttcgtagcgagtgggttgtcggagggggttggggtttttcgttagcgtttgcgtttggtttttagttttgagtttcgcgtttatttatcgcgggcgagtgttgcgtagtacggaggacgttttttttttttcgttgttggtagttttcgtaggcgttttattcgggtttaggtttttgtacggtagtggggttttttttttttttcgtgaattcgttgacgtcgtgttttggagtttttttatttcgggagtttgacggcgttggcgtaagttttggcgatatttttggttttttttattttgcgtttttcg

SEQ ID NO: 6670 - DNA, 2372 bp, Artificial Sequence; identical to SEQ ID NO: 6669
  Description of Artificial Sequence: Synthetic polynucleotide

SEQ ID NO: 6671 - DNA, 2372 bp, Artificial Sequence; identical to SEQ ID NO: 6669
  Description of Artificial Sequence: Synthetic polynucleotide

SEQ ID NO: 6672 - DNA, 2142 bp, Artificial Sequence
  Description of Artificial Sequence: Synthetic polynucleotide
tcgagggtagcgtttcgcgtttgattttttcgtaagcgtttatttgtttttaggtggttaggaaggcgtgggtgggggtaaagcgcgtagagcgcgggaagttagcgcgtatatagcgggcggttaggtttagtattgcgggggaggtgttttttcggtataggattcggtttttgtcgtggttcgtgtcgatgttcgttagaaaaggggcgatggtcgggaagtcggtggggaaattatagtttatatattgcgtttttttggggaagttttgagtggagatgatgtcgttggtgtttatttgggagaggagagggataaaaaggtgatagtcgtttaagtttaaggacgttattttttcgcgtagggagggaagggaattgatttaggtaaaaagtttttttttttttttttattggttagggagtttggatttagggaaataagcgtaatttttgcgattgttttagtttcgcgttgtagtaggtttaggggttttaaaattcgtttatttatttttttattttttttataatttcggagttttatgttttcggagaggaagtttttaggtttgaagagggaatattttagtttcgtagacgggtatagttttttcgcggttttaattgtaaagttcgttggtcgttttagtaacgttattttttttgtttgggacgcgtacgtggttgcgaataatttttgtttttttttttaggttatttttgtttttttatagtagcggggtaggtagcggtatcgttttttggtcgggtattatcgtaagggtgttggggggttttaggagtggggtttgtttttttttttttggaggtagggttttcgtgagatcgattttagggaagaagttgcgggaaaagtgttaggagggggttgaatttacgtagaggttgttgaatcgggtttcgtagaagtgtaggggattcgttagttttattacggttgagttttcgtcgtcgtttttttgtaggagttggtttttttacgatttttcgtgtgggaagagttcgtttgggtgtagcgtcgcggttcgtaatattagtaacggtagtagtagtagtattggtaacgacgatagtatcggtcgttcggttattcggtttttttttatgttcgttcggtcgtgcgtttattcgttgtataacgcgtttcgtttcggtttttagtttatttttcgcgtcgcgttagtttcgaatttggattttcgcgggcgtttgggcggggcgggattttaggtttatttagtaagttaattggttgaggttttcggttggggattaattatcggttttgagaaagttcggtagtggttattatatttggttttcgttaatttttttaaggtagcggtcgttggagtagcggggttggcggggtaaaagtttttggttagggttgtttggagttgttttttttatttcgtttttagggagttttcgggttatttttttattcgggttgtttcgcggtttttaaggagttttattttcgggattaaatggttcgtaaggtttggggtagcggcgttgtaggagatgagtttagcgtaaagggaatttcgtagcggcgagtgcggttgttggtttgcgcgttgtggttttaataggttggtagggcgcgggcgggtggcggggttgcggtatgagttttgttttttgttttggggtttcgggcgtttttggttttggaggtttggttatcggttcgaaaagtaaagggatattgtcgtggttttttcggtcgtttcgttttatttagagacgttttgaggagaagcgagtttttgtacgaaggtagagggttgatttttaagttttgtttttttttcgaaggtcggtcgttagggaagatttggttattttttggaagtattttttttcgggaaaatcgtagtaggaaagattatgaaatattattgtgtgtgattcgtttcgtttggggagtaggatgaggtatttcgtttggttattaggtagaaaggggcgagtcgcggggatgggaagattttgattttttgtttattgttgcggtcgtcggagatgttttttttcgcggttacggaggcggtaatttgagttgtttcgtaggattggaaatcgtataatttcgaaattagttgcg

SEQ ID NO: 6673 - DNA, 544 bp, Artificial Sequence
  Description of Artificial Sequence: Synthetic polynucleotide
tcgaatttgggcggtcgtcgggtagttttttcgttcgattatggcgattgatagtgagtgcgtttcggtcgcggaggttaggggtggggggaggtcgcggtgtttagggtgggaagttcgattttagacgttgtttttgtgttggttcgcggtagtagcggtcgggttttttttcgttttttatttttggttgtttggcggggtttgaaagggtaggtggttttggcggcgcgtttcgcgagggatgtggtagaagggcgtgcgtttggcgtcgaggcggagggattttcgatgtcgtgtggtagcggggtttgttatcgtagtttttcgcgggtattgtttttaggtttagagttagtttttagcgagtcgggtaaacgaaggtattgcgcgtttttggcgttgtgagtttaaggttcgtttcgagttttgggtcgggtttgtgcgtttgttttttggggattagggtggtttgtatggttcggttgttcggtggtttacgggttgtattcgtagcgggtagtataaggtcggttggagatcg

SEQ ID NO: 6674 - DNA, 2002 bp, Artificial Sequence
  Description of Artificial Sequence: Synthetic polynucleotide
tcggaggttgtgtcggggttcgttaaaggttataaataaatcggacgggtgggaagtacgttttagcggcgattggatttttaaaaatttgttggtagagtgaaaataaaaattgttttttaagttggtaaaatcggcgttttagacggtgcgtaggagggttttgcgaggtttgttttcggagtttcgcgttagttttgtaggttcggttgggttcgtagttcggtgttttattcgtgggtcgggttcggttgcggggttttttcgtagtcgggatatttaggatagtagcggttggggagtcggggttaggggtttttttgtaattttaatgatttttattattattattcgtaaaggataaacgcggttaaggtcgggttttatagtggttgtgttggttatcgcgtggaggagtgtgcgttaatttaggggcgaggggggcgcgttcggtgtttcggggagagtttagaaggaagacgttttatcgtggtttttatagttagggatagtttgggtgttagaaatttttagagagaattcgaggggttgatgttttgggttattagtttttggtgtttgtggggttttttgcgcgtttatttttatttttttttttttttttaggttcgacggattttttcggaggtttaggatagtgatttatagtaagtggtgatagtggaataacgtgatagttcgttgtatttgttagttggtttttgggtaggtttattcgtcgggttcgattttagagtcgagttttcggagtcgtcgggtaaagttttttttttcgtttcggtgtagtttcgcgtttttcgcgttcggcgttgtcggggaaaagtggtataataggaaagtttcgttagagggttttttttagtcggttttttcgttataaaaagttagattttagtcgaggttttgattttttttaaatatacgtttttttgttcgcggttcgttattttcgttcgggtttcgggttgtgtagtttttttttaggtttgttcgggtttatgtttttttcgaagcggcgggagtcggtgtagttttaatttttattgcgtgttttaggtcgttaattagttttgttcgcgtgtcgttggttcggaggttgtcgcgttagtttttgcgtgcgtttgagcgcgttggagtatttgcgaggttagggttgtcgacggcgagaggatattttgaggaatacggtgttttagtttcgttttcgtttttcgttcgagttggaggttggggcgcgttgagtcgtagcgtttggataagtgcgcgggtcggagtcgtttaggtttgtattcgggggttcgcggtcgacgtatgcgtacgcgcggtggcgggtttgtaggttcgaaggttcggttttttttttaaattcggagcggggaagtttaggggttgagagtttcggttcgggtcgtaggagttggggagcggggacgcgggtaggttaggtttttttatttgtcgtcggggttttttttcgtagtagtaaaggggttttagtgttcgtggtagtgtatgttttagcggatacgttggtttttaaatttagagattagaggggcggttgagaacggggcgttcgttgtgtgtgatttttgatcgtggaggaagggcgggagtcgggagtaggcggtggggttcggggttaggtcgcggtcgtcggttttcggtaaaggcgttttggtcggggaagggggcgagggtgggcggtcggtttttgtcgtcgtagttatatttgggacgttgaaatgggttttggggatagagtttatttttagcgcgttttataggagaagttcgtagtttaggtttgggtcgtgtagatcgttgggcgggttcggggttcgaggagagtaatacggcgcgaggtttagtcgcgagtaataatttcgatagtacggtttttcgaagacgtgtttcgggtatcggggttgtgagcgggggagtttcgggttttgggttcgtttggtacggggcgggggcg

SEQ ID NO: 6675 - DNA, 983 bp, Artificial Sequence
  Description of Artificial Sequence: Synthetic polynucleotide
tcgttttttttcggtttttcgagcggagtgggtaagggaggggggtgaggaaggtacgcgatgttttcgtcgttcggcgttttatcggtcgtagcggtttatcgttttcgcgggttgttcgtcggtcgtagtcgcgttcggggtatgttagttcgtcgtcgtcgttttttcgtcggggttcgtgggttcgtagttgttagggagttgcggggtagcgtatttggagcgcggggtttgggagggagggtgtttggggttagggcgaggggtttcgggaggggttttttcgtacggattttagaaagagggaaatttcgatttagagcggtgattggaatttacgttcgggagaggttcggagtttcggtcgcgggcggcgggggatttttgtaggaaggggtaggaaggtaagtagttcggcgcgttttggcggtttcgagggatttgggttcgggtttgcggtcgcgtcgtttgggttttttttgggttgggagcgcgtcgggttttcgttttgtacgttgttatcgcgggagacgtttcggtttcgtcgcgcgtagaggggacgcgcggagaggttggtttttgggcgagcggagagttttgtttattaagttgtcggaagaagttaaattaaaaagttaatttttaagtttttaaacggaacgttattttattagttgggagatagcgtcgtattgattgataagtcgcgtatatttattttcgcgcgcggaggggagatttttagaacgtttttcgattagtagcgaggaagtcgagttcgtatttcgtatttcgtatttcgtatttagagttttcgagggacgaatttagatttaatttttgtttcgcggttatttattttagtcgttggagtttggcgttcgcgtttttcggtcggtagtacgttaaaacggcggcgcgttttgatttggatttcgtcgagttgggagttttaggtagtaggcgggcgcgcggtatcg

SEQ ID NO: 6676 - DNA, 947 bp, Artificial Sequence
  Description of Artificial Sequence: Synthetic polynucleotide
gcggagcgcgttagagcgcgagggacggagggagaggaggagcgcgggagttgcggaggcgatttcgcgaatttattattgtaaatatattcgggggtgttaggaggggtaggggtgggggtcgcggcgtttatattagttcggtcgcgtcggattgaggtagtagtgtggtttgagtagtttttagatttacgtcgggcgggcgtagtatttggagcgagttttgcgttcgttttcgcgtagcgtcgtacgttcggtttcgagttgttcgtatatacgcgtcggaggagagttcgtttagttttttcgtcgagtttcgggattttttaaattcgaggagtttcggcgtcgcggggtagttttttgtcgtttttttcgttcgttgtattttttttggggttcgttggtttggcgaagcggagagggggaggcggaggaggagagaaggcgggggtcgcggcggtcgaagttaagagaaagtggtatgttcgaattttggaggcggtggtggcggaggacgggggaagacgatgtcgtagtttcgtaggggacgtaggcgagagtaagcgaggcgagttgggcgtttcggtttcggttcgttgcggggaggcgcgcgtcgttttgaggtttcggttttcgtattttcgcgtttcgacgttgcgggcgatagggtttggttttagtagtcgtcgtcgtcgtcgtcgtcgttattcggaggatttagtaaaagtttggatttgggggagggcgcggcgttgagcgggattattattagggttggaaggagatttcgagaatttttgtaggtaacgcgcgtttttaattttttttttttatgtttcgtcgttgcgttttcgtttttttttagagttttttttggttttcgcgggtttggtagaaagtaagagggaggcgaagtttaagatttcggggatgagtatcgagcg

SEQ ID NO: 6677 - DNA, 1362 bp, Artificial Sequence
  Description of Artificial Sequence: Synthetic polynucleotide
gcgttttttttattcgcgtttttaggtttttatgtacgttacgtgggtgggagcgtgttttatatattcgcgcgtttaaagttatattcgttacgttttcgtcggggcgggtttatcgcgcgtttttgggtgtcgagtttttataggttatatagtcgttatttgttgttgtatttttattgcggggataggggtatttagtgttttttttcgtttttttcgtttcgcgaaggttttttattttttagggttaggcggaggttacgtttttttcgggttttttttttaacgcggagagggaagcggagggaggagtttggttcgtagtcgtcggtttttttcgtattggagttttttttttttttttttttcgtttttcggttgtcgtagttcggttcgtagcgcgcgttagcgggggtttttcggagcgagtcgttaggtaacggggttggtttcgtagacgcggggtcggggaagttcgcgcgcgttattagtagcggcgtcgcggggcggggggcgtagagattttttttaatttcggtttgttattatttggttcgcgcgtagtttcggtttagaatgttttaatttgcgtcgattgttgtcgtcgaggtgttttttttttgtagggatttcgacgtcgttagttttttttttttttttcgtaggtgcgtattgttgtgtttgcggtcgggtgggcgtttcgtcgttgcggtcgcggtcgtcgttggtaagttgcgttttggggtttggggtaggaagtagtggggggcgttcgaagagtagggtagttacggttatcgtggtcgtcggatcggttatgtgttaaagtttttggggttcggcgtttcgttgggcgcgtagcgcggggagtagacgcgtcgtgggtggggtagcgcggtgttgttggcgttcggttttcgcggggtgtagttttgcgcgtttttatgttgttttttttttttttttttcgcgttgttttttcgaggttttttcgtcgagtttcggcgcggggtatgaggagttttcgggtgtcgtttagagattagtaggttgcgcgtatatttagttagcggtagacggggatatgagtagcgcgtacggggtttcgcgttcggcggttagttttattcggcggcggttagcgggttaacgttgttcgggagaatgaggtaggagtcggcggtagtttttttttttttttttttttcgtttttttgcggtttcggcgtttcgggttcgggtcgggttgcggttttgttgcgtgtttcgcgcgttttttaatcgttttcggatgcgtttttcggtaagttaggtttttcgtttcgcgaataaagtttttttcgtagggttcggaggtcg

SEQ ID NO: 6678 - DNA, 1092 bp, Artificial Sequence
  Description of Artificial Sequence: Synthetic polynucleotide
tcggattttgggaggagcgttggcgtggaaagttaggttatttcgattttggtttttaggttcgggataacgtgttagttttaagagagcgttgtttatagtttcgggtgggttgggtttaattgtacggggcggggcgttaatagtttaggatttgggttgtaggttggtttttgtattaattagcggggcggtttcgggttttagtttttttatttcgtttacgaagggaggcgattgcgagcgtttggggtttttgacggatttcgtttcgggggtggggcggggagtggttacgtggaggggcgtttcgttcgtcgagtttcgttttatttcgtttcgttcgttttcgtgttcggggtttttcgtttagtagagatttggagttagaagtttagagatagtcgagtgcgtcgtgcggttttcggacgttcgttgtttagttcgattttcgttaattgtgtaggcggttgattcgtagcggtagcggtagtagcgaggattcgagcgttggttgtagcgatattatggattttttttttatggtcgcgtaggtaacggggcgttttttttacgcgtttcgggtcgttaagtttggggaggttcggggttacggtttcgttttttacgttggggttgggtagtggcgttcgttcgcgattcgcgtttcggttttttgtttcgagtcggatatttttatttggtgtacgcgtcgggggcggcgatcgcggttttttcggggtggggcgggttgcgcgtttcgtattttcgcggttcgagttgttttcgttcgggtttttttcgttggtaggaaggttgcgaggagtttgggtagttcgagtcgtttttttttgtttattttttattgttgttttttttttggggtttcggagttttttaaggtcgggttagtttagattcgcgcgaacgtggatgggtatatagtttcgtttttttttattttgttttttcgaggcgttagtaatttgttttttgtcggtgatttcgggcgttttttttgtcgtcgtttgaggaaggttttgagattcgttttgtgatcgtgattcgttaagcgtcgacgcgtcgcggtcg

SEQ ID NO: 6679 - DNA, 1092 bp, Artificial Sequence; identical to SEQ ID NO: 6678
  Description of Artificial Sequence: Synthetic polynucleotide

SEQ ID NO: 6680 - DNA, 1092 bp, Artificial Sequence; identical to SEQ ID NO: 6678
  Description of Artificial Sequence: Synthetic polynucleotide

SEQ ID NO: 6681 - DNA, 580 bp, Artificial Sequence
  Description of Artificial Sequence: Synthetic polynucleotide
tcgttcgggttcgcggattgtcgggtcggtttttagttatcgtataggtgttttggagagtgcgattattttttgtttttcgtttcgcgtcggttttcggtttagtgtttcgttttttttggagtacggtttgcgtatgcgcgcgttttagggtttagttttgtttttgtttcggtttttgcggggatggatgttttacgtagtaagcgagtaagcgagttttggagatcggggttttgggtgtgcggtcggtttagtgttacgcggtgagataggtatggttattaatttacgttaaggcggttgtgtatttggtatagaaaatattgttgttgaatgttgtttttatagttattcgttagcgtttattgatgagaggtgttattacggatattcggttttgtttcgtcgaagttttggtttattaggattaaagttaggttttagcgggtttttttgttatttttggacggtttcgcgtttttttagagtttgatttttttttatttttgtagtttaagtcgcggaagcgtagatattcggtttttttcgcgtgttttatcgggtttttttggatacg

SEQ ID NO: 6682 - DNA, 888 bp, Artificial Sequence
  Description of Artificial Sequence: Synthetic polynucleotide
tcgtgggaggttagagcgggcgttgttcggcgttatttttgtagcgttcggatcgtttcgtataggtaggggtggtgtttttttttcggggtatagaaacgttatatttcgggggcgtcgtttagaggttgtttttgtttttgtgtttttttatgaggttttgttttataaaggtagtttgagttaggattttaaagaggtttggttatcgggatcggagggagtttcgttttttaggtcggttttgtaaacgcgagtttgcgttaaggcgttttgcgggtttgttggtggtatcgaggggtagcgcggggttagcgttgggagtttcgaatttatacgtttcggttagttgttcgggaagcgtttaagtatacgtttcgagttttagattggattaagttgtttaattatttattttttttttttttaaggagaagtttaattggagaagattcggtttttttcgttatggtaggttttttttttttgattcgtagttgtaggggttgagggtaggcgtaggttcgttttggggtcgaagttattatcgggtttcgaggttgtttttttaatattcggtttgtacgtttggcgggggcgtaatagtgttttacggttcgggagttcgtttttggtttttgagtaaggtattttttttatttgtcgtgtgtttagttgaatttagtatatttttttcgtatttttcgtttttttttttttttttttgaatttgtttttttgttttgcgggtttttaatttttttcgaatttcgggcgttcggttcggtttaggcgagcgttcgcggttggggacgcgggtggggacgcggcggtttgggcgttgtaggatgcgtttggtcgcggaggagacgattagggagcgggtcg

SEQ ID NO: 6683 - DNA, 1483 bp, Artificial Sequence
  Description of Artificial Sequence: Synthetic polynucleotide
tcgaatattgatatcgttttaaagttgtaatttttcggtttcgttacggttttttatgtataaagagagggaattagtcgtcggtgatttcgacggttttcggattagggatgtttcgagttcgagcgggtagggtgtttagtagggttaggtgatgggaattatggggttatcgagtacggattttggttttttcggtggtttttgtgagttttggggttaggcggggattggaggagcgttcgcgtcgggagggagcgtatcgcgttacgtgttcgttcggcgtttcgtttttatttcggttacgtttttcgcgttttttttaaagtttcgttttttagtttcgttattttcgttcgtttcgtttttcgtagttttaagtttagcgttttcggaggcgcggacggtggggtttcgcgttttttgtgtcgggttttgatcgtcgcgcgcgtttatttattttagcggtcgcgggcggaggggcgtacgcgcgcgtagttttttcggagggcggtggggcgaatagtaacgcgcgtattttagtttttggttgttgtgttgagattagttcgcgcgttcgcgcgtttttttttcgaggattcggagtcgttcgcgtattcgttaggggtcgtcgtttcgagttttaggcggacgcgtacgcgttttcgtcgttcggattttagtcggttcgtttttcgtttttttatttttcggcggcggtttttaggtacgcgttcgcgtatacgtcggttcgggtacgcgttcgttaagatggtaggggtcggggtttagttgttagtcgtcgtcgtcgcggttttttttcgtagttagcggtttcgacgtttattcggagaagatgagttttcgttgtttttcgtagtttagttagacgcggagtcgtcgcgttcggggtcggttttttcgttagcgttcgcgtttcgcgtttcgtcgtcgtcgtcgtcgtcgtcgggtcgtttttggttcggcgcgttcgttttcggtagcgataatgaggtgagtcggggtcggcgtttcgtgggaggtggtagcggttagcgtcggaggggttgggttgggggttcgcggtgttttcgagggcgggaggggggttttacgggcgcgggggtttttagagaatcgcgggggttttgtagagattcgggggtatttagagcgcgggaatggtttcgcgagagtcgtgggggcgtttggagagtcgggagggtttgtagggtttgtggggggtagtgttttgtaaggggtaggcggcgttggttttggttgtttgtggggtttttttaggtttcggggggtttgcggcggtttgggaggtagattttcgcgggtaggtgtggtcgtgtttcgatcgcgcgaggatcgaagttggcggaagtttttgtgcggtgttttttagttcggaggaggttggtttgaagtttttaggcgttgtcgaagtttttttttgttagcgtttagagtcgcg

SEQ ID NO: 6684 - DNA, 3714 bp, Artificial Sequence
  Description of Artificial Sequence: Synthetic polynucleotide
gcgcgcgaggttggggtagtttataggaggagcgcgggattcgggtttgagtttgtatttaggtagagcgtttattttcgtttttagtttcggattttgaaagtaaagtcgtcgtgttcggtagttagttcgaattttttagtttttagggagtcggggtcggggtagggaaggttacgggtggcggtataatcgggattttggagtggaggcgtagattgcgggtttcgttgcgtacgtttcgtggttcggttggggtgggttttggaggtttataggttaaggttgaacgggggttttggagcgtgggcggggtggagtgtataggttattgggttttgagcgtttttatgggttaggattttaacgcgtcgtgtttttaggatagattggagggggaaggggttgcgattatgttttagtcggaagggttttatagtagtcgcgttgttttttttttgtcggatattcggtagtagatatcgacgtttgggggttagcgaggtaggtgggcgcggatcgcgattcgattttggtttttaattttcgtttagtggcgcgcggggtcgtcgttttatatttttagttcgcgtggttggtgtttggttcgtcgtcggggcggaaggggcgttgtcggcgtaggtgggcggggtcggagcgcgggggcgcgcggcgcggagcgagcgtagggttcgggggcgcggggcgcggaggatcgggggtttgacgggcggttttgcgcggtgcggggcgcggcggcggcgggcgcgcggttagtgaacgcgcgggcggggcggcggtggcgggaggtattaggggtcgtttttcgcgttttttttttttatggcgttgttttagtcgttcgagtcgtttcgcggcgcgtttcgtaaggtttttagtttgttggagatgggggcgttttgtttggattcggagattattttgggttttattagttattttttgcggcgacgaggtaaggtgagggttgtcgggaggggggcgggcggcgtaggcgtcgtttcgttattttgtcgcgcggttcgcgcggtcgggggtgttgcgtcgggaaggagacggtaggttcggagtcgcgtttcgtagttcgggttgggattcgttgtcgtatttttttttattagcgttgtttaagtttttttttgtttttaaggttgtgttttaatcggatttattcggaggttgtggttagggcggagagcgtagcgtagggattttcgggtttattttgcgttttgttaggatgggcgaagtagggggtcggggtttttgattgatcgtgagttttcgaggtgattttagttttgtgtatttcgtgttttgcggatatgggatgtgagtttgtgtttttcgaagcgtcgcggcggtagaagcgttgaagttgcgggtgtggttggttaggggcgtaggatcggtgttttcgatcgttgcgtgtttttgtgttgcgtgtgtgggtggggggacgggatatagagagtgtgtgtttcggagtagtggagcggcgggaggcggtgttgtttgtcggtagtgcggggtggggtttgggtgttgtttttagtatttagatttagatgtgggttgacgttcgtttttattttttaggttgcgaagagacgggtaggggaagcgttttcggttttttaggttgggtggaaagcgattgtaggtttacggattttagaaagagtggagagtttttgttattttattttatatttttttgcgttttcgaatttttaaggttattaacgattcggaaagtcgggaggggattatttattttattttttggggagtgcgtgcgtgggcggggaggtttatttaagtaaaagggggtgggtaaaacggaaagggttattttgacgtattgagtttttgcgaaggttttatcgtatgtgtcggtagtcgcgtgttttggttttcgtcgggttacgattttcggagttttcgagtgcgttttaggtttgggacgcgcggcgttgtttttttagtttcggagtcgtgtgcgtagcggtcggtagggggtattcgcgttacggggagttcgttcgtcgcgttcgtttggtttgattcgggttttggggttgattcggagtttggttcggagttgtttgcggtcgcggatgtcggcgatatttggggttcggttaggtatagagtaattggtcgttagggaagggcgggggggcggttttttagtcggagataaataagtaattaatttcggagttgagtttttatttgttaggtttgttgataataggttcggcgtacgttcgtaggatttttcgtttttcgggcggtacggcgcgtatatttatttgcgggtatacgcgcggttgtaaagatacgtgtcgttcgtagacgcgtcgaggtatagatacgtcggcgcggtcgttgttcggttcgaggcgtatatcgcggcgatattaatttacgcgcgatagttagatttaaagtggttcgcgatatgtagagtacgttgggtttgttggaaaggcgtttgggagtttcggggtcggggtttcgtttttttttcggtttatttcgtcgtgggttttgggtaagagcgtttttttcgtagttttagttttttcgtttgtagagggaggggcgtcggcgttttttgggagacgcgtagttttggtgtttcgggagaggggcgggaggcgtatgcgcgcgcgtaattagattttcgtcgtcgtttttagcgttttttttcggggtagggatttatttaataggttggggtttttggagtgcgcggggtcgcgtggggaagcggggattttattttttttacgcgtcgtttagtattgggtaagggcggggtattttttgggttttcgtttttcgtcgttcgtttcgggagttcgagtttcgttttttttcggtttcgttttcgtttttcgagcgcgtttatcggagttatcgcgtttttcgcgatattcgtaggttttgcgaattttcgagcggttgggtcgggttatgggggcgtttcggggtcggattacgtagtcgcggcgttttcggagagttagcgtggtcgggagcgtttgtcgggtttttttcgcgtttcggttatggtcggtcgcggcgtttttttgtgcgttgcgtagttcgcggtacgcgcggttcggtttggagagggaggcgggcggcgggggttcgggacggcgaagatattcgcggtgtgcgttggatttttgggggtcgggttttttgttgagggtagcggattcgtaggcgggattttcggggatggagggagtgggtgagcgttagggtcgtgtttagggtttttaattttggtaagagcgttacgttggggtagggcgcgtaggggtttggattcgacggacgttttaggtttattgttcgttttcgtttttatattttgtaggtggtcgagggcggttcggttcgcgagtcgtcgtcgttgttggaggtgttttttcgaaagaggttattcgtcgggttcgattaggatttatgcggtagtcgttttgttttcgaaggcgtcggggtcggtttagagtagggttattcggtcggcggaggcggttggtgtcgttattgttatacgaagttggtggagtttaagcgataggcgtggaagttggttagcgggttcgggattatttttcgggtaagtgatatttttttaggtcgattttttcgagtagggttacgtcg

SEQ ID NO: 6685 - DNA, 1266 bp, Artificial Sequence
  Description of Artificial Sequence: Synthetic polynucleotide
gcggcgaggagggttgtaggtgaagcgcggggagagggaggtcgttcgtttcggttttttttttaggggttttgcggttggttagcgtttcggttgtattttttggtgcgcgtcgcggcggcgttataggtttttcgattttttgattatcgttttcgggtcgcgcgttcggtagtcgggatcggtgatggcgcgggattgacggtcgtttttttttagatttttttgtttcgtttggggttcgttggggttgcggcgtcgtttcgagttgtatgtggggcgggcgcgttcgagtttagagcgagcggttttcggcgttttcgaggcggtgtttcgtcgcgttagagtacgaggaggagcggcgggtcgggttaggttttttacgcgtcgtagtttcggagtacgggtttttcggaggggatttggggcgttttagtttaggaggaaggattcggaagtagaagcggagtcgcgagtcgagtcgagttattgttttcgttgttcgcgggcgtcgggtgggggtttcggcggttggatgggtagcggcggcgcgggtcgcgggcggcgatgggcgaggagtagagtacggtgagcggcggcggcgggttttaggagtcgtagattttggttagtggtattgcgggttattttgagttttcgaggttttagggggatagcgttcgggcgttttcgttgcgcgtcgttttcgcggagtcgagcggcggtggttgcggaagcgattggggttgcgcggatattagcgttttagagttcgcgaggagtttggggttttcgggttggagtaagagtcgagtatcggcgtagtttgcgggattggtatttatcgggttttttaatttttagattttgttattgtagttggagttggaggaggaagaggaggaagttggggatcgaaaagagggaggggatgaatagtaggaggcgtttttcggcgaagagttggagtttaggattcgcgtgggggtcgtcgacggattggttttggacgtgttgggttagcggcgttcgtttttcgttaagagataagttttttgtttcgtgtattgcgtggagagcgatttgttcgaggttttcgtttcggagtagttttcgtcgttcgcgtcgttatttggggtttcgttagtgttgaatttttttagtattcgtttttttttttttagttttcgattgttttttttaacggattttttttttttcgacggcggtagtatcgagttggagttttatttggcgttcgagtcg

SEQ ID NO: 6686 - DNA, 1316 bp, Artificial Sequence; identical to SEQ ID NO: 6563
  Description of Artificial Sequence: Synthetic polynucleotide

SEQ ID NO: 6687 - DNA, 10783 bp, Artificial Sequence
  Description of Artificial Sequence: Synthetic polynucleotide
tcgcggagatatttcgagtttcgtaggtgtttgagttgcgttgcgcgttttagtcgggaagtttttttttatttaatcgcgtcgtttcgcggaaagtttgggtattgtagacgtttttatcggtttatcgatagttggttttgaagcgggggtttagaaaagtaaaggggatagtgtttggagttacgatgtttttgatgtgaggcggttttatttaataattaacgaattaagttggaattgtaggttttatttttgttggggggaggattttaaggaatgttatttttttgttttttattttttgttttacgtttagttttttagaaggtattaggcgtgagtagagtgcgaggcgtttatattttcgtgttttttttattttcggatatttttgtattttagtcgaggttttagtacggagtgagggttgtttggggtgttttgttgtgtgtggggcgtttttgtttttcgggttttgattttacggtttgggtcggcgaggcgtttttttttggcgtttggattgtgcgtttgtttcgtttttaggcgacgaacggtaggagtcgggggttcggcgggattcggatttagggcgggcggaaggcgagggtttttttttttcggaattttcgtttcggaaatttgtaattaaatcgggtttttttttcgtatcgttttcgcgttttcgggtcgtttttttacgcgggtatttatttttcgggttttcgtagtatcgtttttttcgcgtttattcgcgcggtcgacgtcgttaggggttttgagatcgcggagatagcgcgttttggcgtttggtggggtttttttagtggttagagcgtttttggattagtcggttgtggtttgtgtttaaatacgatggaaatcggggttgggacgggcggtggtacgtacgtggaggagaagaggtatggcgggaaaattatagtcgaatataggtcgattcgtattttttaggtattcgtcgtcgtttgattcgcggttttttttaaggtttcgattcgtcgttattttttggtattatttatcgggtttcgattcgggtcgcgagttcgttgatgcgtagttgttttcggcggttttcgggttttgttcggattcgcgcgtagagacgttcgggaacgttgggttcgggcgttttttggcggcggtagtacgcggtatacgttcggtttttcggttcgagggggcgcgtggagcgtacgcgggattcgcgcgcgggtttgggttgttggtttatattttttcgtttgttcggatggcggcgttgaggtttattcgtttttttattaataacgatgtttcgggagggaaaaaatagagtttttaaaaattagagtgcgagagaggagtgtgtgtgtgtgtgtgtgtgtgtgtgtgtgtgtgtgtttcggggcgttggtgaaagtaataaaatttagatcgtttttttggcgagatagcggcggttataatgcgtcggggggattaggggtttatttgtagattttggataaaagatgatatatcgatacggtttagagtgttattgcgtttggttttttagggagttataagtatatattttttgaaatatcgtttagtatagtatttaattcgttcgttatttaatatcgggaggggaattttagtagcgtataagcgcgttttcggttttttggttttgggtggggagagtttaaatgagaaggatttggtatgtttagacgtttttttttttggtttttgtttttagtttaagtaattatttagcgatgggttttaataaatacgtttgagaattgtttttatgttcggtaaatattggattagttttttaatgattaggtttttgaaaaggttcgagaaatatatattaggttttaattaagtttaatagttaataggtaaggaaataagttatttttttatttgaggtggggaatgttgggaagggggatttttatttttattaaattatttgattttattaaatatgatcgttgtattaaataggaaagggggcgtatttaagttttttattagtcggaatttttattagtttagttttgtttattaagggtcgagtgattttgtggggaatatatttgggttttagtttttatttttatagagtttagtataaattatttttgtttagtatatatggtttatttggggattgtttatgggagttttgatttggtaattgtaggggagaaggtatgatttaaattattttcgattgtttcgcgttaatttggatcgtttagaggaggtaaaaaatgggtaaattttttggaagttttgttgtgtttttttggtattgaattttgtaagtacgcgatataggagatattgaaaattaaagaggaagtattttttttttttaatatggggagagacgttgttggaagaagtttttgaagtggttttttatcgtattaagaggttagtgggatggattttcgcgtataatttaaaggaacgcgcgcgtttttagtttttcggggttggtaattaagtggttcggtcgggcgtaagtcgttttggaatcggttgtagtttaagtttagttgggttcgggattgagcggtatttttggttttttagaatttttttcgcggtgagtggaagggcggtttcgcgcgcgggcgtttcggggtcggtcggttgcgaaattagggggtggatttttatttatttaggagtcgttaagttcgtaggggatcgagtattatttaggttttgggtattttgagttgttttttgagttttaggacggttcgatggtgtagagtttttaggtagaagttagttttttgatatatatatagtagtgagtaaagtgcgtataagtgagttaaattttgaagacgtaggttcgcggatttttattttagcgttagagttaaggagatagaagagaggaaggagagaagtgaggaagggagagagattatgagaaaaagagattatgaaagtagagaaagagattatgagagcgagattatgagaagagagaaaaagagagattttgagagagagagatagaatgagagagatttaatttttagtgttacggggtttaggcggggtaagcgtttttcgaagttattaaagataggggtggttttttttttttttttttagttttttttttaatagatatagtacgaatttttaatgcgttttttttttatagataataatatagggtttgaaagtcggatataatttaggttttgtgcgggttttttttcgcgttttttcggtttagttggttatatggaatttagtatggagttcgtggatgataaagggatttagtgataggtttaataaaattttaaggagatttttgtttgatttcgggatttattgtcggcgataagcgcgttgaatggtgcggggtggggcggggggtggggggcgggttttttttttttttttttttttttttgttttcgcgattttttttttgtttttttttaatatgtacgtttttaatattttcggtttttagtttttttattgtgcggttttgtatcgttcgttgtagattgggcgaagatagattgttgaagcggatttcgcgtcgggtgcgtttttagggcgttggggttagggttatatagggtttcgtaggcgtttttattgattttatggggattcgaggatagagagaggcgggcgtcgggtttatttttcgggttttcggtcggttataggagcgtatatttagattgtaggttcgcggttttggttatagttttaaatttgtttttaatgagtaagtggtggaagtttgttagggtgaggattttttacgtttttttttttttttttggaaatttgagggttttttgtgattatttttattttggaagttttggggtttggaaaagttaaaatggttttaggttttttgatagtttcgttttaagagatttgaaatttttatttttttttttaagaggattttgggattaggggaagttgtaagtggatgttgagtggttagtattagggtaggttgggcgtttaattattgtataataaattatttgggagaaattcgttggtttttaaaaatagtaagatataagtttttaaatattgttaagttagtgtggagaataaagggagattttttagtatttagaaaaattgtttttttttcgaggatgagttcggagatgggaaaggatttttattggggtattagaaagattttcgagtttttaattatttaggggcggtgtggaacgcgggaataaagtgttatcgcgtttttgggttgttgcgtagagtgttatcgacgtatagatttggtcgtacggataattatgtttgttttagatattgaattaaatttgattattaattatagggagcgagaaagttagttgggatcgttttttttgttcggtttttttattgttatttaattttttagttttgatggtgtagtttcggagagaatagagatataatttttaaatgcgtcgacgtttagttttttagcgtttgtagtattcgttgggttttgagttagagttttaagtatttttagaaattcgcgagatagaggagaaaggtttattttttagttggttaggttttttaagacgttttttcgcgtggttaagtgtgcgttagtatttgttaaggagatttttttttagtaataagggtgggacggaattcgtttttcgtcggaaagatggatgcgtttttttcgggcgtgttcggggttgtgtgtttattttttattcggggagtttattttatttttaaatttttattttttagtaatttatttagttttacgtttaagggttgatttggggggatcgtatattttggttcggatcgtcgaacgttggagggaaggaggttcgggatttagttttcggagagaggtttggaagttcggaaaggatgggagcgtaagggaagggagaggtatggtttgttgggattgttaaagattttcgttttttggttttttggggttaaagattttagggagggttgtagtattttttttttttttcgagtttagaatttcgcgtattttttttaagttttttaagttaaagtttcgcgcgttttgatcgtttttatttttagttttagcggttttttaggttagtattagttcgtagattttgaaaaggagtggggagtggggagaaggtagttagttttaattttagatttttatttatttatttttttagcgtgaggtaagttaaatgtaataaagtgaaagttatcgagtgtagtggttttaatagttttttaggttgaaggagttatttatagatttgggttagcgaggggggtttgtttttttcgtttttgcggttttcgaagttattttttttttcgtagtcggacgttgtcgttcggggtttagatagcgcgcgagattaggggagatgcgggggagggtgggcggttttgggttttcggtcgatcgttcgtaggtcggaggtcgagcgttttttttttcgttttaattttaggcgcggggtgtagtttgtggtcggaggggtttgtatcgggagtttcgttcgttttagggtttcggtattttcggttttttcgttcgagaggaatcgtttgtgggagtttcgcgggcggtcgggttcggtttttaggtttaggttttcggttcggcgtagtaggataaacgggagggtagggatttttttttttttttttttttaaatataggatttttattaaaatttttatttaaaaaatcgaaagttttttgcgttcggcgttgttggggaatcgcgtcgaatagttgagttttaagttcggggttgaaggttcggaggatagggtagagggttttttgtttatagggtttttttttttatatttgagaaatgtttgtataataaaataaaaagagaaaggaagaaagtaggggaaaacgtaaaaataaaaataaaataaaaaataaatttaaataagttataaagaaaggagttggatttagacgggaaataggtcggttttgaaggttattttggtaataattattatcgatatttataacgaaaagcgaaatttgttattagttgttagaacgtttatatggttataaatatttagtatttttttatttttttttaaaaaaaggaagaaattttttgtatttttaaagtgttttttatttgttttagaagacggttgataatatcgttatttatataaatatattttataaaatgtacgaaagtaggggtggggggtcggtttttttttcgtttttaagtgacgatattaacgttgggacggtttggttttttcggggagaggtaaagaagcgaagttgcgtaaatattttgtaaatacggcgtagagtttagtttttttttaaggtttagaaggagaggtatgggtagagttgggtgggtggaatttgttattttaaggagacgtaggtaatttttcggcgtttttttagtggagtcgagagttaattcgattttataataataattataataataataataattattataaggatcgaggttttttcgtcgttatcgtcgtcggggtggggtttgggtttggggtcgcgagtttcgttggggcggcgtttattaagtttattgttgggtttggattagggggtgtgttgtcgggtattggggggtgttggtcgagttgtattgggcgttgtattgtatgtgttgtagcgattgcgcgttgtaggtagaaaagggaatgttcgtttggaaggtggcggttgttaggttttgggttttgagcgcgtgatatggtttgtcgtttttgattaagacgggtacggttattcggcgcggcgagggtaggggcgttatttttatatttttttcggttcgggcgcgttttattttgtagcggtggttttggaattagattttgatttgcgtgggcgtgaggcggatgaggttggttaggtgttcgcgttcgggcgtcgataggtatcgttgttgtcgaaagcgtcgttttagttcgtaggtttgcgttttggagaaaagtattcgtcgttttcgttttttgtcggcgtttttttcgtcgttcggggtttttttgttattgttcggtgattcgtcggtcgagggtttcggggatttggagtttgagttttgagggggcgtttcggtagttagatcgtgtattggggggagggggagagagaagcgcgttaggcgtttggaggtcgcgcgtagtttgtattagattcggagtattttggatttttcgtgcgattttggattttcgcgtttggtagtttagtttcgttgtttttgttatgatttttgtttttttttacgtttgacgaagacgtcgggattttttagggtaaagagggaaattcgtaggagtgggggttaggggttcgttttttaaggggtttatatagtgtgggtgagaatttggggggggaagtggtattgaagattatcgcgggttaagggtttcggcgtttttaagcggtttttttttcggcgagacgtgggtagatttttaaaagaaatattttataattttagtattgatcggttcggttatttaaggtaggtttttgggggttttcgtttttgttttcgggttttttagatattttttgtattgtataaagcgttttttatgatcgcgtagggggtagggtgagttatttatattcgggttattcgaagtttttttattttttattcgtattcggacgaggttcgttggttatttttagggcgttaggttagttttttttagcggtcggagttcgggggttgcggttggagttatcggttcgggttgatattatatattagtttttgggaggtatagtttttttttttttttttttttaatttttcgtattgaaaaaaattttggagattaagttttttttcggaattaaggaggtttgaagaggagggtagaggatattttatataggtgttaaaaatttttttacggattcgagtgagggggttcgggtttatatggttttttttttttttatttttagcgtttaattcgggttgcggttgtaggaatggaggggattacggtttcggtagttaagttttgttatttacgggagtattgaaggttttcggtgttggttagttagcgcgtgtacgggttgtcgttgttgtcgtagaaggggttttttaggggtaggttttgtatcgcgtttagggcgttttgttttagcggttcggtttttttggttggttcgggtttttcgtttttttttttcggattttcggttatagagttttttttatcgttggtgttcggtaggtttaagatgtttttgatcgaaaatttcgtttttgtgttggttagcgatatggttcgagattttaaaatttatgtcgtaaagttgtagttttatttggttaattcgtggcgtttttttgttttggcgggcgggggaggggggagttggggggagggattgggggaggggaggggggaattggttttaattattgggataattattatttttaaaaagagaaagaaattggggatggggaggaaaaaaatgaagtttaatttagtgtttttttttgttttttttgaaagtacgcggaaatggacgtaggaagtcgggcggtttgcgcgtcgagcgtcgcgggtttcggttttagtttttaattttaggaggggtgttaaggcggcgttagttcgggtttcggcggtcgttcggcgcgcggtggcggttggtggcgaggaaaaaatgggttattgttcgagcgattagtttatataaggttgggttttatttacgaatttggggaggcggggagagggggagaaagagagggagggagggaaagaaagagggagggagggggagcgagagagggagcgggagaagggtggaaaaaagggggaagagatattaaaaacgtaaaggttggttacgtgtgggcgggttttgggagttaagtggatgaagatagtatttgtagatgtgaaattgtgggttttggggagtttcgcgtttttagttaacggttttttagagtaagatgagaggtgtaacgtgttaattaattgtaaagacggggcgagtttttttttttttaaatttagtatttatatataaagggttatcgcgtcgttcgcgagtttatatatttgaaagggtcgttttaataaattgtattttaaaaaaggtgggggtggggaggaggaggggagaaaataaaatagaaattaggaggagggaaaaaattttttttaatatttatcggtttttattttttcgttttcgcgcgtttattttcggtaagtcggaaaattggcgatttgtggcgtttttggaaaagggggagggggcgaaggtcgagttgcggaaattttttttttttatcgttggtggttgtttaaataagattcggtttaaatggtaagagtttaatttttgtaagttttttaggttaatattttggttgaggtttaaggatgagtgttagaaatgataaggtaagtaattgattttagttaatcgcgagagagtttaaaatttaggagagagtttcgtttcgggtcggttagagttattattaagcgattcgtttttttttagtcgttttttatttgttaaagatttatttattttttttatttcgtttttttttattttttatttttaatttttcgtttttatttttttgcggttaaggaggacgcgtagtttattttttgttttgcgggcggtttcggggagggcggggtaagagtgaggagttttaatttcgtttggggtcggattttggttttgttgtttttgggttttgcgggttttttttttcgggtggaggaaagggtagacggttttgtttttttttgttttttattattttttttttttcggttttttttttttttagtttttggttagaggtggagtagcgggaaggcggcggggcgggattgcgggggtgggggtgggggttgtgtttttagtttgggtgaagatttagaaagttgcgggggaggggggtcgttgggtggttcgacgatgtttcgttttttttttagttttttttttttacgcgagttttttagtgtggtttttttttggacgttttgggtgcgttcggagtacgcgttttacgtttttaggttaagttaggttagtgtgaagtttttagttattttcggttttgggaattgaattttttcgggatttgtatttttttttcggcgttggggttggaaaagattacgtcgtatttgttatttttttttttagttaaaatttttttggggggggggtgtaggggtgtagattggttatttgatgttcgttcgttttagaggagtgttaggaaggagttttgtttgggggcggggaggggtatagaaggttatttttgcggggtttaggtttagtttttttataatttgggttttttcgcgcgggttaagttgagcgcgcgggtatcgggtttttttcgcgcgtagttgtagcggacgtcgtcgcgttttagttgttttcgggttgttagcgttgggtgagggtattttttttcgagtcgttcggcggttttttgtagttttagttgtttcgtttttagtatgtgacgtgggtgataatggtttaggttagagtaagtttttcgtcggcgcgttttgggtggtcggattcgggtaaatataaatataaatcgattgttaagttgcggataatgagcgaaatgtagataaatgtttcgttttcgttggaagtttttgtttcggttcg

SEQ ID NO: 6688 - DNA, 810 bp, Artificial Sequence
  Description of Artificial Sequence: Synthetic polynucleotide
gcgtacgggtcggggagggggttatcggatttggatttcgggatatttcgggggtttggggggcgggtcgcgcgtttatttgcgttttcgtcgtcgaaggagtttatgtacgggaagtagatggcgagcgtttcgaaggaggcggatagattgaggcggttttgcgagcgttttatgttcgcgtcggcgtcgggcgtttcggtcgcggcggcggcggcggcggcgggcggtttgggtagtttggtcgttttatttttgacgcggagtacggcgcgcggcgtggtggcggcggttcggggtcgggtcgaggtttcgttgcggggttggcgggcgcggcggggtcggcgggcgggttaggagttggcggcgcgcggagttcgaggcgcgttgtgttgttggcggcggcggcggcggcggcggtggcggcggcggtggcggcgtagcgcgttttggttcgcggcgtttttcgtcggtagcgcgaggcgggtttggagcggcgtcgtagttaattcgtgtcgtcgggggagggggcgtcgttgcggggcgtgggagttcggagggcgcgggttgcggttttttttagtagttttcgggttcggtaggtgcgcgcggggaggtaggcgtcgggcgaggttgtttgggttttggttcgagggttgttttcgatttcgtttcggtttttatttttagtcggtcgatttgcggagaggtcggcgtttagttttttatttagataggttttttttagagatattggcgcgttcggaggggatgcgtttaaagggtttcgtttaggcgggtcggtattcg

SEQ ID NO: 6689 - DNA, 1142 bp, Artificial Sequence
  Description of Artificial Sequence: Synthetic polynucleotide
tcgggggagaaatttcggtttatagtcgggatgcgttttcgtcggggttatcgcggcggcgaacgtttcggatttcgtatttcggtgattttttgggatgaatcgaagtcggattcgtattttggtcgtaataagcgcgttttacgtcgttacgtattagcggtgattttcgagttttttgtcgttttggttttttcgtaggcgggtttcgaggttttcgtagggagtttagggttacggttacgtgtagtcgttttcgagttcgagtttgtaggttcggggttcggttcgcgttttggtggcgttcggcgaggttgtagcgcgtaaagtttttattttaagttttcgtcgcggcgttttcgtttcggagttggttcggtcgcggttttcgtttttttcggttgtttacgggttcggggcgaggacgcgagaggggtttggaagtcgttcggggagttcgttttgtttttcggagtcgtcgttaaatttcggtttcggggttcggtttagttttcgttttcggagttacggtcgtttcgtttttgtttttcggttttcgtcgggtttcgagtgcgtcgggagcgcggcgtagtagtcgtcgagggagggagcgaggtaggaggcgggacggagggaggggattgagcgcggggcggggagaaggggcgggtagtcgaaagcgtagcgtttggtttcgtttcgtttcgggatagtggtagcggcgttatcgttacggggcgtttaggcgtttaatcgggatttcgtattttggattcgggggttttggcgcgtttgttggattgcgtttttcgcggttagtttttgagttcgcgttcgggattgttcgcgttacgttttttttttcgttgttttttttttcgtttgtttttttaggagcgattattttgcggttttttcgtttgtacgcgatagtttttaaggttttcgcgtttcgttgttttggagttttacgtattaggcggcgcggtagttttttagggtcgcgcgttttgttagtttttttcgcggtgtaagtgtttcggtggtttcgggttcgcgtttttagtagtatcgttttagggtttatatgtgttagatattaaaattttatttttcgttgtttcggggtcgcgttttacgcg

SEQ ID NO: 6690 - DNA, 2885 bp, Artificial Sequence
  Description of Artificial Sequence: Synthetic polynucleotide
acgttgtagataggcgcgttgtagggcggcggttttttttttttggtattatcgatagtcgaggaaattgggttaataaagtcggatattgcggcggggtcgcggggcgtaaatcggcgcggatagatgggttttcgggggtattttgttcggttttttggatttcggatggtggtagagttgggagttgcgtaggacgggtattgcgtagcgtattttcgtttatattcggcggggtacggggttcgtagtagtttatttattcgtagttcggttttttttttcggaagggagaggggatcggtggggagggggtttgttggatattagggttagacggggtttttttttgatcgttagggttaagtagggcgcgggttgtgaggatttttttttacgtagtttttcgaggtagagggttcgtaaagcggtttttatttaattttatttcgcggacgttttaggtagcggatggcggcgggggggggaggttaggggatatttaggggataaattttttagatttcgaggtagtcggcgacggcgtttaatttttaaataaatagaataaatttttatttggaaaaggtttttttcggggtttttttgcgttcgcggtttagtttttttgtagacggttatcgtgggtttttcgtagggttgcggagtttcggagttatcgaggtgggaggtgtcggttacgcgcgtttttaggaatagagtattgttttgtagtttagtacgaagggtcggttggagcgggagcgcgaggtttattgtaagaggattaggagttagtaagttcggttttttttcgtttttatttttcgtgcgttcggggttaggatcgtttgttcggaatttgattagtgttcgttttcgtcgtggttttgggatttcgcggtggtttttttttggggacgaacggtagtgttcgaaggatgttttatttattttcgtttttagatttgttgggtttcgataatatttagtgggtgtcgcgagttttcgggcgtagagtttagcgttcggttttcgagtttaatttcgcgtttcgacggttttggcgtttttcgttgcgttaaattgtttatcgcgtataggttggaagcgaagtcgggttttttttttttggtttgtagggtttttttaggttttttttgttcgggtagagagatagttataggggcgatcggaggacgcgtgcgggagggtcgggggttcgcgcggttacggtttttcgtgatagtgtttgtaaagcgcggagggcgtttcggagaaggcggcgtatttgttagggtagggttttagggcggcgtttgcggagaaggggtatatagtggtttggtcgaagggcgttaagggcgcggcgtttacgggcgcggttaggttttggttttggttgaggaaggttattaggcgtcgtatttcgtttagggtttgcgtttgtatgaggatatagtttttggcgagtagtagcgtggcgattttggagagtttgcgtatcgacgggttgtgcgcgtaggggatgacggttcgtagttcgtttagcgcgtcgtttaggtcgtgtatgcgtcgtcgttcgcgcgcgttgatgttgagtcgtagagatcgttgttttcgcggtcgtcgtcgttcgttcgtcgcgttttttggttcgcgtcgtcgtcgtcgttgttcgaaggcgtcgttttcgttttcgttttgttcgtcgttgtttttcgtcgtttgagttggggcgcgaggtgtaggcgtcgcggggaggtcgtcgttcgggttcggagtgtcgtagtcgcgggtcgtttcgggttttcgcgtcgtttcgtaggcgagattcgtagtcgtcgtcgcgtagtcgtggtttagtgttaggtacgcgtttttcgatagcgatttgagttcggttatggtcgcgtcgtttgggttcgggggttcgtcgggtgggcggatgtttatgtgggtgagtagttttcgaggtcggttcgagttcgtcgttgtcgttgtcgttgcgatgaggttttcggttttgcgcgtcggtttggtttgtttgcgggttttagagtttcggcgttcgttgtttttttcgtttttttttttttttttatttttttttttttttagtcgcgacgcgtagggggcgggttttatttttttttcgttttcgtttcggttttaagtcgcggaggcgttcggtgggatttcgttgttgtttaattaggggggatcgggtgagtttttttttttggagtcgggttttattagcgtcgtaggtttataggtcgggggtgggggttttggatcgaggggcggcgcggggcggcgcggggcggcgcgcgcggttttggagcgttagtatttgtttttcgatttttcggtcgtcgttttcggtcgtttcggggatttcgttattaaacgtacgcgttttaggtgggtattcgtttcggttcgtttttgagtttgattttagcgtaagagtttttggcgatacgtaggggttagagcgggggggcgcgtcgtaatagtagtagcgttagcgttaatattttgtttcgttgaggggtcgtttcgggtcggggttagggtcgtgggcgttttggtgtagtcgcggcgtagcgtgtattcggagttcgtatattttttgttcggggcgttttgtggttaggtttgaggggtagagtgagagggagtttttagaatttgttgaaaaacgttacgagcgttgtaggtcggggagggcgggaaggtggagggtagcgcggtttggggtttttcgggggtgggaggggagttttgtgagttgtaggatcgttttttttttgttagtcgttttttgggtatttattagcgaaacgcgtgaggtttggtgggttttttcggagttttcg

SEQ ID NO: 6691 - DNA, 1460 bp, Artificial Sequence
  Description of Artificial Sequence: Synthetic polynucleotide
acgcgtatgagagagtagagcggtagcgacgcggtcggatcggtcgcgggggttgcgggaggaagcgttgtagggattcgggcggcgtcggcggtttagtcggagatgtacgcgttgtaatagatcgcgttgttggcgttcgatagcgcggagattaggttgtttttttttgggtaggatatggcgcgcgggtttagtttggttagtgttacgtggtacgggagttcgggggcgtcgggtcgagttcggttgtagttgaggtattggtcgaattcggtgaggtttacgtcggtttatagatcggcggcgggttttagcggttcggcgttttttagcggcggggtttcgggcggcggcgatagcgggtcggggtacgggtcgggcgtgtttagggtgtcgtagtataggttagcgagcggcgtcgcggggggcgcggttttgagcgttttcgttaggggagtttcgtagtaatcgtcggggtttcgcgataattcggtgggcgcgtagggcgcgcggaagggtcgtagcgcgtagttttcgggcgtcgcgggcggtgggaagaaggtagtttcgtcgggttttaggtcgtttagaggcgagcgttcgggcgtgggtagttttaggtcgtcgaattcggcgtttagcgggggtagttcgcggaaggcgcgagtcgagttagacgtcgcggggaaaggttcgggcggtggttgcgggggcgttaatttcgggagtaggaggtcgggttttagtcgtcgggttttgcgcgtttgttttttgcggcgcggtcggtatttgtagttggggtggtcgcgtaagtgttgtacgcgtagtcgttcggttttttttacgaagggtcgttttttcgtcgcgtttagttttttttacgttttgtttgcgggtcgtgggcgttagtgagtggaacgtcgtcgggcgggtgggcgtcgagtttttcgtgcgttcgggacgtttcgcgagggtttggcgtagttttcgtatttcgcggttcgggatttttgtttttttcgttttatttcggttcgagtttttttcgtttttttttttttttttgtcgttttttcgtcgtttatttagtattttgttgagtatcgcgttgtgtaggttcgggttttgttgagttagtcgtttgcgttcgttttttgtttatattatgaaggcgtttatgggtcgtcggatgcgcgattcgtttgtcgtttggcgtttttcgcggtcggtcgggttgaggttatagcgtttcggttcggggttgcgcgggggattgcgttgcgggttgggcggcgaggcgggcgcggcgggcgcggcgagggcggcggggtcggcggcgaggtcgcgcgtgttagcggcggtttcgtgtttcggggtttatgtatagtcgcggcgggcgggcgggtcgttttgtgcgtcgtagtcgggcggcgatttttgtattttagttgggcgcg

SEQ ID NO: 6692 - DNA, 1560 bp, Artificial Sequence
  Description of Artificial Sequence: Synthetic polynucleotide
acgttttgtagtgtcgggttttgcggcgattattgagttttttcgttttcgtttttagttttttcgttttcgttttcggttttcgtttttttagtcggtcggggttcgtcgtttacgatttcgtacgtgtcgtcgacgtcgttttgtcgatttcgtcgtaggaggtggaattgtagtggtgtcggcggttttttttttggggcggcggtggcgaggcgttcgttggcggcgggtagcggttggatgaaatacgttttttttagtaggtagaaggcgtcgcgtacgttttcgtagaggttgagggcggtagtcgagttgggatcgttatttacggtgtcggagtagaagtagtgcgttaggtcggttttcggaagcggcgtttcggattcggatttgcgttttacgttttggagcgtgaagtcgggcgttaaaaagttgttgtcgggtcgtagttttagatttagttgttggttaaaggcgtgtaggcggaggcgcgtggtttcgtgtttcggggcgcgttttagtttcggtattattagtttttcgtttttttcggaggggcgttcgagtgcgttcgatacggttagtagcgtcgcggcgagtagtagtagcgtgggtattggtttaaagtttcgagatttcggagttcgtttcgcgttttttatgtcgttgtttagtttgcgtttttcgaatttttcgggtatagttcgttgtattggagttttaggagatatcgttcgtagtagcgtacggagcgagggatttttagttcgggtcgggagagtaaagtttcgttggtttgttttggattgttaaaattaataatttttattattcgttggaagggcgcgtagagtcggttatagtcgaagttttcggagttattaaaaggaggcgttgtagttttgtcggcgcgcgggaagttttttttttagcgtaaagttggagatattgagaggtaggcgtaggtagagtggttttgttgggataagaagcgttttggggcgttttcggggttgaggtaacgcggagattggtgtttggcgttttttttcggttttcgttttggttgcgatgttgtttattttgtttagggttttttttttttcgttcggtagcgtattttggttttgtaatagtttttggttcggagtcgttttttagcgagtgtaagaatcgggtagtcgagcggtttttttatagtggattagtgaaatttttatttttattttattttttttttttggtttttttttattttaaagacgtcgttttcggtttcgttggtgttaaatcgcgtttcgcgttgcgggttcgggagggggagggggtagttttcgcgttggttttacgttattgttcgttaatttaggggcggaaggggcgttgtgattagtattttgtattgttggggtcgttttagggagaagatttttttttttatcgtttttttttttcgtcggttttttggattattttttttttttatcgttcggttgcggtaatttagttatcgcgttgggttgcggtttttaggagggagggttcggttggagaacg

SEQ ID NO: 6693 - DNA, 5118 bp, Artificial Sequence
  Description of Artificial Sequence: Synthetic polynucleotide
tcggtgtcgggagttttgtttttcgtcgttatttttggttagttttgcgtaagaacgtcgttttgtttggtagttaggtcgagacgtagtttgaatgtgagtaggaattcggagaagggaagggagagaattagaaagaaggttcgggagggattcgggaagtagtgggaggtttgcgttttggagtttcgcgagagttcgtcggtttggtacgggtttttttcgggtcgttcggcggtttaataaaggtcggtttcgatacgtattcggttttttgtgggagagaaatataaagaagagggaaaaatacggaggaggttaatagtattaggacgcgggggttaattaggaattttcggagtcggggtttattagtttttgtaaatgagtattttattttttaggaaggggttttagttgcgcgcgttggtgggaatcgtagtgtttgggattcgtttaggtcgtttatttcgggcgtcgggcgtaggattcggataagttttggggacgtttttaggacgtattagggtaagtttgggtatcgggatttaatttttagttatttttgggacggggtggggaggtataggagatatatcgagaggtatttagtattcgattggtattagggttaagggagtttaggggcgatatagattttttcgattttttaagttatttcggcgacgggaggatgttgagggaagtttgttaggtgaagaaggggttagtagtagtatagagttttcgattttgttttttaggttttagattcgcgttatgttaagacgggtttttcgatttttatttttgatttttaattttagttattggatcgagcgcgtaaagaatttgagatcgtttgtttttatcgtcgtaagtcggtcgtaggatagatattagtgggtagtaataaaaaaagaaatcgggtttcgggatacgtgtcggcggttggattaattttagcggttgtaattaaggagcgcgtacgttgcgtttgttggtgtttattagttatattggtaggcgtataatttcgcgtttcgattggtggttttatagcgcgtattatatatggtttcgttgttgttggcggggtaggttcgaaggaggtatttataaatgttcgagttttttttgatttttattttttcgttttttgcgtcgttcgagtgatagattttattaattgaacggttatgggttatttttgtaatcgttggacgatataatattacgttttagttttttatgttttaaatatatatttaacggatggttgtagagttagttgggaaatacgcggattgaaaaataatgttttagaaggtacgagattggggcgaaggcgagagcgggttgggtttttagcggagatcgtagagggagatatattttagaattaggggtaataacgtgggtttttttttgtatttgtttattttgtaattttgttatttgaagattaattatttattatgttaatttgtttgtttgtttttaaaatcgtatttgtatagtaaaagttttttaataacggaagtaattcgacgttttttatattttttaggagattgtgtgcgtgtgtgttcgcgcgtgcgtttatagtgttaagtgttagtattcgagatttgtagaaataaatgtttgaattcgaaatgtatgggtgtgagaaatttagttcggggaagagattagggattgggggagataggtggttgtttgtattataaggaatcgttaacgttagtatttgtagtttaagtagggttgttttgtaaaggtttagtaattttttttgtaggtttgttgtatacggtttttggttttttttatttgtaaaatgggtgaatgtattcgtattttagttattttcgtgaggtgtttttttagttcgggtttaattttttatcgttaagagtttttaggttttagagttagtttgtaatcggtaaaatatgttttaacgcggtcgcgagtggttttatttcgttgtttggtttatagcgtggagaagttttgtttaggtttgaaatttttttttgtagttttagaaagtaggcgattgggacggaaggttttttgttaattttttatagcggagttttgtttggattatagatgttagcgttgtttttgttttaaggcgtgtggtgattataaagacgatattgaaaatatttattattattcggtttttttgttaataaatggaggggtgtttaattataggtacgattttgtttttgtgttagcgcggttatcgtgcggaaataattcgtttttgtatttatattatttttaatttaaaggagagttgtgaatttttttaaaatatttttttggagttcgttttttttttttttgttcgttttttattttttaagtttttgtttttagttgggggcgttatcggttgtcgtcggagttgtagttacggttattttttagacgcgcgagtagagtattaagatagtggggattttgtgtttgggtatcgtttatatttggggcgttaaatgtttacgtgttgatgaaattagtgagatgggaataggcggcgggaaattagatagaggaagagttagggaggagattttagtttcggattttgggtcgttagggtttttcgcgcgtattttaaaaggtgcggttgcgtggggtattaggttagtttgttagattttgtagagtttttaaattattttattttttaatttgattttgtggtggtcgtattttttatagaaatttgattacgtttttttttttttttggttttaagcgcgtttagttttttttttattttttttgagtcgttttttttttttttttcgttttttcgggttttttttttagtttttttttaagaatttttcggttacgggcgtttattggttgtgcgtagggaggaggcgtgtgttcggtttggcgagttttattgagcggaattagttcggatgatattagttttttagtttttcggcgggtttagtttattggcgaggtagtttttttaggatacgtatattgtttttcgttttcgttttcgttatcgttgtcgtcgtcgtcgttgttatcgggttataaaaatcggtcgagtttttaaaggtgcggatgtttattatagatcgacgcgatattagcgttcggtgttaggtttttttttgaggtttttcggagcgagttttttaaatcgtatttagagtaagtgttttcgttttatagtagtcgtagtttagattttagggatagattttttttaattcggttgtgatttagaatgtttcgatatagggggtttggatttttattttgcgggttatttttttagagcgattttgtttttttgttttttttatatttatcgttgtattttttttattaaaagcgagaagtcggagcgataatagttttttttgtttaagttttagttagttggtgagtttttcgtggtttttagatgtagtatatggattttgggtttcgcgtcggttttgggtgtatgtgcgtgtgcgtgtgtttgttgcgtggtgtcgatggagataaggtggattcgtttgaggaattaaattattagttttttatttagatttttattttttttaaagaaaggtttttattttttattcgtttattttagttcgggggtttagtttttttatatttaattgaaagttcgaagtttttagaatgttattcgtatttcgagggttattaacgttttttgaaataatttgttgtatgagagtagaggggagatagagagagtttaattataggtattcgcgtgtagttaaaaggagggttagagatagtagcgagggggacgaggagttacgggttatttgtgtcgggatttcgcgttgtggtattgcggtgtaggcgggagtagtttttttgttttttattgatttatttttttttttttttttttttttttttttttattttttttttttttttttttttttttggaagttttcgggttcgagggaaggaggattttgcgaaagttgcgacgattatttttttttggggttatggattcggacgttagtttggtgtttagtcgttcgtcgtcgttagagttcgatgatttttttttgtcggttcggagtaagggtagtagcggtagcgtttttattgggggtatcgtgttttcgtttatttcgagtgattgttcgtcggagttgagcgtcgagttgcgcggcgttatgggttttgcgggcgcgtattttggggataagttaggaggtagtggttttaagttattttcgtttagtatttcgtcgtttacgtcgtcggcggttgcgtcgtttattaagaaggataagaagtaaatgatagagtcggagttgtagtagttgcgttttaagattaatagtcgcgagcgtaagcgtatgtacgattttaatatcgttatggatggttttcgcgaggttatgtcgtacgtatacggtttttcggtgcgtaagttttttaagatcgttacgttgttgttggcgcgtaattatatttttatgtttattaattcgttggaggagatgaagcgattggtgagcgagatttacgggggttattacgttggtttttattcgtcggtttgcggcggtttggcgtatttcgcgtttttgttcgtcgttatcgcgtattcggtagtagtagcgtacgtcgtatattatttcgcggtgtattattttattttgtcgttcgtcgtcgtagcggttgttgtcgtcgttgtagtcgcggttgtgtttagcgtttttttgttcggattcgggttgtcgtcggtcggttttattcgtttatcgtacggtttatttaagttttcgtttgttgtcgcggtcgtttcgttggggggcgggggcggcggtagtggggcgagcgggggtttttagtattggggcggtatgttttgtttttgtagtatgtgttaggtgtcgtcgtcgtattattacgtgtcggttatgggcgtcggtagtttgtcgcgttttattttcgacgttaagtgagtcgattggcgtcggcgcgttttggcgataggggagttaggggtcgcggggaagcgaggattggtttgcgttgggttcgggagttttgtcgcgaggaggggcg

SEQ ID NO: 6694 - DNA, 1423 bp, Artificial Sequence
  Description of Artificial Sequence: Synthetic polynucleotide
tcgtattcgattgtacgcgtttttttgggatttcgtattggcgagtcgtttttttcggcgttggacgttttatttgtttcggcgtcgtcggaagagttttgtagagtgagtttttagggttatttcgttgttttttttttcgttttcgtagtcgttgtagttagcgtgggagtcgggtaggtcgcgtggggcgttggatttatcgagaggttagcgtcgtcgtcgggggagggcgtgtttcgtacgtgtgtgttcgcgcgtgttcgcgttcgcgtgtgttagcgcgcgtgttttggtcgtgcgcgtcgagtcgggtcgtattaattttttcggcgtcgacgggtttagtttatggtgtgggcgtcgggtttagggaggtttcggttttcgttaatcgcggagtagggcggtcgtttcgacgcgcgatttgcgaattcggagtgcgcgtcgggggcggggtagggacgcgtgggcgggaatgtacgcgcgtggttaggtgcgcgtgggtgcgagcgcgcgggagttttcgagtgcgcgcgtgttcgtgtgcgcgtgggtgtgggtgtgttcgcgtgttcgtgcgcgcgttttcggggttaagagcgcgggtcgcgcgggtaggtttggatattacgcgttttgttcgggtttaggacgcggttggcggtttcgggaggaagaggaggaggaagaggaggaggcggaggaggaggaagaggaggagggaggcggaggagtagaggttgggacggtcggaggagagagttcggttttagtaggaaaggaatttagtacgcgattattggaggggcgaggagtaagggaaggattagaggggaggagagggggttaggggagggaaagtgtgggagggggagtcgcgggggtgcgcgttttttttaattcggggtcgtttttagcgagaagtgatatttttttagttttattgaaaatcgttgtaaatattgaaaatagtaaaagtgaaaacggttgcgatattaagacgtttataaaatgatcgcggattgttttcgatgttgatgagaattgggacgacgtcgcgtagagcgttcggagggagaggcgcggtgttcgggatttcggtcgtggggaggagtcggatatagtcgtcgggacgcggggatgtcgagggtatcgcggtttggtttgatcgacgtacgcggtgatagtcgtttttgggagacgacggcgtttgtaattagtagtttttaaagggtgtagttaggaggtttagtttgttcgttttcggggttcggggttaagttttttttagaagttttcgtttttacgcgaatttcgatcgtaaaatttagtttatttgagcgtcgtttttttttttttatgtttttcgggggtcgttacgatcgtttcggagcgatttttaggaatttgtttcgtagcg

SEQ ID NO: 6695 - DNA, 1384 bp, Artificial Sequence
  Description of Artificial Sequence: Synthetic polynucleotide
gcgtcgcgtatagaaaaggaaattttatttcgtttgttaagggtagggtcgggttagtggtaggagaaggttagttgcgggcgtaggtaggagcggatttaggagtcgcgtcggggcgtagagtcggacgtttcgaggagtttgcgcgtcgcgttattcggcggaagtcgcggtttatgcggggttttttaggtttatttaacgtttcgtaggcgtggttggtaggaggggttcggtcgtgtttagcgtttttagacgtagttttttttgtcgtagtcgtcggtggtcgtgggtcgtcgcggcgttgagtattttacggggaagttgaggtcgggacggtcggtgtagatttaggcgtcgtagtataagaggtagtcgtttattatgagtagcgcggtggtcgtttagtcgatgtatagcgttgcgtttagttcgtatttttgcgatacgggtatagacgggtcgtaaaattcgcggacgataatgttggcgaattagtagagtggtacgagcgttagtagttcgtaaaataggtagagtacgtttttcgtgagggttatacgcgttttggtcgggttcggggttacgtaggtggtgtattgcgcgttcgttagggttacgaagagcgtaacgaacgttagtagtacggcgtttacggtgagcgttcgcgtcgtttgtatttcggtgtttagagttagtatcgagtcgtatattttgtattgtatgtgttcggtgttttgtattacgtacgatatttatagttttttttaggtggtttgcgtcgttacgatgttgtggtttaggaaggcggttatttgttatatgggtagttcgtacgttaggattagatttttttagtttattaggtatagtattaggtttaggatttttaacgttgcggattttatggttagaggcgagacgcgtattcgaaggttcgtagaatttttaaggtcgtgttgcgcggcgttttgggcgggttttggtgtttttgcgttcgcgttttcggtttttggttttagttcgtttgtttcgcgggtttgtcgtattttttgggtttgttagtttttgtcggggggtattttttttgaaggttcgggggcggattttgtttttcgggttcggtttttcggttcgaagtagttaattcgtgcgcgggttatcgtgtcgtagttaattatagagtttttggtagttgaagttagggaaataacggtttttgaggggtagttgagggcgcgggatcgtttttcgttcggtagtcgtttttagttttattcgtcgttgttttagtcgcggtcgagcgtattttgggttggtttagggcgcgttttttgggtcgtttttttgcgcgtttcggtttcgttattttagaaggcgttcg

SEQ ID NO: 6696 - DNA, 1361 bp, Artificial Sequence
  Description of Artificial Sequence: Synthetic polynucleotide
gcgttttcgattttcgtcgttgggatttttcgtcgtagtttttgttttagtttgtgttgcgggtggggtcgggttgagtagttcggcgttttttatcgcgttttttatcgtatcgttttcgatttaatttcgttttcgggcgtttattggtttgtagtattttttttttagtttgtgaagtgagtagggggaggcggtggtcggtcgtttttttttagcgtttagtttggtttcgcggcggaggcggcgtttttttcgtaggacggagttaagttggattgtcgcgtcgcgcggggcgggtaaagggggcgttgcgttcggtttcgggtagggagtgacggcggcggcggcggtttcgggcgagcgtggttttcgcgtgcgtatacgtatacgtcgtcgcgtagggatatacggatttcggtcgttagtcggttatataggcgcggagattcggttcggcgcgcgtttttcggcgtatacgttttttattttcgcgtcgcgcgggtcgcggatttgtaggttgcgcgttttttgcggagtttgtttcggttttacggataggtttcgtagtgagtaggtaagggtcgtttcgtcgcggttgtttttttacgtttcggtcgttttttttttttttagaattttcgtttagtcgggatttcggatttttttttttggtttggcggttttcgttagtcgcgatttttatcgacggagagcgggcgagggtcggcgttaggtaagttttttagatttgaaatgaagttttttttcgtcgttgcgttttttttgcgcgttaggttgatattttttaatttaagtgtttggcgttgcgttcggggcggtcgatcgtcgtagattgtcggggtgggggtcgatttagttattttacgttttttttgatgcggagaagggagattaggggggtaggtaagttatgcggtcggagggattcggagggatatgtttttttatttttaggtggacggacgtatttacgcggatcgggaaggtagggttggagggtttttcggggttaggtatcgtaattcgtacggggtttgaggggtgggtaagtaatgtgttaggtgggggttggggtaggggttagtgtagaatgtttttttgtggtgatatattcgggattgtttaaaagagtgtcgttttcgtttttcgtggcgcggaggggttggggttggggatgttagggttttagtggtttttagaagaaacgttttgcggggtttgtggggaaacgtatcggtttttttaggttgaagtgggttcgttgagatttttgtttgtcgttttagaggtagaagtttttgcggcggttgcggggggcggaggttatattttcggcg

SEQ ID NO: 6697 - DNA, 1175 bp, Artificial Sequence
  Description of Artificial Sequence: Synthetic polynucleotide
acgttgtttggtcggagcgttttataattcggttaatggggagggagtcgttcgttaagcgtttgttaggtttcgattaacgggatgggtttttttcgttagagtatattgttttaatttaggagcggttgtaggatttgagttaatgagacgtaattttcgttagtcgcgcggtgttcggttaataggaggtcgttcgtgttcggtagcgtgggaggtgtggggtggcgggcggcgttgcgaagttgagggagttgcgcgcggacgagttatagtttgttatagggtgggtgcgttcgttttgtttagttcgttcgtcgtttttcggttttttttgcgcggcggtttttggatgggggttttttttcggggggttttaggcgcgggtaagtcggtcgtcgtttttttaggtttcggggtttcggtcgttgggggcgcgcgggcgggcgaggttggcggtacggagcgtttggttttttgtgggggcgtcggtttttttttggggttttgcgcgtttagggttatttcggcgcggtttaggttgcgagttttgtcgcgtacgttagcggttaatatggaggtagtttcggcgcgtttcgcgggggatcgtcggcgttcgtgggttttaagaggtcggggcgcggcgcgcgttcgggttttgggcggcgagggcgtagcgagggttgtcgttttttcgggtagtttcggggggcgcggcgttgggtcgcgggttcgggggttgtcgtgttcgatcgtatgcgtcgatttgtcgttgggcgttcgtttttttttgttggggttgggcgcggtttcggagtttggcggcggtggtgagggcgtacggttagttgtagcggcgttgtgtttgtcgtggatttaggatattttaggtttggtggcggggttaggtggcggcggttttttgcgttcgggcgatggcgatagcgataggtttttaatttcgtttcgggttcgggtcggtcgggtttcgcgtcgggttacgcgcgcgtatagagttttttcgggtttttttacgttggacgtcgatcgttcgttgtcggaggacgcggggaggggtatcgttttttcggcggaggttggcgtggttaagggtataggggacggcgtcggcgtttcggtagggatagtggggatttcggggtttcggtttttcg

SEQ ID NO: 6698 - DNA, 1087 bp, Artificial Sequence
  Description of Artificial Sequence: Synthetic polynucleotide
tcggtattcgcgtttttgtgtttttggtggtttcggcgttttttcggagcgcgcggtatgtttgtttttatacgtttagtatttttgtttttagagtaaatttattttttagggtatacgtagaggggtagttaggtatcgtttttattttgttttatttaggtcgcgcgtatttcggaaatttggatttcgcgattagtttttttttgttttttttcgaggattttagcggtagtgtgttttggatttatttgtagtttttaagtttttttatttttgcgttttttttaggcgtttttgagtttgtagagtttacgatttttaataggttgtttcgaagtgtttttttttatatcgttttaggaatgatttttttatattcgtttttcgtaaaaaaaagttggtttaagatttaggcgttttaaggattagtttaggtttttattcgacgcgggttagggggtgttgttttggtagtttcggagtttcggtaaagagtaatttgtagggaggcgttacgcgcggtttttattattcgttagagattcggtttatggggttaaacggaggggtttgtgtcggtcgatattttaagttttgtcgcgtttttttcgtcgtttatcgtatgggatcggcggaggagaaggcgcggtcgcgggttttttgaggtagcgtgtttcgtttcgggaggaaagtttgtgttatatagaggaggcggcgcggggaggatttgggcgtcggtgggtggaggcgtgggcggtggcgtcgcgtggtcgtgtgtttgttttttcggcgatcggtgcgtttgtttttcgtcggagttcgcggtcgtcgcgttttcgttcgttgcgtttagcgttcggcgcgtttcggttttagtttcgacgcgttttcgtcgtcgtcgtcgcgcgttcgtcggttatattttttttttttttgaatttatgtgtaaaatatgttacgttgtatttttagggaaagtttcgcggtttttgatagtagtcgttggagcggtgggttcgtttagtttttttcgcgttttttcggagtttcgttcggttatttttacgcggtcgagttgtaagcg

SEQ ID NO: 6699 - DNA, 693 bp, Artificial Sequence
  Description of Artificial Sequence: Synthetic polynucleotide
tcggtagttaacgtttagttttcgttttttttttttatttcggatttcgtaatcgcgaggcgagagagtagcgtcggcgaggtattggttgggttttgattgttacgttaattttttgttgttttttttagtttttagtcgtttcgtttttttttttttatttttagtttgggtttggaggcgatttttttttattgattgagtcgattgtatttttgggtaagcggcgttttgttttttttttgtttttgtttgttttttttgtaaggttacggcgtttggagtagggtttgtagcggtcgtcgtagtaacgcgagttaagtcgtgtttcgtacggtcgttcggggtcgtattttcgttcggtggcggcgttcgaagacgttagtcgcgttacgtattgtttgcgtttcgcgttttagtcgtcgcgtattaacgtcgtcgttttcgtcgggagttaagttcgtcgggtcggttcggttttaggtgggtagttcggtttgtagttggttggaggtggcggtcgttgtagttttggtagcgggtatatttttaagtatacgtatttaacgttttttttttgagttacgaggatggagtagttatttcggttcgggattggcgtaaggtaaggtgtagtcgtttgttgtttttcgtagagcgcgggattatttttttgttcgggtatttaggtcg

SEQ ID NO: 6700 - DNA, 5065 bp, Artificial Sequence; identical to SEQ ID NO: 6668
  Description of Artificial Sequence: Synthetic polynucleotide

SEQ ID NO: 6701 - DNA, 307 bp, Artificial Sequence
  Description of Artificial Sequence: Synthetic polynucleotide
gcgcgggggtcggattatgagtcgttgagtcgggtaaattttaggttatcgagttagcggattttcggagcgtagttttgcgtcgcggagtaggttttaattaggcggcgaggcggttatacgtatcgagttagcgattttcgggcgacgcgcggggttagggagcgttacgatggaggcgttaatggttcggggcgcgtttacgggttttttgagggcgttttgttttttgggttgtttgttgagttacgtcgtcgtcgcgtcgtcgtttattattaagtttttcggcgatgtcgtttttaaaacg

SEQ ID NO: 6702 - DNA, 1563 bp, Artificial Sequence
  Description of Artificial Sequence: Synthetic polynucleotide
tcgggtttcgaaaacggggggagggggacgacgttttagaggtttttgagtttttggtttttttcgattttaagggtttttttttttcggtttttaggcggcgacggcgggtagcgcgaagtagtaggcgtaggggcgttgggatggggatgtttttgtaggtttaaggttttttttgggagtttaaataaagattacggtagcgtcgttttttttttcgggaattcgacgtcgcgcggttatagggggtttggaggggcgggtagggtttcgtagcgtatttagtatagttcgcgcggcggagcgggtgagaagtcggcgggggcgcggatcgatcggggtgttttttaggtttcgcgtcgcggttttcgttcgttttttcgttcgtttatcgggtattttagtcgcgtagaaggcggaagttacgcgcgagggatcgcggttcgttcgggattagttttaggttcggtatcgtttcgcgggtcgagcgtttatattcgttaaatttacgcgggtacgttttcgcggcgtatcgtttttagttcggttttcgtttttgtagtcgcgggtacgcggaggggtttttggttgttcgtatttgtattcgcgcgtcggcggcgtcgaagtttcgtttttcgtttgcgcgtttgtttcgttcgtattttcgcggtgagtcggcggcgttttcgtttttgagtttagggttagtttttttcgtcgtcgcggttgttgcgcgcgttttcgtttagtttagtttagtttcgagtacgattttagttttacgtacgattttagtttcgcgagtttcgtatcgattcgttttcgttttatttcgttttcgcgggggcggcgttttttttttttcgcggttttcgtttttttttttcgttttttcggtcgcgttggggatttttagtcgtcgttcgcgattttttatcgcgacgttcggaggcggcggggtttttttgttcgggcggcgggtacgggggattattttttacggtgttatcgtatttatttcgcgtttttttttcgttttttggagtttatcgggattaggtggcggcgggtgtttttttgggggtgcgcggttatgtaattggtggatttttttaaatcgttttggaggggggagcgcggcgttgggggcgggagagcgtttttggttgtgagttgtttttgtcgtttcgtttcgcgtttttttgtcgtttcgtttcgggtttttcgcgttttttttttcggttcggtcgagcgcgttgtttcgacgtcgttatttagagtcgggtcgcgtcgggcgtcgagatgaaggtgttgggatatcggttggagttgtttataggtatcgttcgtttgtttcgtagtcggtcgttatttttcgagttggagcggatttcgggcgcggcggtcggggattggggcggttcgggtttgagtaggaaggggtgcggattttaattaagttttagttttgtgttatttgtttgtgtgcggagtttagtttcgggagaggatttgaggttgtggcgagtttttggcgttggcgttcgggttgcgggagtatcg

SEQ ID NO: 6703 - DNA, 512 bp, Artificial Sequence
  Description of Artificial Sequence: Synthetic polynucleotide
tcggtttaagttagcgtatttcgtcgattttttgtttagtttaaatttcgaggttgggtaaggtattggatttacggttggatcgattcggggtagtttttgggtgaatagtagcgtgttcgtcggtagagaatcgagattagcgagtcgattatgcggttgtatagattttacgcgcggtcgagcgcggtggtttgtgggtttttgttgttttttttttagggttattatgaggttttcgcggaggggtgatagggatcgggtttagatttgttaaatgttgcggaggtagaatttgatagtgcgggagggtaggcgtttgggaggtaggagttggtggagatgatagcgtggaattcgtgagttttacgtaacgtttttttgtcgtttagggtgggtttttagaagtatagaaatggtcgggttgcgggatattatagcgaggaattagcggagtataggggttttaggagcgtcgggatatgttaggtcgggtagatagtttcgggtcg

SEQ ID NO: 6704 - DNA, 1070 bp, Artificial Sequence
  Description of Artificial Sequence: Synthetic polynucleotide
tcgcgagaagtataaaaggggaggggcgggtcgtgtagttaagaggacggttaaacggggaggttttttttttgttttcgtagatgttggagtagcgattggttcgggagattcgtgttttggagagaagtaaggagtagttgttttcggagagtgagtttttcgcgttaggtgggcggggggagggggatgtgttcgggtttcggttttgtttttgacgttcgtttatcgatagggaggttggtgcgcgttaagttgcgggaggtggagcggcggttgtattcgtcgtttgaggtcgagggcgttatggcggtgaatgacgggtgagaggggaagggaggagtgggcgaggagggtaggggtagggcggaggggaattcgtttaggtttttcgtttcgttttcgattgtcgttttttcggtttgtgtttttttcggcgtcgtcgggttttcgcgtttcggtggtttttttttcgttttttggattttcgtttttttttttttgttttttcggtttttttttcgtaggttgaaggcggagttggagatattcggggagtaggttcggagcgttttcgaggtcggggtcggcgagggagaggtagggagttcgaggaagggaggcggggcgggtagggatcgagttaggagagagcgggcgggggttttgggagcggttttcgagagtggggtttgtggggagtagggcggtttcggggatagaggaagtcgcggtggaggtttagggtagacgcgggcggacgcgaggagcgtaggaatttggttcgtagttttatttagttttcggtaggtcggatttgagttttttcgcgttcgcgacgaggaggatttcgagtcgtcggtggttgtttttgacgttttttaggttagtaggattcgttcgttttcgattttttttcgagattcgttaagaaataaaggcgatgattttcgattatgttcgcgtttttcgcggagtttgtgttatatcgtggagcggggcggggcgtgttgggatttcgaggcggggtttttgtcggattttttttattagtcgagtttcgggcgtcg

SEQ ID NO: 6705 - DNA, 766 bp, Artificial Sequence
  Description of Artificial Sequence: Synthetic polynucleotide
acgaattattatttaattcgttggcgtcgttgttgttgttattggttaaggtcgcggcgatcgacgtatagtagaggtagtatagttggagcgtttgtaagagaaaaggtgatatcgcgcgtgaggggcgcggcggggttggcgtcgggcgttttttgttattcgttttcggagtttcgttcggcggtatttgttttggttacgcgttttagtttcgttaggtttttcggcgggttcgaattcgtagtcgggaaggtatacgcgagtaggagggcgtattttatggttaggtgcggacgcggcggttgcgggtggttagacgcggtaggcggagcgtacgggcggcgcgtatttttttcgcggtttcggagttcggcgttttaggtgcggttttaggtgagagtcgtcgtcgtttatatcgtagcgggggcgcgttgggattttttttttttcggtcgtttgcgcgtttttttttttttcggcgcgggtttgtcgagttgtagtttgcggtattttagagggtacggggggttttttgggtcgggattggagcgtaaacggttgggagattgtcggtgtttgttcgttcgtttgtgcgtttgtttgtgtcggtgtgagcgtttgaggcgatggggaagatagcgttagttggtttttttagcgcgtcggagtcgagcgttcgtttttttatcgcgcggtgattggcgattagcggttttcgggttcgttcgagttttcgggttggtgtaagggcgtgggattttcg

SEQ ID NO: 6706 - DNA, 363 bp, Artificial Sequence; identical to SEQ ID NO: 6479
  Description of Artificial Sequence: Synthetic polynucleotide

SEQ ID NO: 6707 - DNA, 2919 bp, Artificial Sequence
  Description of Artificial Sequence: Synthetic polynucleotide
tcgagtcggattttcgcggagtatttattagggtggttagttggaatcgcgtgttagatttatatgaaaaattcgggagaggacgggttgtcgttgttcgagtcgttttttcggaagtcgttgtttattaatttttcgtatttttttttgtacgcgtttttttcgcgtattagtttggagattttttgtttgaggtggtcgatttgttgtagtagttggttttttttcgattttaggacgtgtttttgttgtatttttttgaagcggtaggattgggtatagtcgcggttttttagggttcgttttttttgttttagtcggattattttttttttgttgatttcgcgtagttgtcggtttagttcgcgtatagatatggttattagttgttcgtcggagaagcggtcgtcgaagtgtaggtcgtcggcggcgtggtgcgggtgtagggcgtttttcgttttcgtcgcgttttcgtcgttttcgtcgtcgtcgtcgtcgtcgtcgtttttagcgttggtcgggttatcgtcgttcgcgtttttagcgttatcggtcgaggcggtcgcgttgttcgcggcgtcgggcgcgtcggtcgtcgggtggtggtggtggtcggcggcgtggtggtggtggtggtggtagtgcgggttcgcgtcgttttgcgcggcggtcgcggcgattacggcggatattacggcggcggcggggtttattttttcgtcgttgtcgtttaaggaggcgtcggtatcggtttcggtcgtcgcggttagttgttgcgtttcgcgcgcgtagttatcgaagtcgttttggagttggtggttgttgttgatgagcgtttcgatcgcgttttcggggttgaagtttagcgtttcggggtttagttgttgcgggtagtcggttatttagtagtagttttttaggtgcgttttttgttcgttgttcgagttcgggttgggcgtcgagaagttgggggaagggggtatcgagttgtacggcgtgtttatgggggtggaggatagcgagttttcggcgatgagacggtcgtattggttgatgatgcggtcggtttttatcggttttttttttattttaaattttattagatcgaagttattaatatattttatggttaggggattggtgggtaggtcggagttgtttattgttagttttgatgttatttttttgtcgtcgtcgtcgtcgtcgtcgtcgtttcgttagatgggttgtaggagaggggttagcgggttgtgttgggtggttagcgggtgagttagtttgtcgggttggggcgtttttagtttgcgcggcggtggttggttcgaaattttcgagcgcgtttatatatatattttttcgttttgttcgcgtttttcgcgttcgtttttttttttttttgtttacgttaatgtgttttttcgttcgtttcggtttttttttgttcgttcgtttttttgcgcgttgagtcggcggttttaggttcgggaagatttttcgcgagttgcggtggcggcggtggtggttgcggcggcgaagttggaggagttcggttcggtgcgcggcgtttttcgttcgtcgtttcgttgcgcgttttgtataaggaagggttcgtttcgtcggttcgggttgtaggtagggcgcgcgcggcgttcgttcggggttggaggcgcggcgggcgtttgttcgggcggcgcgggttttggtacgggggagttaatattttatgtttttcgtttttttttttgtttggttttttttattatttttttttttttttttttttttttcgcgcgttttttatttttgtgtaaagtgtaaggtagaggtgtagttcgattggaggagagggaggggggagtttagtttttttttgtttttttttaaaaaagtaaaatagcgaagttttggggaaagacgaggtagagagtaaaggggggagggggaggttaagtcgataagtagttcgagttatagttagaagatgaaaaaagattttaaagtttttgatttagtaagaagagtttaaagtaattgttgagttttatagtattcgtgacgttaggtttaaatgagaaattgattggtatttcgggttaatgggaggcggcgagagcggtcgcgattagtataatagtatagaaataaggaaatttttcggagttgttaattagggtttaattagttgattgttagttgggacgggttggtttaattttttttgcgtcgttgtttattcgggagggaacgaggttcggcgtaaagtttggtgtaagaggggaaggagtttttttagaggggtttcggtaattcgggcggatttgggagggcggtttgtttttttttggagcgcgagataggttttttattcggagttttagttcgttgggggtttattcggttgggattggtttgattttttttttttgtttgttttttatttttaggattgtgaattcgttttttagtttttttttttcgtattaattttggtatttaggtgtttgtcggggattttttttttttgagtttggtcgtgttcggcgtttaaatttggttttaattttttgttcgtttttcgggcgttcgtgcggggaagggatcgggaagggagggatgtagtggggtgttcggatcggggttgcgggttgggcgtcgttcggttatgcgtttgtttagaaggttgggtattcgtggagagggaaagtttattttatttttttttttataacgaggtaaaataagttgtttagaggttattttttacggagatcggttgttcgttggcgtcgcgtgtttttggatagagcgagcgtttatgcgagataatttcggggaagtttaaagttaggttagtcgggtttagtttttcggtttttgattggtcggagtttggtttttgagatttatattgcgcgttcg

SEQ ID NO: 6708 - DNA, 2267 bp, Artificial Sequence
  Description of Artificial Sequence: Synthetic polynucleotide
tcgaaaaatcggttttcgttttttattttcggtcgattcgttcgtcgaggtggttgttttgggaattttttgtttttcgtttaggagaggaaacgtatattcgggtcggacgtatagaagtcgtattttggttggggttataagtttgatagttatcgataagtttttatttataggagtacgcgacgtgttttttttttaagggaaaggtttttttttttgggttttggaatgggtttgaagttagtcggttttagtttatagggtgaatgaggggtgggtatagttcggtcgcggttttagtatatacgggcggacgtaggggcgggggagcgttagtttcgtagtgtgttcggagtttagcggttttgagtcgtcgttattagtttggtcgttttttgttttacgtaagtgaagttagtcgtttagggttgcgtttttagttatttgtttttttatagaggtttatattttttttttcgttgtttttatagtttggttcggggtttgtttaatatagatggacgttttttaaaggttgtgcgcgttatcgttgttattcggttgtgtcgaggttcgcggtcgttaggattttagggatcgtatgttaggtagggtttaggatttttagcgcggattatttttagtttgcggggtagcgtcggggattcgggtaggagggagaggagtaggagggagttttggatttttttttttagatcggtcgtcgttatttttgttttttttagggtcgttttcggtttttttattttcgggttttcgttacgcgggtcgcggggtttttgttaggaaaatcgggcggttttaggggagttcgcgagatttttagcgttcgggcgcgtcgtttttttcgaagtttcgtcgtagttttcgtaggttaggttttgtttacggggggttgcgtttagttcggatgggtgggcgttgggcgggttggttttattttgtcgtgggtattaattttgaaaacggttcgtgcgttcggcgcggttgcggcgtagattcgggaacggtagtcgcgggcggagtcggggtagagcggcggcggcgcgcggggcggatacggtatttacggtcggggggttcgggggattcggcgggcggcggacggcgtatattcgcgattcggttcgggagtcgttgttttttttagtttggttttcgtttttacgatttaggggcggttgcgcgttgttttttggcgtcgtatcgggtttaggcgcgcggcggggttggggcgcgcggggcggtcgtttgggttatgtcggggattcggtttcggttatttcgcgcgggaataaagcgcgtatttcgttcggggcggttttcggttttcgcggttcgcgtcgggtttagtcgtcgcgtttgtggttttaacgtcgcgcgttcgttcgagagttttacggggtttcgcggttttcgtttcgcgcgtttcgttttcgttttttgtttttcgtcgtcgtcgttgcgttatttgtttttcgttcggcgtttatggcgtttagtttcgtttcggggcgtcggtttggagaggggtttttcgtcgtcgagagtcgtttttaacgttttcgttatcggggcggcgttttaagaattggttgtgggggtcggggttgtgcggagcgtcgggagtagggagaggggagaggggcgcggggagggggcgacgggcgcgtcgttttttgcggggggcggcgcggggaggcgtaggcgggggcgagcgaagaggttgaggggtgcgggcgtcgtggagggggcgcggttttggggggcggttttcgtttgcgtttatttttttttttttcgtaggtcgcgtatatttatttcgtagtagtcggcggtcgcgggtttcgtagttttagaatcgcggtttttggcggtcgcgcgggaggttgaacgggagttggggggtgtggggggggtggggaggtggggagttgggggggaggtcgttttttcggtcgtcgttttcgttttttgtttcgcgttcgtttttagcgcggcgtttggttcggtttggggttattttcgtgcgtggtcggtaggggtcgcgtttttttcgtttagtttttcgggcgggttcgatgcgaagttttcgtttttcgcgggtttcggggttaggttatttgtatatattttgtatttatttgtatatcgtgcgttttatgtttatttgtagaaacgtttcgagtcgttgttttgtttttttcgtattttttttgtcggtaggttttttttttcgttcg

SEQ ID NO: 6709 - DNA, 265 bp, Artificial Sequence
  Description of Artificial Sequence: Synthetic polynucleotide
tcgcggttcgcgtgggttttaggcgcgggatggcggcgtttagtagcgcgggttcgcgtagggcgcgtagcgttgggggtaatagcgtggggttcggtcggtagtggggcgcgggttgcgcggtaagtagtttttcggagtttagtattagttttagtattatgtagggtatttacgaggcggaggttagtaggcgtcgggttcggttaaagtcgttcgtagtttttagtattcgcgttttttgttttatcggtcgtaggttgcg

SEQ ID NO: 6710 - DNA, 374 bp, Artificial Sequence
  Description of Artificial Sequence: Synthetic polynucleotide
tcggggagggtagtcgttcgtttttttcggcgttgggagttttcggttggtattgcgggaggagttttcgggtgattcgcgggttttgaaatcgtcgttcgggagttcggggtttgcgttgcgtttacggggcgagcgagggagaattgacgtttttcgttcggattttttttttttttcgagaattaggtaggtcgcgtttatttttaagttcgattgttttcgcggtaatatttgtgggaaatattacggtggattttgtgggtcgttgagttttttgattttcggtttgttttattttgttttgttagtgggttttgcgttcgcgttaataattcgaatgggtacgtttttgcgttttagaacgttgttcg

SEQ ID NO: 6711 - DNA, 1133 bp, Artificial Sequence
  Description of Artificial Sequence: Synthetic polynucleotide
tcggcgcgggtcgttttcgtttttagttttaatgttgttgcgttttaggtcgtttcgtttttggtaggttttagtttttgatttagtttttcgtttagtttttgagagtagttttttcgcgggattggtttgtgcgcgcgcgtttgcggtatcgtcggattaggggtcgttttcgagcggggagtttaggaggacggttaggtggtttgaggtagaggcgttagggaggatggagaagggatatttagggtttaggcggggtgggggtagggagggcggcgggatagtaaggaagtgggtgtatttgggtgatttagttgcgtatgagcgggtaggggttcggggcgcgcggattttaggcgttggattgcggcgtggagtagcgttggggaaatcgcgtcgggtttagcgaggattgttgggcggggcgcgcgaggagcgaagttggtcgggggcggggtttgagtcgtgtcggggcggggtttagattcgggttggtcgtggtgggcggggtttgagtcgtgaaggggcgggttttgtaggggcggggtttcgaggggcggagtttgcggtgattagcgagggggcggggtttagagttattaagaagcgggatttagtgagggttaaacgtggggcgtcgggggcgtggcgcggggcgtaggtgtacgtaggttggtcgcgggcgcgcggggttcggcgggagtttcggggtggttttcgcgtggggtcgggggcgttcgcgcgggcggggcgaggtcggggagggtagttgttcgtttttttcggtattgggagttttcggttggtattgcgggaggagttttcgggtgattcgcgggttttgaaatcgtcgttcgggagttcggggtttgcgcggcgtttacggggcgagcgagggagaattgacgtttttcgttcggattttttttttttttcgagaattaggtaggtcgcgtttatttttaagttcgattgttttcgcggtaatatttgtgagaaatattacggtggattttgtgggtcgttgagttttttgattttcggtttgttttattttgttttgttagtgggttttgcgttcgcgttaataattcgaatgggtacgtttttgagtttaagaacgttgttcg

SEQ ID NO: 6712 - DNA, 2358 bp, Artificial Sequence
  Description of Artificial Sequence: Synthetic polynucleotide
acgatatttcggtttgttgttatggaaataggggcggattaaggttggagcgtggagcgtagggattaggtttttcggttatttgagttttcgttttagtcgttttcgtagggtcggggtagttagtcgtaggcgtcgcggttttttagttttttggtcgggttaggcgcgggggggatttcggcggggcgttatagtttgttcgggtttgggaggggagaggtagacgtagaggttggaatagttggtggcggggttcgtgggttttcggcgtgattatttgtttttttagggttcgggggacggcgtttcgcgtggtaattacgtgggggcgcggcgggattttttcggtgttcgtattaattttgtcgcgtttcgtatcgggtcgggttgttggggcgtttagttacggtggtcgcgaagttagttgtttttaagttgagttgtgtatcggtcgcgtatattggcggtacggttttcgcgttttttcgtttttagtataatgaaagtttgaggaattggatattaggcgttggtcgttttttatttttagtcgttgggtgtttagagtttatttttagcgattagagtagaattgtagagaagacgttcgcgttcgggtttcgtttggggagttagggcgcgcggggagcgttcgggtcgcgcggttattgatcgttggttgtacgggggcgtcgtgcggattcggtttttataaagcggtagaagtaagggcgtgtgttcgcgtagggaatggaggttgtaagtgtaaaattttattttagtaaagtaaaggttttaggaggtcggttttttttttattatcggtcgtttattttggttttcgattgattttttcgggtcggatttttaggtttggttattcgatttatggagaaaatttcgtgttttataattggtcgttgacgggagttgagttttagtagtagtttttcggcgggtgcgttcggtaaaatttattagttcgtcgggggttattttttagatcgggagtttcggcgtcgggcggcgttcgggttcgcggtttttttcggagcgtatttaattttaatttgtttttgcggttttaatttatttttgcgaagtatgttggttacggggtcgtcgtttcgaggtcggtttaggcgtattttttttcggggtttagatttaaatttttgggcgttagttgtagttaattcgagcgcgtcgaggcgggggtaagtcggggattcgttcgtgttcggtggttcggtttcgtaggggtatggtgagttttagtttcgcgtcgagggtatcggcgttcgtaagtaatcgtggtgttgttcggtagtttcgcgcgtttgtttagtttcggggcgagcggtttgtttcgcggagtcggcggtttgtttttgttattcggagtatttcgtaggcggttttgaggggggacgtcgttttttggtcggtcggtcgtagttttttttttttcgttttttcggattatcgtcgtcgcggttgtagtaaaagggcgttcgtacgtatcgtcgagtttcggggaaagcgttcggcgcgcgtttgtaggatcgagcgatcggcggagcggggcgttttttttttttttttcggtttttttttttttttttttttttttttttttttgttttttagttttttttttttcgtttcgtttttcgttttcgtttacggagcgttttttatataaaatttatgaaagtgtttttagttcgtagtgtcgagcgtcgttttatttttaaggtagtagcgtttagtcgcgcggcgtcgttttttaaggtgtttttattgcgttcgttttcggggaagatgttcggttcgcgttcgtttaggtatttgtttttagtttttaagtcggttttcggattattttacgttttttttcggtttcgtaggttttttggagttcgaattcgtagtttagttttcgttcgttcgtttttcgcggttggaggttatcgggagacgcggttgggacgcgaggatcgtcgtttagagtacggatcgcgagttcgttttttgtttcgttttttttttggttagcgtttttttttttagtttcgacggttttttttcgtattgaatagttttagcgaattcggttgtttcgtatttcgagttttaggatattgttttttcgtggggagaggaggggagtaagtattcggaaagggttagttgtaaattttagggagaaggaaggattcgtgcgggttcgggtgggtcgttttcgtttgggtggggtggcggcggggggtttttgattttttttggtttatatagatttcgtcggggggttcgcggaaaatggaggaggcgtcgtttggaaagcgggtttcg

SEQ ID NO: 6713 - DNA, 1050 bp, Artificial Sequence
  Description of Artificial Sequence: Synthetic polynucleotide
gcgcgcgtttcgggagagttgtgtttttcgcgaaattcgtgcgttttagtttagggttttcgggatcggtgttcgttagtgggtataggacgtcgggtgttcgaagggttgtttggagatgtaattgattttggcgggtattagaatgacgagtggtagtagtaggagcggggtgacgaataagattacgaaggatttgaatttggagatatagtttagcgtcgaggttatcgcgcgggagggagattggcgggcgagacgagtgaggggtagttagaggcgtcgcgggtttaagaaggggttatagttttcggggattggggagggggcggtgataatttcgtttcgtacgggggcgttttttcgcggttttggggcggggttatttttcggggtttgtgggacgcgtttgtttttaattttgttattcggcggcggtgggaggcgtttttggattttaacgtttcgggttagttttttaggggtagtttgggttttagtatttcgcgttgtttaagttttttttgcgttgtcgaggtagaggtgcgtttcggggttgttaagcggggcgtgttttggttattggtgttgttcgttttggcgtaaggcgttttttcgcgttcgtatttgtttttttttgggttttgaagggtttcggatgaaattttttgtaggtttttgggttttttaggtttattttttcgattttttttttttttttatttttttattttcgttttttcggtgttttttcgagaggtgtttttttacgtttcgcgtttttcgtatcgcgggtttcgtttttcggttttttttggttttttcgttacgttcgttttattttaggtgtaggatttttttttttcgttcgtatttttcggttcggagtttttgggcgatcgtatagggaagcgaggttattgtttttttttgttttaggggttgtcgcgttttagtggacgttgtatttcgtagacgttcggcgggtagatgcggatacgcgttttggaggggttttatcgagttttagtagtcgtagttgttcgttcg

SEQ ID NO: 6714 - DNA, 1731 bp, Artificial Sequence
  Description of Artificial Sequence: Synthetic polynucleotide
tcgggttcgtttcgtttatcggtattaggcgaggtttttgtcgtagttgcggtcgaagaagtggggttcggcgtttacggcgcgtacgtcggggtgtacgcgtaggaattttagtagcgttcgcgtgtcgtttttttttatttcgatgatgatggtttgcggtagttgtttgttgttttcgtttaggagtagcgttagggttttcggcggggtttcggttacggtgttttcggtttcggagtcgttcggattttttgataggttaggggatttttttttttaggtcgttttttcgtcgtcgtcgcggggcgcgggcggtcggcgttttcgttattgcggtagttgtaggaggcgttttttttgtgtcgtcgtcggttatatcgttagttttttcgggttttcggttaggacgtcgttattaggggttttcgttttttcgtcgtcgtcggatagttttacgacggggtcggatagggtttggtagcgttcggttaggtagtagaagacgtaaagggacgtgagtagggagtagagtattagtaagaattttcggaagatgttgcgggatagcggttcggtcgaggtggagagggtattggtcgggttcggaggggttattttagtcggaggcgacgtcgggtaacgcgtcggttatgttaggtttggatttcgataggtgttagagtattttttcggcgggttagcgcgttggacggaggttatatcgtcgtgcgtttttgtggtcgtgcgaattgtttcgggaggtagcggtcggggtttcgcggggaaacggaatttcgggggtttcgcgtaggatttttgtttttagtcgagggagcgggaaggggaacgcgggttcgtgtttaagaaattatcgttttagattcgtttaagttttgagtttggggtagttttggtttttcggtttttcgtaagagtcgtcggaatcggggttttggtagcggtgtcgaaggcgtgcgttttagtttcggtttcgagagatttttcggcgcggattttcgtttagcgattttgtattattggttcggttttcgtgagggtacgcgcggttgtcgggtttttgcgtttcgtgcgttttagatagtggcgagcgatagtgatttttagtttcggttttttttggtttttttgttcgtttgggcgcgtttttttcgttcgagtttaggtttttttagttaaggagcgaggttttttcgagtttttttgttcgagcgggagataggaggttcgtgtagagtcgtttattttttttcgtagcgtcgggttgttttaaattgtttttggattttatttgtgagtcgcgtggttgggttgggttgggttgcgcgggatttgttagcggttttcgttattttgttcgtaggcgtttatcggttgttttttgggtcgtcgttggtcgtcgttatacgtgggacgtcgagggtagtaaatttgttggtgacgttaaaggttcgggtcggattagttttcggacgagcgtagcggggcgcggattagcggttaggcggggttagacgggcggggtgggatggagaaaaggtggcgcgggtttcgtagtagtcgtttaatggtattggagagggcgggggcggtaggggcgacgttttttttttagtgttttttattttttttcgcggtttcgtttttttttagtggattcggtgtttgcggcggtttcggggttgtttgagtgatagttaaggtcggtcg

SEQ ID NO: 6715 - DNA, 3535 bp, Artificial Sequence
  Description of Artificial Sequence: Synthetic polynucleotide
tcgtttttttgggttcgttttttgtttcgaagttaatagtaatttttgatcgttttatatcgtttagaagtttttttatattttttcgttttgggagcgggttggttgttgagttttcggagaagcgtttgtatttgtatggcgttcggggtttttggtaggtagagtagttcgttattttggaaggtcgggatcgtttattttatttcggtttatagttttttttttgcgtagttcgtttttgtagtttttgcggggaagtgtcggggttgttcgaggtttagtttttaggattgtaaggaggtagtttcggcgtgcggcggtgcgtatagtttagagtggttagggcgcgagagtgtaacgtttttttggtttcgagcgcgtcgtcgcgtttcgggagtagattttcgtttagtagttatcgtcgtttcgatttttcgttttagttgtagtttttgtcgggtaatatgttaagagtcgtcgtcgttatagttgtcgtcgttatttggggaagagtagtagtagtagcggcggtcgcgggtatacgggggtaataaatcgagttattcgggcgtttagcgtgtcggggaattttttttgcgtttattgttcggcgggatttacgttatgtgttgagttatgtttttggtcgcgttcgcgggtagcgtatggggtagcgtttgagtggcggtagattttgtttcgatgttttcggtcggtttttatcgtagtcgtcgtcgttttcgtcgtcggtgaggaggaagttcgcgttgtttttcgttatgttttgcgtttggttttatatgtttttgtattcgtgcgtcggtttttgcgtcgtcgcgtcggggttgttgtttttgggttttgggtttcgcgtcgtatacgattcgttagttttggttatagtttcggacgggacgttttttaggttgtcgtttcgggcgtcgttagttattttattggttttaggtaaggagatggtcgagggcgttgcgagttcggaggagtagagtttcgaggtgtcggattttttaagttttatttttagtttttttagtgggtttgggagtaagtagttgtcgtaggttattattatcggcgtgaagaagggcggtacgcgggcgttgttggagtttttgcgcgtgtatttcgacgtgcgcgtcgtgggcgtcgagttttattttttcgatcgtagttacgataagggtttcgtttggtatcggtgagtttttttgttaggggtagggtttttatcgtcgatttagattttgagttaagggagatatggcgtatgatagggaattggtagggttatagtttcggattattcggggtagggtagggaaattacggtagattgcgtagcgtattttgttcgggtgcggtgagggttgcgtttcgtttggttttcgttataatttatagaaagttttcgcggagtattggtgtttttgaatttattaggcgatttcgtcgtaaagaagaagggtagcgattgagatcgtttttagtaaagcgagttattttttaattatgggggtattcgattcgaatcgtattttatgattcgttttaaatttttttttttcggagttcgagacgttgggaatgttttgagtttttttggtcggttttcgtttttaaggaatttttagagtagtttttgttttttagatggggagagggggtgggggtcgcggcgtttcggcgaggtcgtagagtttgttaattttttgttatagttcgtttggttatcggaattttaagggtgttagattcgtttcgttcgcgagtcgtttgggttcgggagggtgagtcgggcgggtggttcggcgttttcgtttggcgggcgggcggcgcgcggagcgtggagttgtgttggtttttgtcgggtaaaggcgcgtattgtaatcggttggagcggcgcgaggttttgaaggcgttcgggttttcgggtatcgtcgttcgttttcgtttttttgttttcggtgttgggatagggaaagtaaggacgcgtgttttcgcggggtttttatacgttcggagtaaagaatattcggggtttattgattgagaaatgagggttgtttcgaggtcgcggttttcggaaattttgttttcgagtcgggttgcgggttaggttttaaagggatagtggtttcggggttataattattatttttgtttattgtttttcgtagttgttggtttttggggtgagttgttgggttgttcgagtttcgggtaaggcgcgagtgggtaggaggtttagatttcggttttcgataattgttttcgattaggggtttaggtaacgatttttatattttcgttggggtttttattcgtaattttagttagtacgatatttagatatttttttaggtttaattagttttatagacgtttaagatttgggaaaataaaagaggagaagataattgaatttttttttttgtgtttattttattgtcgggatttgggtgggttggagaataaaagagggttgatttcgcggattaaaacggttttttttttagtttcgttttatttttttttttttgtttttaatggttttttattattgttaggagttgtttaagtttcgaggtttagttaatcgtgatagttattttttttatcgttttcgggttgtgatttattttcgggatattggtggataagaatggggtttttggagttcgacgtttggatttacgttttggttagtcgcgtgaattttggtgtttttatttgtgtagtgggaataatgtaggttttgggtagggatgggaagagtgaatgcgttggtacggtaaggtgtttcgtaggtacgtgagggtttttttaatcgttagttattgttatcgattgtattgttatgatttttattattattattttttttttttttgggatggtgattttagggttaggcggtaggttataattagcgtttttttaggtggaattcgttagagtttcgaggtagtttaggattttttgagattagatatatttgggtcgggttgggaggaattggtaggaaaaggattgaatttttaatgttaggcggttttgaagtatttggggtaagttatggaaatttttataggaaggtttacgtagttttttaggcggttgttttttatttgttacgttttttttgattgattaaaaaacgttgaatgaagaacgaagtcgcgtggaaattttcgtcgcgcgtttgtagcggatagcgtagttcgggaggttcggttgtcgatttgcgttcgggggttgcgttgcgagcggttacgtatggcggttggattcgggcggtcgtaagggtttggttgggtcgcgggaggcgggaggtttttcgttttttcgagttatttttttgaattgataagtaggattttcgggtttagggggtatagggttcggggcggtgattcggcggatcgggttgtcggaggagtttattgtaaatgtcgtaattggttttaaatattgcgtttttggattgtattagtagtttttggcgcggtcg

SEQ ID NO: 6716 - DNA, 2896 bp, Artificial Sequence
  Description of Artificial Sequence: Synthetic polynucleotide
gcgtgggcggtgagcggtcgggagaggggcgggttagttgagcgtttaattatagtttcggggttcggcgttcgttagttgtatttagaattttttttatcgtggttttgttttgtggcgtttaattacgtgtttttagggttttggagcggttgttgggattgtagcgaagaggggttcgcgttattttcgttaggttttacgcgtcggttttgagtgcgtttttttcggtcgtcgggaaatttagaggcgcggtttggttttaaggttttcggtttcgtttttttttgtttcggtttagttttcggttgttttcgggtcgcgatttattttttttggcggtttttgtcgtatgtttttgtgttgcgttagaattatcgagttttagttttcgttgttttttcggttagtaggcgttttttttagttggggagggttttttaaattttgtgtttttaggatcgcggggtcggtaagcggtaggatttttaagttgcgtttttgatgcggttaggggaggcgcgcgatgaaggtttttttttttttcgttttttttttacgttttatcgttattatacgtcgcgttgcgtcgcgatttcggcgttgtttgttggcgttttaagcggtttttttgtcgcggtgcgattttcgacgttaggaggattaatttttattcgttaggttttagattttacgtagatttagttatatacgtaatcgtttgtagatatttattatagttttttaagttaatttaaagtttcgtataggcgtattgtttttatatgcgtagttttacggttttatatatttattagtttattcgtaaataggtttatatggttatataattgttttttggatatttagttttacgtaggtataattttatatatatataatcgtatataggcgtaattttatttacgtagtattttacggagttatataatttttttataaataatcgtatagatatagttttacgtagcgttatattatttagttaaattgagatttagaaatatatttattagtttgtatttagatttttttttttaagtttcgtgatatttattcgtaggatagattagaaatatatagttatattgatatatatacggatttaaacgtatagttaagattttattcgtaggttcgtaagttattggaaaaatattaaagcgttttttttttttttttttttatttttgatatatatacgtttgcgcgcgcgcgtatttttatatttatatttttcgtttttaagcgcgtcggagtttcgtagcgggtgatttcgaggtttcgcggtgagagttaagggagcgttttttcggcgtttttttttttcgtttttttttcgagtttatttttcgttttttcgttcgttttttttttttttgtttttttttttttttttttttttttgagtttggggcgcgggttgcgcgtagttaagtttttttatcgcgcgttttttttcgcgcgcgtttcgcgttagtatcgcgtttatcgagtggatgcggttacggggtcgtttttaattattttttgattttcggcggtttgtgaataatggttattgagggcgttcgtaggggttgttaagaaggaaacgcggggcgcgagaggcgcggcgcgcgcgggagcgcgagggaaaggagcgagtttggggtcgttgtaagcggttggcgagagaaaggattcgtgcgagcgtttatatttgttttttttaaggattttatttggttatcgcgttttggaagaggcgagagggagagcgtgcgcgagaggagagagacggcgggggaaagggagacggcgagacgcgtagcgtcggcgttcgggagatttaggaggagttcgtaggtattgttggcggcggagttttgtgttttcggcgggttgttgtgggcgttagggtttttcgagttttcggttcgtcgtcgcgcgtagatttgttcggagttcggggttgtaggttggggtcgtcgttcgtcgcggatatttttttcgcggcgttaggattttggttggagttgcggatttgtatgtttgggggttttttacgttggttgagggaatcggttttagaagaaggaattttttttttttttttttttttttttttttttggtcgtttttggttatagtttggttgtgttggggatttttttttttttttttttttataaagtattggtgagcggttttgacgaatgtggtattggcggaaggtatggggttgagatggcggggttggtggttacggatggggaggcgagagatgttagagaaggaaggagttttgtttaagttcgtaatttgcgtttcgaagttggtcggatcggggagggcgattcgcgcgttcgattttgtttcgggtaatcgatgggaaatttttcgagagcgcggtttttttggggattcggcgtttttgacgtttttaggcgttttttcgggtcgttgcggttttttttcgtcgttcgttagcgtttaaggtcgcgttttttttattttcgtttttttttttttttcggcggttttcggatttggatagagttgtaggagtggttttaaatattttttttggagatttttttttatttttcgtacgagagtttgtttagtggtttttttgttttgcgttttagttttacgcgcggtcgagtggttaggttgataatgaaatttcgtatttttgtcggggggagtggggtggggaggaggttttttttggggttgttgattttgggtttcgggtagggggagggggtttttgggggaggggtttgttttggttagagacgtcgatttgggatggcgtcggggtagggagggggttggggggtgggcgcggcgaaggcggtaggtttgggttcgcggtcgggggtcg

SEQ ID NO: 6717 - DNA, 2567 bp, Artificial Sequence
  Description of Artificial Sequence: Synthetic polynucleotide
ygtttttaaygygggagygtagtgtattttagtggataaattygagaatygtaygttgtttttygtttttatttttgtttttttygttygyggttttaattygggatttaaatgtaygagttyggtgaatgtttyggtaggagggygagggtttagaggtagtttgtttagtaaaaaygatagttgtgttttggtgggttttgggttattttaggtagaagttagagaagttygagaatttyggygggttggtaaagtttgtygagaagggtttttttggatatttttattaygggttttaggttygaatttttttttttatttggttttggagttttagatatagataagtttygggygygtyggygggygtatgtgygtgtgtgtttatagyggggtggtygtyggagttttttaagaattttagttttttygttttagttgttygttagttgtgagygttygtygggttyggaggttattygtaaatagttgggtyggtagttgggagtttgggaggtttttgtttagtttyggggtttygagaaaggagaagggggagyggagtggttgtttggttgtggttttttttaatttygtttgygaagttttygttgggagttyggagttttagtttttttyggtagtttyggttttygygttygtygygtttagyggtyggygtttygtttygggtttyggggaggaggygygtyggggtagtyggttaggatattgygttgttggtttttagagttgygggygygtttggtyggttttatttttygggttgttggggygggygtygttgtttygatttyggaygygyggaattttggagattyggtygtttttygttagggtygyggtgttgttttaggtttygggygggygttttttttyggttatyggtgtatttygttgttygtttgygggaagygaagaggggttttttgatttgtaatatagaggaaagygtygttttygtttagtttggtatttaygygtttataygtattyggygtyggtygggtygtttatttgagttttaaaagttgttgaatttatatggttaygtttyggggagyggggttttagatttggttygtttaggttatttgygyggygttygygttygttygttttygtttygyggygtyggttttyggttttyggttygtygtttttygtygttygtyggtygyggggygtatagygagttagagygyggtygygyggggttttatgtyggtyggygygtygtygtygttggggygtatggtttaggttgggyggttygygggggygtatatttttyggtyggggygyggggttygyggtttttttygtyggyggtatagygaaggyggtagygaggyggggygtgtttyggygttgtygyggygtagtaaagggttggggagtygyggtttygtttttyggggyggygaggagggaggtyggyggygttgtygtttayggtgygtgtttttyggygygyggtttttgtttttagtyggagtttygygtygatggggyggygttgtttagggtttggggtgaygygaygyggayggaygygagtttttttygygttgtygggtyggggggttttgttagaggtttygtygtygatyggygttatttaagttgttygggggtttygtttgagygttygttttgtagayggtygyggttyggagattggtaggaggygggtaygagaggygygyggggygagggygtygtggagygyggggygtggggaygygyggyggyggygtygygyggaggaggygygyggggatttyggggtttygtygttygygtttatygygttygtygtagagtygttygygttgtttagtygttttttttttygygtttgttttttygygygttygttttygtttttyggagtyggttttaatttygttygttyggttyggtttaygttattygtttttttygtttttygaaygggagttygagtttttggtttggtttyggtttttgttygtygttttattttgygggggtyggggtygtygygggtggtggggggygttgtgtttagtaggggygatagygtaggyggggttttttgtagtttttttttttattttyggtygygtttyggtttttattttgygaaaggttygagagaggtygtaggttaggattggatygtygggygtygtyggatggtgttgttagggtaatyggatggtaygygaagtygttygaggtttygattyggttaygggggygtttagtggattyggagagttattttggggagggggyggtttygaagaaggattgggtgggggygtatggagygggggttgygygaaaagttttttggggyggagttgagttaygygggtygygtaggagygtttgttygagggtygtttaygagggatttttttgttyggttgygygggtttttgygttgatgaagttatygygtttygggtyggagtttyggygtttttgtttygaatttagygaagttyggttttatgtttttaattatttaayggttttttatygtttagygt

SEQ ID NO: 6718 - DNA, 573 bp, Artificial Sequence
  Description of Artificial Sequence: Synthetic polynucleotide
ygttgttygtygggtyggtggygtttatttygtatygygttgtttygttyggggtattatggtttggggttggattatgttttttttattttagtyggygttttttatttaygygygttgagggtgyggtgagttgagtgyggggttaagtatgttttggygtygatttygtttaggggtttaggatttggygtttaaggggttttttggygayggagattttygaygtagtagygattygyggttgtttaagttgatttygttygygtttygagyggttttgggygygyggggtttyggggattggaggatttyggggggyggygtygygtggtggtyggaaggggaygttaagttyggggtgggygtyggaygtttttygtygygtttgttygttttgtttatygygattyggygggtygtgyggaagygggggttgttgyggtttttgttgtygttttttttgttgtyggtyggygygtttygggaatyggygtttaggtagttagggtttggagagygygagygttttyggaggygygtggttagggaggatttygattttttgggygt

SEQ ID NO: 6719 - DNA, 383 bp, Artificial Sequence
  Description of Artificial Sequence: Synthetic polynucleotide
ygttygtyggtttttataggggygaaattaggtatttatygtgayggygagygtgatagygttyggttygattttgtttagatgtttatagaagatggagttgaygaggttgattataaagattattaattgygtaagaaattgyggaggygyggaaagtaaggygygtttatagtygtttttttttttggaagttygygtttatttttgygyggyggtygtttyggaggygtygggttgggygtgaggaygtygtatttattattgggttygygagygtygttagtttagtygttttttttygtaggttygggggtagygtatttygtaggttttataagtygttaygttattygagggttyggagtygttatgggggtygg

SEQ ID NO: 6720 - DNA, 853 bp, Artificial Sequence
  Description of Artificial Sequence: Synthetic polynucleotide
yggygyggggtgaggttygggggtygttttattgttgaggttyggtyggttggggtygtygttaggygygttggttgggtagtttttgggagatgaagygaygtaggygttttaggtattggttgtagagttygatgtygttgtgttyggygttttttatttatagyggttttatygttttggggtagygttygtagagygttagttygtgygagaagtygattatttygtttttygtgtygtggatgatgagtaygggygaygtgatttaggatattttttygatgttgygggaggggygtggagygggtgagatttagygttyggttygggtttygtttygttttygttttygtttygttttygttttygtttgggtygtttatttagggaaggygtygaagtagtaggtygttttggtgttagggaaggygaygygtatgttygaggtgagyggygagtgtagtattatygyggtatattygtagygygaggttaggtttayggtgggtatygtgtygatgttttgtyggtataggatgatgttgttygggttgatgtygtatttggtagygtyggagtagggttagtygyggttttygaygygygtatattttttttattagygggygttttygggtttagtttyggatgygattttttagtttttttatttagttaagttagtgggttaggtttaggttttatattagtttygagggttatttttagtttttaatatygyggyggtgggygaagttagyggtttygtttygttttttgygttgtygtttattggygttttttagttaggatttgtagggatttygtttayggagtgtttttggggygg

SEQ ID NO: 6721 - DNA, 1062 bp, Artificial Sequence
  Description of Artificial Sequence: Synthetic polynucleotide
ygaggaaggaaggtgggygtagaagttattttaggygtgaygygtgaygttyggggtaygggygtyggggggyggaaagygagggttyggttgggttagggatattyggggggggtygaggttttgggtttyggyggagggaggggattgggagggaggttatygtttygggttaygygggtgattyggygggggagttgggggaggggyggyggggttgggttggggttttygggtygggattggggtygggttagtttattttttygttttggtygaagygtagttygagygtygygaygygttttaygygtaggaagtygtyggggtygyggtygtatatttygaatatttygygtaggyggygtayggagygtagtagagtygygggggygttygattagttygygtygttygttattygggtyggttygtagtttagttyggatttttygttygtygygttygtygtttgttygtygtygttatygtygygygtttttyggggtygttygtttgggtttgygtygygtagttttygttyggtggyggtygyggtygattygtgttagtagyggygtygtagttttagtygttttggaggggaagggaggggaggggagggaaggagaagagtggggaggggaaggaggaggggtaatagggggyggggaggggaggggygggggtygyggygaaaatgggagggagagggggaggyggygggggyggyggyggyggggaygttgtagataaaaggagttygygttttttygagtggggyggtttaygyggggtyggtaggygtagygagttgttaayggtygygtttttygygattttagttttttttygygtttttagttttttttygygttttygagtttatttttttttttggatattyggagttatttaaaggttttgttttgtyggaggatttygyggggtygygttttttttygttattygtgttygttgtygygtttggygtttttygagygtttaggatgttttgggggttttttgtattggygygtttygtgattgtatttatttygg

SEQ ID NO: 6722 - DNA, 918 bp, Artificial Sequence
  Description of Artificial Sequence: Synthetic polynucleotide
ygygaagttttygyggyggagagygttgygyggggagataaagggaagggatagggatygtagggatagggataggagyggttgtygggttttgggttttygatygttattagatatgttttygagtagtygaggtaaagggaayggatgggaaaggaaaatagaggagyggtttagaagggyggttygttgyggtggtggggygyggattygggaattyggggygggtagggtaygggygtattttttttttttttttttttygttygaggtyggtagygtttttygtttygygttatgtatatttattgtggtgatgagagttygygtttygtgttygttayggttattgtgygtttaataaaaataaatattgtygaggagtygtygygatgyggggyggaygygyggttyggaaaggggagggggttttaggaagagttatattygygagtygggtttgggttaggggygaggggagagygttaagattgtttygtygtygagggygtygatggaggtataggggttttygtggggygtttygagagatatygtgtttggtyggygggaygtgggttggttttttattygayggagagaagyggtatttttattttygggtatygggtttgggtttygagygggggtttttggaatataaggtagtgggggtagaygggtttgggtttattttaggttgggaaggggtttgagyggggygttttgattggattyggttttggyggatygaaggttttaaaagattttgtatttttaaagatttttgtagatygttatygtttaaggygttttaggttyggttttatttatgggaagggtaggaaagaaagttgggagygttttggggygyggggtagagatagyggtgttggaggygygttgtggaggyggygg

SEQ ID NO: 6723 - DNA, 865 bp, Artificial Sequence
  Description of Artificial Sequence: Synthetic polynucleotide
ygagttgtgtyggttttygygttttttttattttttttttttttyggattttygttttttygyggagaggttttgtygttttaagagtygggttagygattgataagtaataaaygttgagygttyggttgygttggagtygttyggagttaggggtttttyggggygtaggtaggygtttttyggttttygggttagtttttattttaagattttygtttttttttygttttgatayggtatttaggattttatttattgggtttaaattttataggttttttttatttaggttygttttttttttgtttattygttttygtttttgggttttttttttggggtgttggttgggagaattaagtttygttgtttattgatattggttttygtttttgyggtaggggttttaaagtggttttaggtattaaggtggtgagttgtgaggggtttyggtatttgygyggttttttygggggttgtgygggttgggggtatttagaagttyggtattaygtaagaatygtgttgttagygttttygggggttggggagygagatagaggttgygttgggtttyggtggttttttggtttttttaggtagttaatattataattttttttgggagggggttygtagaagggygygygttgtttttttygttttttaagttgtagyggggygggtygggagttagggttagggtttggagatttgggaggggatyggtgttagaagygaagagttagggttagaaagttaggttaattaaggggggggyggtgyggataaagayggggtgggggttggtyggggtagttatttagtgattttatttttggttttyggygggygygtaygt

SEQ ID NO: 6724 - DNA, 408 bp, Artificial Sequence
  Description of Artificial Sequence: Synthetic polynucleotide
ygaagyggggagaattyggttgggttgayggagaygttatatygygttaggggagtaggagttttttyggagygggaggyggggygtygtgtggttgygagygygttttttggatgtttyggtyggygygggggtgggtgggygttttygttttatttttggtttygggyggttagtygyggtgtgttyggagggttttgygagggttgtgggtggygggygagttttagyggygtagtagaggaggggttttygagygagygtattagggagaagggggttygtgtaaattttaggttgaygatygygtaygygtttttygggttattagttttgtygtttttggtggggtatatygaggagatygtygtggggaatyggggatyggattgtttgatagtygagygt

SEQ ID NO: 6725 - DNA, 2245 bp, Artificial Sequence
  Description of Artificial Sequence: Synthetic polynucleotide
yggattttgyggagtttygagtttygggtgaggygatgtttagattggygygaagyggggtgtttyggtagtagygtagaggtttattygttttttyggtyggttgtagygggygygtttatattttgtaaaattaaaaygttttggaaagygtttggggttgtaagtgaygtttgataygagyggygggtyggattgtyggtttttyggtttttttttggtttatataattygygggtygtttttatygtttaygaattttagygggtagaygttggaygtgyggtttggttatttttttaaattttagygttygattygygtygtagggtyggtygygtagygyggggatygygggtgtttaggttyggagaaygagygtygygtttttagtygyggtyggggaataggaattgtygttagaggtatygttttttttttygagattgygatattgattaagggttygtaggygygggyggtatttattttttyggattygtagttygtygyggaggggaaggggtaggaygygtttttaagattagggygggggygtgyggagtyggggagttgtttgggggygttggggygaggtgggaatttygttttagagtttttagtttyggggtygaggtttgtaggaagggygtgggaggtggaatttttttttttttaggygtttgttygagagtttagagygatttttggygyggagtyggttattygggtgggyggattttttttttygttaatatttyggyggtttygttaygatttttttttttatttgagtttttttttgtttatttaattttggttttaaaggtttagagagttaggttgtttyggagtttagtttttttygatttaagtayggtttttttagygttttygtttttattatatttatagtttagtttygtttygygttygttaggggtygggggygttagygttygagggatggtyggygggttgttattttgaygagayggagttgygggtgtttttttattttygggttygttyggttatygttttgaatgttygggttttayggatattttagagggatyggygggyggttgygggttygggyggtayggggtgggyggtygggtttttyggtygttgtttggtgaggagatgttyggttyggygtttttyggtttygyggttyggttyggttyggttyggttttygttygttttttttyggggaagtttggtygtygtttttygaygtagttyggttygyggtygttttttgtyggtttygttttygttattttttttayggttygygtygtttttygtttyggtttttygttttttygtttagttygtttttttttttttttttttttttttttttttttygttttttttyggtttttttttygygtttygtttttyggtttttttttagttttttttygtttttttygttttttttttttttttyggttygttttttgtgtttygtygttaggattttttttttttgygttyggggtttgyggtagttttyggggygygttggtagtagtggyggtygtygtagttyggggagaagtygggaatgggggaagggggtygyggtaaaggattagtttttygttyggtygaggtyggggtttgggaagttttagggatttggggtgatttgggttagggtgtttaggtgaatttatgagggygaggttattgggggttagggaatagggyggtttttattgagyggagtygtygyggaatttagtgaggttgygatttgygtttgggtagttttygttttgyggttggttaggaggagtttttygtygtttttattttagtygygtygggygttgggttygatttttagtatttttggtattgatgtgtttggtgygygttgagaygygaaygttttgtaagatgagtttttatttattygtttttttttttttttatttgtttattttataaattgagtgtttggttattttggtttaggtaagaggttggatttgggaattttttggatttgggagttttaggatgaaagggagayggyggtgttttgtaggataagygggtattgaaygttgtttaggggaaagtygggygygtattgygttgtagygyggygaaygttgttaggagttygygggtagggygtggggaggatatagygttttttttyggtyggtygagttttttgggtagyggtgggttttttygttagatttyggggtygt

SEQ ID NO: 6726 - DNA, 2972 bp, Artificial Sequence
  Description of Artificial Sequence: Synthetic polynucleotide
ygattattttygtttttttaygyggttttttagggaagaagygaggygtttgagttagattgggttggaatagtgyggtaggggttygtttttygyggagttgtttttttatttattatttatttagtttagttyggtygtttaygtaygtttatttgttgttttygttttatttttattaggygtattagttagttyggyggttttggttatagaygtttgaatgataaagtgtttttattatyggygyggttygttagtygattygtygggaygygttttggttttagtttttttttttttatygyggtttaggaagaaattyggatygygtatagttattttagatygagtagtygygygtygaggyggaggygggagtygtaggggttgtagayggtaggtttttgtyggggtatatttttttaagygtttaggttttttaygtttagtttttttttttttttgggttttygygyggggattttygtttttgtttagattyggagtttaagtygttgtttttttgggattyggtttttttttttygtttttttggtttaygttygtttattygygtttgagtagygtttttaattagyggygttagttagtagaygtgttygyggtygtttttaaattttyggaygtagttataggttttgatagttttagggaattggggttgagttttygggttggggttygtattyggatagaatttttgtttattttattygtaggttttatygtygayggattttggggatagtgttaatttttttygttttgttgggaaaygtagtygtgatttygagttgggatagyggttgttttttgaaaaggtgggggagtatygagttgggaattaggtyggggagtttagttaygattttggtttaatttgttgtgagattttggttaagtygtttaaatttttagagttttagttttygtatttgtaaagtyggaatttggggygtagtgttttgatgaaagatgttggyggggagagtgaagaygtttttttygttgttagattttttagggtattyggtttatggttataaagtaggttatatttgataatttygtyggattattyggaggattygtygatttttgtygagtyggtggttygggatatygygttatagaattygaggygttygggygttttygtttygttaggtgtttagyggtttgtatygagagttaggagaggtttagatyggatttygatttttygaggygygggagtttayggagygyggtgggygyggygttygggtygygtagttaggtggggagyggygygtagttttagattygtaggtaggtagyggyggattgtatttgtttygtttygtagygttttttgtttgtygtttttygtttgygtagttagagttgygygyggttaggaagggttttygtttagtgygtttyggygttttgtatttygagaygtagttatygttagttygggtaggggtatattygtttygtttttygygattygttgygttgttttaagtygtgagaataygygygtyggaggagttygtyggtygtgggggaatttygggagygggttygtttyggygaagtgggtattttttttttagttttagattygtagttttaatttygggattgggagaggtygygagtaggagygyggggataggygttggaaatgtttaagtttttgtttttttttttygttttattgttttttagygggtaggygggatttygattattttagggttygygtttygttttgttttttttttttttgtttttatttttttgtygttttygtygtygttttttttttgttttttttaatttattttttaatttttttttygttttttaattttttttttygaygttttttttttttattgtttggtyggtttttattgtttttgtygggttttttttgtttttagttttttygattttttttattgttttatttygtygtttygggtttttygttttagtttagttygttttttttatttttagttttygtttagttttttttttttttttygttttggttttgttttaygattttttagagatygagatgttgaggggaaagttttttygggatttyggtattygagtgttttttttygaagaatttgggtatyggagagttttatgtttttttttgaaagattttttttagtttttttatygttttttgyggtatttgaggatyggtattygtgtttyggttttgtttttatttttattttggagagtygtttttgygtttygggaattttagattttttttygtggtttyggtattagaggtttttttttattatttatttttagtatttgggattttaatgttttgttttgtttttttggtggyggygttyggtttttttyggagttttgatttygggaaagggagygggtttttttyggttaatatttatttttagaagtagtaatagtagtaggygyggttygtttatggygyggtyggtggtatttgtttttatygttygtttttygyggtagygttygatttttagttyggttygttttgyggattgatggggttgygttgygttgygttttagygttttttttgttygtyggagttggtygyggttyggttygttttggttgygggygggagaggttgggtgaagttagtgttgyggtttygttttygtttygtttagttygtttattttyggaatygygttygttygttttgtygtttyggggtgggaagtagaggtaaagggagggygtgyggtttttygtatttygttgygtttttttttgttttgttttttagagttttttatttatttygttttggtatttagttttyggttygygttattgygygttygtttyggatgttgtgggttyggggattagggygtttttattgyggtttttgttttttttyggttgyggttygt

SEQ ID NO: 6727 - DNA, 1026 bp, Artificial Sequence
  Description of Artificial Sequence: Synthetic polynucleotide
ygatygttygggttygagtagygggggygtttttagyggyggtaggygygggtgygggggagaggagtagaaaagagagtagtttgaggggtygagggagtygygttygaggtyggygyggtggggatygygggtttattattagttaagtttagttatttaattatttgtagagttgttgtaggtataggtttaggttttygttttttattttttygygggtgatgygttttgatagyggtygygggagygggggtaaaggyggtagttggggyggyggyggyggtayggtygagtgtttyggggttgtygtygtygtygtygygtttttttttttttttttatttttaatygtygtttttttttygggtttygggttttgtttttggttttttttttttgtygyggttatygtggtygtttttttttygggtttttttatygaagtttyggtygttttagtttttattagtttaggttygggttygggttyggattygggttygggttygggttygggttygggtttyggtttyggttygtygtygtygtayggttygygaaattygtttaggaatagttttaggaagygtyggtaagttttttttttagggatgtagtyggttatygttgtttatgttttagggtagatygggaaaggggttgggggaagtttaggaagggtaaggggttgtttttgagtttagggtttyggtaagggyggttaayggtygtatyggtaygagygattagtattaggttgtttggagagggttttygtaggygtgygygtygtygagtatygaygtgygyggttygggggyggagygygtygtttttttyggatttggagggaaagttggtggygggygygygtagggtttagyggyggtttattttttatttttayggagagtttagtttaygttgtttagagattgtygttatggtaatyggttttaattaagtattgtagggtttttttygtygagttygyggagtttaaaggatattttattygttygt

SEQ ID NO: 6728 - DNA, 10207 bp, Artificial Sequence
  Description of Artificial Sequence: Synthetic polynucleotide
ygttggtttygtygttagttttttgggttttttttttygttggygttgtygyggggttataggttttatttgagatgttagtatgtgttgggagaggtggaaygggaagggygyggyggtgtttgttgygttggtygygggatttagttygtttgygtttagtttygyggyggttttaggttygttattttygtygttgtygtygtttgttatygaggttagtaggtgatttatgtttatggyggagaaggygttagggtttatggtgaattgtttagggtgtaggaagagyggttggtyggtttttagyggtttaaagaattgttgttygtgtaagtggttggaaaaggttaggtygggtaggtgttyggygtttaggggggaygtattgtttgtttgtattattagyggygttaggttttgttttttgttttyggtygtttttttgygtttttygtttttttttygagtttyggygygttttttttttaggttttttaggtygaaygggtygttttygtygttttyggtyggttttttgtttttttygggattaygtygttttygggygygttygggttyggttaagygagtggggttggygttgtttggagtygggttgyggtttagyggygttttygtaygtttttygtttaatygtttaggtttygggtygttgttygyggygtaygatttttttttagttgyggggagagggygygyggattataggggtttgggyggaggtygaygagtaggattagggatattygggaagggttgttttyggggaggttgagtyggaggagttgttggagtygggtaaagggtagttgtaggttatttaatttaagattttagatttatagtggaaggaatttagttttggagaggaaattttatagttatagaattatayggygtttaaggggttaggttyggagttyggtyggattttttggttatyggggatygttttygtaggggagtttygggayggaaattttattttagatattygtygaygttttttttttggttttttaggttagygggtggtttagtaaaagattagtttagygatttgaggatttttygtygttatttttttgtttttttttyggttygatttttatttygggttyggtgtaggygtagyggattgggygttgygttyggggaggtgggtggttttygygyggggggagggtygtaygaygaggygtttgatttygygttatygygttygggtttgtagtgtttttygtataagygtagagayggtagygttagttgttttttggggatgagyggatgaattaggttagyggggagtttatttttttattttttttgttygttgttttygygggtattygttatagggttgttgttttyggttttttattttttttttygtyggtygttttyggtgtttyggaagtttttggtaaaygggttgttgtygatttttagttgtgtgatttgyggggattaagggggyggygttaagttaggtygtggtttttttagygtggtyggtggtatttygaggttagygggtgttggtygtagagggaagattyggggagygtttatttggtatttattygtttgggatgggaygtttygagttgaggtyggtgggagggtttygyggaaagygayggggtttgttttttaaaagttttattygaggaattatttttagataggtttagatagttttatataggtttaaagtagtgttatagtgtyggaattagtttaagtatgtatattygttygygggtttgygtaagttaaaygatttygtattygagtaggygygaatagagattgtagtttataygtaaggttgtaggtatatataaagttaaattatatttaygggttygtatataygtaagtgtgtatagatataataaaygtttayggaattaaaygaatttatatgtttttataggtatttaatatattttaaayggggtaygtatagtttagygtatattttggtttataaagttataaygatyggtayggatattygtatttttttttttattygatagtggygtataagggtataggtttagaggggtgatgttttgttttattagaataagggtggagaagtygtaagtagaaaaagttttttgattggaaggtaattttttaagygttttttaaggggtttggggtttagattgatttagagtagtagttaggagtgttttggggggttgtgttatttgttttattttttggtttttttygagagagtgaaaattgggtttygggttttgagtatyggtagagtttgggtagattgtttygggygttttttttttatttatatttttatttttgagttaagaaataaaygaataaaatgtaaaaatgttagygygggttyggagttttagttaattgttaagtaaatatttttattagaaygayggtttagttgttygttygttttaggggagtttgtgtgtgygygyggtgggattgagagggygttttgaggattttygtgagtgttgygygtatggatgygaggttyggtgttygggggygggtygtaagagygyggatttygtgtagggggtttygaggggygatgaayggayggttgggtttgtaygtgttgaggggygttagtgtaggggtttagtttatygttygtygygygtattttgttattttggtaggtagtgayggygatgaagtyggttttygggaataygtaggtgyggaaggtgttgtaaggtagttttaggatgtygttggttygtattatgtggaagygyggttggtatttgtgtatggagtttaggatggtttgyggggagggtgggggttagtyggtagttattagtttyggttygagtttttttattttttgggtatttgatttttttttttttattttttttttttttttttttttttttttttttttttttttttttatyggtttttttttttttttatttttttttgtttttgttttttttttatttttattttttttttttttattttttttttygtttttttttttttatagttttttttttttttgttattaaaaaaaattttttagttggaaatagaaatgagatagagtaaaaataaaataaaataaaaaataaaataaaaaaattaattaaaaaataatttttttttataaaagaaatttaaataaaataaaataaaatagagttttataattttatttttaatattttttttttttttggtattggtaaattttttaattttataaagaggagattttaattttygggggtttattaattgttttattttagaatgggtagttttttttattttatgaaatattattttygttygttggggttttgtttaggtataaatggagagaatttttaaattttttttttttagttgggtatttgtttgtgggaggagggaaaggttttagggaggttgggggggtgggtggggagggtggtttaatttttaaattttttagttttgggggagggttagggaygygggttttggtagaagggtgatggataagttgaggttatgggtaggttttttaagttyggtatttataggttaagagtagggtgattttygtggtttagtattgtagatttagttttggtagtatttgtttttttattgayggtataagggattttttayggtttgaggaattgagattgtgagttgttagttattgattttattattttttaggtttgtaaaggagagygttggggtttaggtttaggtttagtttaygtagattatagggtagtgattygggtaggggtattttgggggtttgtttagygtttttttttgggagattttgtygttttgtttttttgtttagttgtagtgttgggttaataagtttttgtatygtttttattttgttttaatatttaygaagtygtgtttgttagagatgttgttggttagttttagtttgtggaaggttataggtttagttatttattgttttttygtggttgggttgtttgggtggatgtatatgygtttgggtattttagggtyggttttgttygttattatttagygygagttgtggaatttatagyggtaatygttagyggttataatgtttattagtaggatatatttggtttttttgtttaggtygttgattygtattttgaagggggggaatattygtttgggagggagggaagggaggagattttattggaatyggttgttttaggttttaggattttattttttttttatttattttttttygttgygtatatygttgtygtttggttgttttttttgtggtyggttgttttgtttttttattattgttyggaygattttatttgtggttgttgtttttaggagattttatttttgtttgttagatttttttttaaatagttttttttaggttttgtgtttagatttggggattttttttttttttgatttgagatgaaagttgatgtttaggagagaagtttaggttttttagaaatattttygtttttttttaattttttygaaattygtttaggggaaatatttatttgggayggaagtttttagaaataaatttggagggtgtttgtattgggaattgggttatagagtttgataagatattttggtygtgtagttygggggaagagggtgaattygaggtttggattttyggtggttgagtygaagggtggaggggtyggggttgtggttttttttaggttttaaggtttggggyggyggatgygtttagggttyggatgttygyggtggagaaagggtttttagttyggtgaggyggagggttyggttgattyggggttygttgttaggaatygagtaattagygtggggttagttgggtttaggttttattaggggtttyggggtyggagtagagtttgagagaggttgaatttttttygagttyggagayggattyggaygtagaagagygagagygyggggyggaggagatygttagggttaagtygyggggttttttttgygttgggatttagaayggttggggttattttttagtagtatgttttygttttattttattyggaggattttagygtttttgttttaaaaaaaaatygtttyggtgttaaaygagaaaagttaatttggttgttygtgggagygaagygtggygttagggttagaatttggagtygggagtygggagtygggagtttttagttttgttttgattygtgtagtttygtgttttagttygttygttygttygygygttttttagtyggtyggtagttttatttttyggatttggtgatgattattttygtgtttagtttgtggaattggttttatagttttttggtttttagygttattttggggtygttttttatttygttttygggttttaggtttttgagggagygtagatgygyggygggygggtgygggtttagtgtygagaygtgtagtttygtttyggtygttgttgtygtygtygtygtygyggtygtygttttygttaggttygggtygggtagyggtttggttagygygtygggyggtagygygagtgtygggaagaaggagggttgygtygtygttagaaaggyggatatggggaagtyggygggtygtggygygtggaaygggtggtaagttatggygttggtygttagygtyggtttttttatygggatattyggtttaggygttygggggtyggggtyggggtygggggygygyggttyggattttyggttygggyggyggygygygyggtggayggaygattygggtggygggygtagtagttgtttttyggggtttttygttyggygtatygtaaggggtattyggttttgtgygygggggyggygggggttttgygyggggtygggttgggtygggttgagttggttygtttyggygtyggggattaygygygattggttagattttgtygtgatttttggaaaattgtgattattttatatgttttgtttagttyggattttttgygttaaygagttaggttttttttgattgttgattttaygttttttggattaattgtgggttttygggggyggggttttgatagtttaggttaagtttyggtygggagggggggtttgggagaaggtgtyggaagttttagtagtaagaaaatatgttaatagaataaaatattaattaatgaygggtygtygggtttygagatttttttttttgtttyggtttttatygttygttygygtttgyggttgtttgygtyggattggagagygyggagggtygatttgattygtygaaagggtttgaggygaggggagttygggtttyggggttttggggaaggattygtagtygtaygtyggttttaagtgtaaagtattgataygatttygagyggagagggggygttttttttttttygygtttagaggttyggtygttttggttygagttttagtttggttttygatttagtttygggtygtggygtygtttgggggtttttgygtttyggaaagagatagtaggtattggaaagygaggtyggtgggygggygagtygggaggttygggyggtygaggttygggagyggattttaggtggygggagttggtgagtggagttatggtygagttttgttggggtyggygygggygggagygggaygyggttttgygttggggaaaygyggggattttttattygygttygtttttatyggaagattyggaaggaatttggagtttttygtaggttygggtttygttttgagttttttagyggtygggaggagyggattttyggggttaggaaggtgagygtatttttygttgagtatagggyggtatygygygggyggatttyggattttttattygygatttaaygaattttygttttattyggtatyggagaygaaagtttttttttttygaaatatyggtttttttttttygttttgttaattatttttttagtttttttttatttttyggaagygtaygttttttaagttaaggagtgttgagtaaygygtgagggagttggggtgtttgygagtatttgtgattgaagtttttttttttgtgattagttttygttttttgtttttyggtagttttagttttttttttatgaagtgatggtgtgtgtgtgtgtgtgtgtgtgtgtgtgtgtgtgtgtgtgtgtgtygggtttygtgtggtgttttttgtgygtagygagagttataatttaaggtgtgtayggggagagtgaagygattaygtatttgtttttaatygggttygggygygaatatttaggttgatttttgaaggtygttttttgaaggaaaagatagagtatgtattagttaygggtgatatttttattygtataatygygtggtgggygygtatatttaatattgatttatgtaggygttygtttattgygtatatyggtygtagggtatttygttgttgaaygttgggagtagygtttgaaggtyggattttttttggtagtgyggattygggatyggyggaagtagtatggtttttgygatygttatttttatttttyggggtygattttagggtttttataattttttattatygtatatgtgagygtygtttttatagggttttttttaygatttygtttttggttaggtygtattttttttagtattttttttttggttagaaygaatttttgatttygagttgygtagtttaygtagayggggtaggatttattgtagttttttataggtaaatatttgttggttttattttaggygagatgtggtttttyggggagggattygttgtggataygtttgygtagtyggtgaggtgattagataataattagggtagttttttttagtygggaatttaggtatyggtttaggaattygtgaatatattygtaaagtygygygygygygygygygygtgtgtgtgtgtgtgtgtgtgtgtgtgtgtgtagatatatatttttgtttttgtaagagtatgtgtatatttaaatgtgtgygttttagatattagtttattttattagtttatttatagttggtttaggggttygaggtttgaagagtttgaaatatttaggtttgggttatttgatygagaaatttggyggygatagtgtagyggttgtatttggggayggygattttatttatagtggtatygattttttttttggtttttyggggttttgttygggttaggattttattattygtttygtttygyggtttygygattattttgaggttttgttgtagtygttttgaagagtttgtagygatttttagttaaattttttagttaggaatgttygaggtttatygaaagttggygttggggaggtttgggaggttttggagyggygtygtgaggttttygttgggttttttttttatttaggtyggttttttttttttttttaggaatttttttttttggyggagtttygggggtygagtgtgygtgtttttttaagaggtttyggggggygtttygygggtygttyggggttggagggggagggygygggygggggyggttggygttaggyggtygaggttttataataaagtttyggtttttgttatttygtatyggttaggtttygtagataggygggggaygygygttyggtygtttttttttttygtaggyggttttyggttagggygtygggygggtttgggttggtggygygyggtttgtgygtttygygtttttygtaatagtgaaatggggygggagyggggayggtttgggtygggtggggtygyggttttgagtttggygtggttgttttttygtttttyggtttygttatttttygtagggttaaggggtattgttgggatttttttygggttgagtttttaggtggtagggggttttygtygtttttttttttgtgtgtagggtyggggttgygtgatttygygggtagtgggtagtaggaagttygggttgtgyggtygygtggtagagyggaygayggatttgygttygagtgayggggygygggttgtagattggtttaagttttyggtggtagaygaatgtgtttaggttaagtttaggggaygtgtgtggtttygtgttatgggttygttgtgagggtgtygttaggtygtygattattgtttggaygtgaggagtgtggtggtgaaggatattttttggatagagtygttttttattayggttttttygtyggatygtatttttyggagttttggygttagttagttyggtttagyggtyggatygggttttttygyggttttaggtttggttggggtgggggtygyggtttyggtgattttagttygtagyggttyggttygtttygtttatttaaataaattgtygttgataggygygtagtttttttggagtygtygttttttygtygtttttttttygttttaattatttygygtagggtggggttaattggttgggatggggygggggaygyggggagagygggyggttygatttttttttggtygyggggtggttyggggaagygttttygtagttayggtttgtgtggtttygtttttggttttttygggggatgygagggtaaggtttagtttggtagttgtgggttttggaagggygtygttttgtatttaagggygagattaygyggtygagaattaaggtygtatttyggatggatttygggtgattttttyggagttttggggaattttttaattyggggagttgtagaygatttattggtttygggtygyggtttygygggtggtygttgtaygtttgagatatttggttygtagaagttaggtgtaygtttgtgtatygtygtgygttggatgtgtatggaggygagatygtggttatggatgtttgggattaygggagygtgaayggggygatygattgagtgatttgagagayggggtagagygtaggaaggatttttaggaygggtttatttgygaygggyggyggtgggggagtggggggtttgtyggygygtttataggttttgggttygygttyggaaaygttttygtagggagygggtygggatttttyggagtagtayggtgayggygtgttataattygggttttagttgtgtygttttygt

SEQ ID NO: 6729 - DNA, 2392 bp, Artificial Sequence
  Description of Artificial Sequence: Synthetic polynucleotide
ygaggygtatttgtttygagtgttaggtttggggaygyggtttyggagaggggagaggggttygggaatgyggygggaggggtttygaggggtagygggtygggtygggtyggggyggaggtggygggtttyggyggggygggttttygygggyggyggtgagagttttygtatagtyggttgygagttttgggagtaggaggygyggtgygtagtttagttygggayggagtygggygtygtgygagtttygggagggtygyggggygtaggggygggtyggggttagyggattaggtygygttattygttttygttttygttttgtygygttygggtttyggygttygyggagttgagattgagygygttagtttttyggggtygaggttttgggatagatatygygagggaggyggtyggygygggttttygtygygggygtagygtttttttttttyggtaagtggygagyggygggygaggggtattaatttygtygttaatttggggttgggttttygyggygygygagtaaggayggyggagatagaggygggatattyggggggttggatttaygtaggattttyggggtttaaggagggggyggttggaggattyggatttttaagaatttggttttgggttttgattygggyggtyggagagaaggygaagaagaggtygagtagataggygygyggyggaygygagagaaggaygygggygaagygtttaagaygttygtttttagggtygtygagttttttttttttttygtttggygyggtagtatygygggattaggggagtttgggttgtygyggatttaaattgttgttgttggaagtygtyggggyggagagyggggaatagggtygggagtgggggtyggggttgggatttattagagygaggggttggaaaggagtygagaaggtgaaagggggttgtgyggttttttagtttagtgttttagtttttttaggtttgttgggtatttgttgygtattygtttyggygtttagattttttttttygtygygagtttygttttttttttttttagttttgttttattttttttgttttagtttagtttttttttttttgygatttgggagaatyggagtgggtttttagagtagtggtattttgtagatgttggttygtgttyggttttygggtttttagagygtaaagggaagggtaggtagagagggtattgggygagtaagatttggygttgggttttggttgygtattagtygtttgygtyggtttttgggggtttygtttaggattttygayggyggggaggggaagtttygagttttttgttttttgtttaygygggtagggyggggataygyggagtaaaggtattyggtaatttgaatttttaggtgygtttygygattttgtaaggagttgttgggtgagtaagaygggaattttygttaggttttgatgtttattttattygtttattyggttttttagttttggtygtttaaggggatttttggttyggttttttagttttyggatggtggygttattttagtttagtttttgatttygggttataggaaaatygaggaaagatatttatttggggagggtattatttygttggttgtattttagagttygtttaggttttggyggtgttagtgattttgagtttgtttttaaattttygaagaataagagygtgttaggggtaggtaggtaggttygggatatttgggttygtttagggttttygggygggtttgggatggtattggggtygtttgttaggttggtttggtttttttattgygggattyggggttaygatttagtttgggggagtgggggtgggggtttyggagtygyggaygtyggyggggggtagygtggggyggggggygtygggtgygtggtgtttagtttggtygttaggaggygtggygygggttttygttyggagtygtygtygtygtygtygtygtygtatygygagtgtttttgagtygygggtgayggtggttttygttgttygygtttttttttttygyggggggagtttgatgttaygttttttatgaattatttatygtyggtttaaaaatatttygaattttatagttygagtgtaagagattgttgyggaggggagggggyggggygtttyggtggttagggggagttygggyggggttygyggagaygggggtygtagttttggaggagtaagaatttygtgtttttagtagtggggtaagttagaayggyggtttttttttttggygtttgggttygggttttggttgggtaaaagggagggagggaaattygayggtaaaggaggggyggtttatyggaagggtagggggttygg

SEQ ID NO: 6730 - DNA, 564 bp, Artificial Sequence
  Description of Artificial Sequence: Synthetic polynucleotide
ygtttttaaatygtttatttgygayggtttygygagygtgygtagtttagtttttttyggaygttttygttttygttygggtatatygtgtttygtatygaggtagagaggggtaygyggattttagtttttgygagtttttttgttygtygttattttatatttygtattgttttagttgtygttttagaagatgtatygtttggygygtaaagyggtgtayggtttttagttygygygtagtagtttggaggggygttagagttttygttttattttttggyggtattgttttygggtagttttttttttttttttttttttttatgtttttattttattttgggaygtttttaggatygaagaggtaggagggggatygygaggggaaggygyggagttggggaaggaggagtagygtygggygtagtagtttagggyggttygggaggttgygyggygttygyggatttaygttttaggatagaggaygtagtttygagtatygtaygtggtttttagattttttttatttttattttggygattaygagagggggtygg

SEQ ID NO: 6731 - DNA, 3277 bp, Artificial Sequence
  Description of Artificial Sequence: Synthetic polynucleotide
ygyggtatggtggttttygygtgtgtgtgtagygtttgtaggtgtttygtttagygttttttgtataatagttgtaggttggattygagggtttttttttttggggttttatagtgtttagaggtttygttagttttagatatygttttaggtttttttttttttttgaygtygtttattttttttttttgyggaagggggataygtttttttgtgtygaggtgttaggtygttgagatttgttgttttggaggaaaagttaggtagggtttttggttttgggyggttaggaaggttttayggttgttggggatagagaygyggggttaggttaagggttttygtttygtttaaatagtttgttttgggtagggtagggtttttttttygygttygygygttttyggttgggtayggttyggttttaggtttgaygggygyggtttttttattggaygygtgygggagggyggygaggttaaagygttggggttaggagggtattygtttagyggttttttaygggagttggggtagaagaygtygygatttygygygggtaatttttttygaggygygttttagttygtggygttgtyggygtagatttygygtggggatyggygaggttaattttttttgyggttyggggtyggtagagtaygtaaggggtygygggtygygtgggtttgggygygtygtggtgggtaagyggggttagyggagygggaattygtatatttttygagyggagtygaggataggttygtgygggtygyggggtttttttggygttaggaagyggyggtygaaggagataaygagaaygtagtttyggtttagggaggtttaaaagttgagatgttgaaygtagayggygggygttygggggttggggggygggtagaggtygttattttttaaaaaggtttttatygagtyggtttttgttttygttygaggggyggaygttygatttyggtattygggattgttygtgggtttttgttggttggggatttttagttttyggttgygygtagggaaaggttgtagaaygtagagattagagaagtygggggyggyggggaggggtyggggggttayggttgtagttyggtttygtagtttyggagttttagtttttttttttgtattaygggagygtggayggagggattttygaggttttgatygttttgatagtttyggggyggggyggggyggggyggttgygttagttttggttttgagtttttagttyggygtyggaattyggatygygatttygggagtygagtttygyggtttagatgaaggygygagtgygygggtgtygggtggggtgtttgagygagagyggagttttttaggtggaygtttttagttattttygggattttttttgttggtttttgggtttgagaagtgggygyggttggatagaygggaaatagttttttaygtataggtggatattyggggatatygggygygygyggygtttggtaaggggaagttgttggagaygygggyggttgttttygyggggttttttttygaagygtygttgygaaygtttagtttyggygaygtygtttgttygygatygggtyggygtygyggataggaaaggttygattagttaggtttgttttygagaagtttttagygtttygttygtayggggtggggattgatagtttttyggggayggggtygggtttatagagttygggagttgggggaggggaggygtygggggtttygattygtgggaagtttttgtatttaggttgttyggyggttttttaatagtatayggatatttaagaaaygyggggyggttyggtgattttygttttggatttagtggygtygygaggttttatttygagtygttgattatygggtattygggtgttgaygatttgggtttttgggtatttagttyggttttaaaygatttyggtttaagggtgtttagtgtagttaggagggtygaatygaattttatttttyggaygyggtggtttttygttygtttggagtttygtyggaggttyggggatattaygtaggtggtttattttygagttyggggtyggagttygatttttttttttttgagttttyggagttttyggggtagtagygtyggtttaggygggggygggggaggagggggtygyggtagtttttagaagggygggggggaygygagyggaggtagtttyggtggygygttygtgagattttygtygygtygygggttygggtygyggataattaaagygggatttttttttygttgaygtyggyggttygaggtttttttygyggyggtataaaaggygygggtttygtagygtaggyggtagtgggggtttgatagygyggyggtgtggatygygyggtygaagagygyggygtttagagygygggtygttygyggagttatagttygagtygggttttagtyggagtygagttttagtygagtygagtygggttyggagygttyggtgttygtagttatgtyggtyggtygygtygygygtatttgtgygttgttygttttttgttttttgggygtyggggtttaggatttygggtygaygygttttatttgtatttyggtgttygtggaygtygatatgtgygtygygttygtggtygtyggyggygtygaggagtttyggagtagygtgttgtagtttygygagayggtgttgtagtagaaggagattattttgagttagaaggagattattygygagttgatygttaagttgggtygttgygagagttagagtaygttggatttyggagtyggygaggttygggygggyggyggtygtaagtagttyggttygggtaagaatattatgggygatttgtttyggatatyggtygtygagaygtttagttaattygggtaaattttgtaatygtttaaaattygtttggagaatttygaggttygygygygttttyggtttyggtttttttttyggttygttygtttttttgtttttttttatttygttttttattyggttaggtatttttygttttygttttagtygygygggtgttyggtyggtgttttttygygtttgygaggtttygyggyggttattygttttagttttttgttaggtygttttygtagtygtttagaggggatygygtygygggttttttagtayggttttygygtttygtttaayggtgtggtttttttygtttttgtatttygtagtagtatagtygt

SEQ ID NO: 6732 - DNA, 5692 bp, Artificial Sequence
  Description of Artificial Sequence: Synthetic polynucleotide
yggaygttaattttaygaattttgttygggttgggggtttgggaygttttttttggattttaggattygtttgtayggagttatagaatatagygttatygttygttygagtttaggtattttttttttttttyggggtttgygtygtttgtaygttttttygtagattttygyggaaaygtgtatagtagggttttgaatagaatttaggttgttttgagtygaatttttttyggttyggggttgatygtgtttatttaagtygtygtttygtttttygtattttygaygyggggttatttttttttatttttttttttatttaggygtttttttygatagyggagggagagttaaaaatttataattyggyggygggattttgtyggttttagttgggygatttgggygtattygtyggygaygtagtttygggttttagygtatagaattyggtygttygtagtttttttygttagttaygttttttgggttttttattggttaagtygttygygttttygygtgattttattggtttgygtygggggtttagataaagggagtagtygyggagggyggtgattgggyggggttgggggygggtygggygggygygygggtygggygggagtygygygttggagaggyggggagtayggygttgggggaggggygyggtgtttygggttygggatygggaggygygggtgtgyggygaggttygggtgttttttttygtgggggyggggyggygggggyggggyggttttaygtgggtggggttgggygtttyggagggyggyggtygyggggygyggggygttgggatttygttygttttttygttttgtatttttttygtttyggggtttttgttyggayggyggtygtygtygtttygtttttttygagggtttygygttygttttygtagttyggtygggaatttgggaattyggaygtagaaggaygygttygagttaggattygtygyggggtttttttggtgggtygtggtyggggagaggaygygggttttggyggtygaagayggaygtagygttyggaaaggygagttaggttttyggtttttggygttttttgtgagttggttyggyggggtgygtygtyggggagggagggattggtygtggggygagtagtygggyggggagtggtttttgggggttttygttagyggagggttygygaggtygttttyggagygtygttaggtaygtgygttttttttgtttttygygtttttagagygtattttyggtagggaaygaataaaatttyggttggtgtgtaagagtttttygttgtaaaygtgtttttttgygggattyggggagtygtygaaygyggggtagatttyggtttaaagtgtttttgtagtttttattagggatttttttttatttttattttgggttyggagygggtgttagtttggaaatgtttgttttttttgtagtttygattgaattygtttaggaggaggtgygttttgtttyggttttagagttgggaggatygggttttgtttttygaagtttttttatttygtttttttggaaaatgyggattttttttagtagggatgtttagttttgagggggttgttttyggaggaagtttgggttgggaaagttygatattggttttaatttggygggtagttttttttgttttggagtagttttttttagttttyggagtttyggatttatayggttaggagaygtttatgggttttgggggtattttgyggggttygaggaggtygggtggtttgggyggggttygaggaggtygggtggtttgagyggggttygaggaggtygggtggtttgagyggggttygaggaggtygggtggtttgagygggttttttttttttttttatgtgtaygttaaataaaagaattttygaatagttttggggatagaatttttyggaatgtgagtttgtttttttygtttttttttttaggaaggataggggttttttaataaaggtaaggttgyggttggagygggttgaagggaaggagygttgttattttggggtatttgatgaaagagaaatttattttttttttttttttttaaaattagaggtagttgagttagagttttttttatttttttatttgattaatggggttttataygatgtttgtatttggggtgattgggtttgaagatttttagaagtgggaaaggattttgtttgtgtgggagattggaaagttggtttttattyggtgggggatagaatttttatggagtgaaatggattttaggttattttgyggaagattggaaatttaaggatttgaygggggggyggtgattttgtgtttttttttttttttttttttttttttttagtttagaataaagggyggaggygaaggaggtaagatgggtggtgggttyggaagtyggagtygaaagaagaatgttataaaagttttttattttttagttttygygtatttttaaatagtttattagagtttgggtggggataaagtgaatgatygtttagagtygggtttggtatttatggttyggttttyggygygggygttyggagttygggggaagtttttttagttygttttaagtygyggttggttagggygagagaggtyggggtatagygygyggttttttttgtygttttygaggatygagattyggggttygyggttttttgattgygtaagttttttygttttttttgtttttttttttttttygtygaaagaygttyggagygtatattygtttgtattaaagttagggattttattttttttaaaataaaataataagttataaaggtttttgattttagtggaaaaggygtygtagatttatggtttttttaaatttttatattttaattatttttgtttttagtttatttatgggtggtgattaataaaatgattttttattttgaattttttttttaatataaaaaatgtaagtttygttttttttttattygtttggatggatttttttygtgygggaagtaaagaaatttygtttttttyggttttatyggtttagggttgagttgttgttttyggttgagygaattyggtttgtygtagtattttttaagtattttygtttygtatatttttaattgtaatttaagggagaatatttttttygtttttttttygtttaagggtatttgtagggatttttttttagaagttttgtygtgggtttagyggttagaagggttatttygtagagygggttttygatagttttagttyggttattttttaaattgygtttttttgggtttygtattgggygygagtttggggygtttaagggtttttattgaggaggaaggttgtyggatygagttttygttatygtttggygtttttattttttatttttttttttttgttygttttttyggaygtygatttggagatggtaggaaaaaaaaaataattagatggaaattaaagattagtttgggtgygygggyggttttygtygggtygggttatgttyggttygygttttataaatttttttygygaygtgataatagtygyggtttygtttttttgggaatttaggaaygtatygatttttttygtygttygygtaagtttttttttygggagygagaayggagagtttttggtgattttgatttttggttagygtaggaygttttaggttttagttagggtattatgtataggagtggaggaaggtggaagggaaggggtttaatttttatttaagaaagygtagtaaatatttatatttygtaggttaaattaaatatattattaggggtygtattttttttttttygygtygtttgagaagggggyggaaggaaggayggagaagggtgaggggyggattaatttttttttggygatttttttgtttggttyggatattgttgagtygagtggggygtttaggagttagygaggggttttygaggyggtttyggttyggtttaggtgtgygggtygyggtggggygtaggttygtagyggagttaygagattttygygttttyggttgaygttygggygtttagggtttgyggttttaygtgygatttattygggagttgygttttagaygtttygtggagygggggagaatttgaaggaagtygtggygygtttagatattttaaaaattygaattaattgggaaaataggaagggygtttttaaaygyggagaagatatttyggggtggggaaggatgttttttaaaaattatatttttttgttgtggyggttgtttttgattttttttattattaaaagaaatgttgttaygtttaatttttgttgttatgagatatggagggggtagtttagtattttgaagtaatttgataagtttttaagtagtaaattygaaagggaggtyggyggtttaggtatagtttttttgtaatttgaatttataatgaaagtatttttttttatggatataatagattagattttataatttaatttatyggaatggtttygtttaagggagtttyggttgattttattaygttaagttaaattggatgtttgtggttttaaygaaaagygatygtgatataaaatatataatttttaaagtaaaaaattagygggttggattttgtttttttttttatttttgttttttatttttaattttttagtgtgggaaatayggataattatttgtgtgtgttggtttttatyggggagataggygttttgggtttttttttyggygggttagaggtttygtyggttagtgygtaygyggygtyggttttygattaaggtttyggttygttttgttggttygtttgaaaygtygatatttttagygtaygattyggggtttygggggtatttatggggttygaagtttttgtttgtyggyggygatyggatagttttttygggygygtagggtagaggaagygttttygaaagttttygtaygtatttaygagtyggttttgygygggtatagyggtagtygyggygggatattyggtagggttttyggygttattttgtgttaaaaattgygttttyggagattygggtatygtyggygtyggtagttagagygggatttagtttttatygygttttttattggagtttttttyggtttttyggygagtgyggttygtggggagtgggygtyggygygaggaagtttttyggttygggygatttyggtttttgagyggtttttttttaygtygtygttygttaggtygayggaggatyggggyggggaygggggttttagyggtttattttgttgttatttttgatttattttttagtaayggygygtttttttttyggttttttygygaggtttgttgaagayggatttagttttygtagagttggggaaggayggatggayggaaggtttagygyggtttatttttttttttygtygtttttyggttggtaggagtygtagygatagtttyggggagyggggtttgttttaagatttttttygyggtatygggagttaggygtggtyggaggtatygyggttgttttaygtggttttygtyggtygttatttygygyggggaggaygygtgygtgyggtgygtggtyggygggttgyggggaygygt

SEQ ID NO: 6733 - DNA, 7937 bp, Artificial Sequence
  Description of Artificial Sequence: Synthetic polynucleotide
yggygggtttttagygtagttttgygygtttttttygaatttattygygtygtttggtgatttttagggttttaggygtggtagttgtttttattttgatttttttygatatttatattaaagttatygggaagagggttgttttggaggtttgggttygttttgttaaggattgattttttygggtagggagttagaggggatygttygagaggattygtttttgygaggtttagtayggygttttaygttttttttttggagtaaattygtttygttttttttttggagtaaattygtygtattttygtttgtatygaaattttgagygtygtttygygttatttttagttygygttygygttgttttttttttygggtygtaggttgagaggttgggtygtattttggttaygttttgttyggttttagygggatattagaggtattygttaaggtaaatgtatttttgtaaatttattttygttttgatattttaaggttttatatagaaataggatttgttygttttatattagtagtttttattaaygttygttyggygtatatattattttaattygygaggtygyggygtattttggtttttttttttygttataatagtygttttgttttygtagaaagygtttygttgttttagtttyggaaygttttagggaggtgaatgtagaatgtagaaaagaggttttygtggaatttagatttgtaggagggggygggggagggtggygaggygyggaaaggttttaattttagtyggtttyggggttgttttttygagattttygggggagggtggttagggaagggtttttttaagtygyggygaygtagtttggggggttggygggaygygyggtttygtttagygtttaggtagttatygyggtyggggtygggaaatgaaattaaagtttttttgttttygggagyggaggggtgggygttttgtttygttttygaaygttttygtttygygttygtttyggtygagtattgatttgtgtgygaagttatgggtaayggygaygggaagtattttttyggttggaagtgtgyggggggttgygyggygggtttagtyggggygagaygygyggyggtagyggygttgyggtggtttaggttttygygtttygatagtagatgyggyggyggygtaaagtygyggttatttatgtygggtttyggtttyggttygtygtygttttttyggagtagygyggtyggggttygggggyggttyggygygygggyggygtagaggyggyggygttyggggttataggyggtggtggyggyggggtyggttagtaygygggaggattgggtttttyggygggyggtygygtatygagttagyggtygttgtgygggtttatggtttgtggaggtaaaagtagaggagataygggtgattggggggttyggttygttygggggttttygtttygttygtttatttattttttttattttttattttygtyggttygagygagyggyggttaggtygggtggyggggtyggggygttyggtgttttttygtygtaygygygygtagtttagtattyggggtttygygygygtaygtatygtttyggttaygtttggttyggggtagtygggggaatttagtygtattgttygtygtttttygttttygttttygygggtttttgtagttagggygtygyggygaagaggttgttggttttgttgggtgataaaaatttaaatttgygaagttattaygtatattygtatatatatatatatatatatatatttataygtatatttttttttttttttygttgtttaaaggtgtttyggaggaaaaggtttggggtttatattagttttttttttttttttattttatgtygaggtttagtttttattgtatttygtttaatygaataattatgttaattaagygagtaattttattgattgtaatttaagagttttttttttttttaataattttttttttttttttatttttattttttttatgtatttttyggtttatttttttgaatttatygtggttttttttttttagttttagygggattagtttttgtttttagtatygygttaggattttaggtyggttttttagagtttyggaggttygtaatygttatyggtattatttgggtygttaygtygtagtgttyggtttgttgtttyggagtygggagttttttgttgaggttgtaataattatttygttttttaattaaattygtttaggatttttttttgyggattgggggtttgggggtgtgtgtggggggggtgtttttagagttagaatgtttttttttaayggtttaaatyggttttgggatttttttttttagygtttgtyggggatygygagtagaggtyggttttygtttygggtagtatygggyggtttgggtaygyggggtttgyggygtttagttyggttttttagtyggggaaggtgggttyggtttagtataattttttgttagtagattttgttyggatttyggttatttaaaataatttttatttttatttttttttatttttatttaaygyggagtatttatttaggygaaattggggataattttagattttgggtgyggagggtyggagttagtgatagaagttgygtgtattatygtgtttttaggygttttttygaaggygttttttggaygtattttatatattattttttattttttaaataygtattgttttaatgtttattatttttaataaaagggagatggataggtttgatatttttaattaggaattttgyggaaaattttgtgtttttgtagttattttattatgataataaagygattaagatgttttttatttattgaatatttttttaaattgygatattttatggttygggttttaaaaygttttatttgtagattattttgtgtttgatttaatttataatygaaaatataatgtattaagtgaatatatatttgtttagttgataagtttttttaatatttattyggagagtttttgtattgtaaataaatgggtttatataaagagttttttttgtttggtaattatatataaaggygtttggggtttttttttttttggggatygttagtttttttttygggtttaataaatagttyggtttttaagtttygatttyggtttgtaaagygagygttyggtygttagggttyggagagtgttttggygagggggttgygagygtaggggttaggggaggggttgttygggttggattagggaygtgggggtttttagtttyggtyggygtttttygagtttyggagggygtygggygggataaagggaaagaaggaaagggagggaggttagaaatttgtagttttaaaggygtygaaggtyggagaggggtygggggttgygtaygygggggtgttaggttttttggyggtttttagggagtygtgtgtgttgtgtttttgttttgtggttgtttttttttttttttttttttttaataagaaattttaaagttgagaaagygygagttgtyggygattttygggaygygggttyggttaygaagtaataattttaattttttattttttgygggyggatygtaggttygattgttttttttttattagtttgttygattttttaagtaaataggaggtggattattgtygtttgtttgygtygttayggttttgatyggattggagagagtttttttttgtgtttttttttttyggggagaggtygygtygygttttygygtttgttygygtygggtttygggggtttggggagtttgaggyggttaggaagtggggygaggaagggyggttatayggttygagttgggagttttatagtttygtagyggygaygtygttattygtygagtgtygaggttyggggtttatttttagtttagttttaggagaggtygygtyggaggatygygaggayggygtygtagygttaggtygggttgaggtaagggaggaaatggagygaaaagtggyggygggtagagggtttygggygggyggagaatygttgaygagggtatttyggaaggaattgaatttaggagtatagggttttttttygggaaggtagggygtgattttggagtygtyggttttttttgtygyggttttaggygtggttggygygttttaggatttggagtttttataagtttgttttgttttttgtttttgtatttaaaaattygtttttttttygttygtttgtyggagattaggattttggttygtttgttttttttyggygtygttttygggagygygggygyggtggggtttgtaggtygggttgggattaggygygttttggggygygagtggttyggtygtygtygtagaattygttttttgygaaatagtygtattygttttttgggagagttatgagaattggggtygygtttgattttygygttygaagaaaattagttygyggatttygttataygggtygtgattygagtttygygygtygtttygaaygygygyggtgaaaaygtttygttgygtyggttttgttyggttttttttttttatttttattttttyggaaaaaaaaaattttgaattgggaaygaagattygaaaaattygttatgattattttttttttyggtttttagtttyggttyggaaggttttttagggtagyggtygtgggtattaygattyggttagtttttttygtygyggatygatygggtagggttaatttaggattgtttyggggaggggagtagggtaggggagygaatgttggggttygttygtgggttatttagaattgggygtaygttggyggygttyggatttygtttattgttygttyggtgttattygygyggttygygttagaygtagtttggyggtttttgttttgttttygagtatttgtttttaatgttgggtgtygatygagataataagygtttagagtaaagtaaggatgtattaygggggtaattttaaatygatygataagattttttagagaaaaaaaaatygtttatagtttatattttttaagaaaaaaaaaagttttaatattttaayggattttgttaaaagggaagatatatattttttaatattataattttgaattttttttgttaaaaaaaatgtaaaattttaaagttagaataaaaaataaaataataataaaaatataaaaataaaaaaaaaatgaaagtaattttagttatttattggaggttgttttttggatataattgaatgtaatataattaaattagtaaatgtgattttgttttgtatttttattggtatttttaatgtgttgattgttgtattgtaaatgtatygtttttataataaygattttagygagtttatttagagyggtttttaaatttgtagtttggygyggygagttaygggttttgtatattaataagttygtgttatttagttyggaatagttagygygttgattggtygygtagttttttayggtygggagttygtgttatttattyggygtaaataggttttttaataggttggygtygggttagggaattgttaattaggaagtagyggggttattattaagttygatggygtttaatttaagttyggygattgygtagtttttttgygtagattattgttgttgaatgggaatgtggtggygtagggygggagagggagttggagygagygagtgygygtgtttyggyggagggggaggygtagatatagatatagatatatatatatatatatatgtttaatttagtaggtttaaygtttggtttttgtygtatagaaggttaagggaagaaatattattattttttaaaagtagttgttttttttttttggaatttgtttggtaggtggtaggtaggttagatttttaagtttagaggtttttttaggttgtttggtttatttatygttttgaagttgttgtttgttyggattygagttygyggatgtaygtaygtaygttygttgtttgggtagtaaaagttttgaatagttygttyggtttttttttttttatgatttggggattagattttgggaagtgagttttgagtttttagtygtttatattattggtttttaattttatttttttttgttatattttgtaatagagtagttattaaaatgaaaattagggatttattgagaagataaggattgttttttttttatttatatttagatttagaaaatatttttagtttggtaatgggggaagygggtatggtgtggtaaattatgtatagtattttttaatgttgttttttgtttgtttatttgttaaatttttattttaattaaagtaagttattgaataatttttatygtaattagatgtaaattatttttaaaatatttygtaaataaatatttttgttagaatttggttttttatttaaatgttatttatttttagggagtygaggtgatgttttagtggygatggatatatttatttttgtttttttttttttatgtgaatttttgtttttttttttgggggaaaaaaggatatttaaattaggagttaattgatagatttataygtattygaaattttttatygttttatttyggtagggataygaaagagttaaatttaaagtttgttgtttttttgttttttygtttttattttygttttygygggatygttgggattggttggtatttygttagtggattgtttattatygagtgtaaataaggygttgattggttgttgtttagttygtattgggttttttgaaaaaagtaattattggtttygyggttttaaggyggtttaaggtygtttgatgaaaggagataagttggggatygtttttaggattttygygggtygatyggggtagttygggagtygaggtgyggyggagagttygyggattaaaggaatttggagagaaaggggaagygggyggtyggtttyggtyggttttttttttygtaggttaygtygatttggggtggggggttgygggtygygggyggggatttygggatttttygtttgtttgagtyggggtttaygtyggygttygtttygggyggttyggttyggaggggagtttyggagagttyggggttygtaggtaagtatyggygtttygygggtygggtyggggaygtaggataaggygyggggtttatttyggttggttygggagtggyggtygygygggttyggttttygttttyggygtttttyggtttyggyggtygggatttttygyggtygagtttttggttaggttttaggtyggygttttyggaagygaygtttggygggtygyggggtaygagggggagagtygggaagygtaaattttygaagygygyggagattygattagygygyggttatttattaggttgggggygattgaattaggtttttgggygyggtygtyggttgggggtgtgtggygtygattttygggtttttgtygtggtttygggaggttggagtagygagtagyggttttagygagtgtgtyggggaagygggtgttttygggtttyggtttygygggtgtaggyggaggttgttygtttttygygtatatygaggayggtyggttyggtttyggagaaatggygtttgagaaaggaggggaggggaaggttttyggattttgggtagggattygtygtyggggattygyggagtttttyggggatggaggaggygygagttggaagyggygygygagttygagygyggggttaatatygtggggtttagttttttttggttygggtaagtggaygygtttygaggtttygggtttaygtagggygtttttygtagayggygt

SEQ ID NO: 6734 - DNA, 1408 bp, Artificial Sequence
  Description of Artificial Sequence: Synthetic polynucleotide
ygygygyggtagtttygaggtagtagagygyggagtygggagygyggggagygygggtyggyggyggygagggaggaygggggygtagayggtyggygygyggygyggttattatgggygtgyggtgagtagtygttygggaygattttttyggttgygyggygttygygyggagtttttyggtyggyggtgygtttttayggttattatgaaaggtagggyggyggtagtttygyggggttttgggyggggggaaygggtttyggggygygygggaggttayggaggtgtttttygygygaatttttttttgggttgygggttyggggagtyggggttgttagggygtygggttygtgygyggatattgggggygtattyggttttygggttaggygyggttggagatttygaggttggggttttgaagygygtaagtatttttttttttatygygtttttgtaagtagtttgaagttttaagtygttgtttayggattttygtttttaattttttaattgaaaaaatttgtygaggagagtggaggtatygttatttttttyggtygtttttttaygtygtagygttttttaygttygtttagtttttttttttttygtttttagtygtttttyggttygagyggttttygygttggyggtygggtgtttttttygggattggggatgtttttygtgygttttygttatatttggtaatgattaggtgttygaggagtttagttggttygggaagtgtatttggtatttttttttattagatttatygattggaaaatagttgttttyggtttygygttttttttaygtgttygttttggggtgtgtttattggtgttttggggtgatatattttagttggttagtygttttttgygyggtgttttttgtaggtyggtttatggaagtgttagatgttatygtattttagaaagaagtaygagaaggattgtagggtagttttttgtttagtggaaatayggagatttgttagyggaattttgatttatgtatgagataagtaatygtagyggaggtattaaagagtygtttaggaatgggttygygtggtgtttatataaggtttygtgtgagagttgttggttttgtgttaggataatatagttttgygtgggtgygaaatgttatttgatygyggttatttygtttttagtygttatagatttggygatgtaatygttttgatttttagggttgtygttygagggaggygttygggaagttttaaggygtttggaaagtaatttttggttttggaaagttttttttttgaagggtagttttygyggaattaatyggagygatgatattttattaatttattttttttttaagggygttaggtgtttaygtygggagatttygg

SEQ ID NO: 6735 - DNA, 208 bp, Artificial Sequence
  Description of Artificial Sequence: Synthetic polynucleotide
ygttttyggggtygygatttttttygggaggtgtttgygaaggyggttttgtygyggtgggggtggggaggttagggtttyggatygttggagttggggtygtagttagtttttggygagtgttttttggttgttgtygtaggggtttgttttttyggattttttttttaatttygtyggatttttttttttttttttttaygttygt

SEQ ID NO: 6736 - DNA, 805 bp, Artificial Sequence
  Description of Artificial Sequence: Synthetic polynucleotide
ygtygttygyggagtttgattttgygttaggayggaggaggttgtgtttatgtaattgttttgaagtattgyggtggttttttttttygyggttgggagggtaggtaggaygaggttggtttttttygtayggtttttgggygtgggttttygtygtagtttygyggagtttyggtgttttttgtaatagggggyggggggaatagyggygagtagttttgggttgyggttttttttttaygttygagttttttgygtatygtygtygaggaygygygttygagtttagtttttaygtygyggygygttygggttttttgttgattttaggtaattttttygtttttyggagtgggggattgygagggggtttyggttttaygaggtgyggaggaagagttygaggtttggggygaggygygygggatagtggggttgaygygtggtttyggygtygygyggtttttygaatttygagtttygygttyggygyggtyggggtttttaatygttttttygttygtygggatttttatygggtygagtttgygygtygygtttttygttygtttygttygttgyggygtagtagtggttgggtyggygygtagagtttgagtttyggttttyggtttgggggtttttttgggatttttggtygaaggggygattyggttttygygtttttttttygttaatttgtataaatttttygttyggggygttatgttttaagttgtttttygggttgggggygagygygggtyggtttttttttyggggaggtgygggggatagggggyga

SEQ ID NO: 6737 - DNA, 2462 bp, Artificial Sequence
  Description of Artificial Sequence: Synthetic polynucleotide
ygagygygyggttgggaggygggtttagggyggggtagagygyggggatygttygggtatygggygtagttaaygagyggayggggagggygggttygygagggttgagyggygygggttgttataggygttygaagygygttgtaggtggtaatttggaggtgtygttatygtagttgygggaggagttygggtttggyggttttttttagtttttaggagttttttttygtygtygagttygagattggatttyggagaattygaaggaaagagtttttgyggagggatttgtgagtagttttatttttttttgtttttgygttattttttttttttaaggaaggttgtgtttgygggttgygaataagtttygggaggggttttaaaggaaggtttyggtgatttaggtgagygtttttttttttttggtagtygggygtaggtygggagygtygtttagtttygtgggtaggggygygggtgygggtygtttgtttttggttygaggtygatgggggagaaagygaggaaggggygaggttggttygatygggggttgtttggtygggttygttyggaggygatagggatttttagaygggtatttggagattagggaygagtagagaggtgttttgagggggatagagggtttgygttyggtttaagttgatygggatygatygtttgygygttgtgttggagttgtygyggaagtygggygyggygtttttgygaattttagagttagtgygyggggttyggygagygtattagttttyggtttttyggagtttaaggttttggaggaygttattttttttygttygggtaatttttttttygtttttttttgtttttattttttygygtyggtygtttagtttatttygagattttgtgtttttgttagygygygttagttgttgttgttattttttttttygttttygtyggagttggagygatttggggtttggtttttyggtttyggtagtttagttgtgggttggaygygagtggggttggttagttttttgygaggagggtaggagtgagygygggttttttttttagtgtttttttygaattygttttygtttttttgtagttygaatygttagtttagagagyggagttttagaagttagattttgttygttttggggaaaygygggggaggggggggtttttygggaaggtgygaatttygtagatgaggttagagttttygtttttattttagygttttagtttttgtttttttgtttttaagtggatagtggttttgattttygtatttyggtttgtggygtggggggygttagyggtagtgtgtgtgtgtgtgtgtgtgtgtgtgtgtgtgtggtgtgtaaggatgagygagtgygatttttygggaggtagaggygtaggagttagtttttttagttyggyggagtygtagggatygttttttttygtygttagttgygygtagttgtatttyggtaatttygygttgtyggttttttttttttagttttagttttyggtatttttaygattaaygyggaattttaggattaaaattatttggttaaagggtgygggtgggggatygaggygttttygaggygaatgaggttgttttttaaaattygggaggygtttttygttyggygttgtattttttygtggttyggttgtaaggatttgyggtggaggtttggyggaggygggttygygttttagagagagygttaygttattygagaaggygaygttgggggttgttgagttttttaattttttttggygygttttgtttagaagtyggggagtttttggtyggyggttggyggggaagygyggygygggaggtggggtggtttggttggtgttgygggagggygtttygggygygttaggggttgygtgtygyggttggagggygygtygggagttgyggygggttyggggtattygagtggygttggaagttgagtyggggttygtagggttyggtgatygttttggygtygtygttgyggattygggagtagtaattaygyggygygttyggtygttttttyggttygtyggtygygtttttygttttttttttgtagaagtgaagtygtygtttgggttygttygggttggygatttttgygttagaaaagtttgaggtgttggaggygaaattttttygggagygaagggyggygtttataagataaggaaagggaagaygtygggttttggygggtagygtagtagygggagggyggygttgagygttaaggatttyggaggygaggygaggttaggyggatttaatttagttaggaggtgttgttttygtttttggggtttttttataggtatttggtgttagttatagattttygttttygttagttygtaattttttygtaattttttttgaagtgygatggattaagattgggtygyga

SEQ ID NO: 6738 - DNA, 990 bp, Artificial Sequence
  Description of Artificial Sequence: Synthetic polynucleotide
ygtatattttgtgyggttygagtggttyggatggtatagtttaggtgttygggttaaagttggtatttttaaagtttagaaygtaatttgggygygttagtataaattyggttttyggtttttttgaagttagttaagttygtatagggtttttagygtttggaaatttgagaggygtggaagggtggggagtttygygaagtttttagtttttgggtgtttttyggtttygygggggagygggtttggagttaaatyggtyggtygtaggttggagtagygggygtyggagygygyggtggggatgttygaaaaggagttagaggtttagtyggagagttygagaataygagggatgtttattttgtaatatggttttaagtttttttttgtttaygyggaagygtttttygttttatttygggttgtgtagggtygtttyggygattaagtygttttyggagtygggtattggggagtyggtgttgygttygttgttggagtyggggttygattgygtygttaggtagtygggttttttttgggyggttatggtgggygygtagygttygggttttygttgtygtygtygttttgtttgygttgtygttttygttygtyggtygggtttaattggtttttagygtygyggygttagttygtttttttgtagtygtygaygttatygttaaygtygtygtygttattgagttttyggygtattttagtttygggygtygtttaygttattygttatttygggtygyggtttyggttygggtttagtggttgygtygtttttygttagtaaygttygygyggaatgagygygtygygttgttygygtttttattygtagggttyggygtttttttttygttygtygtttttatagtygygygtttattggttyggttagtttayggggagtygyggygggygggyggtttttggygtttatatattygygygygtatatatatattaygt

SEQ ID NO: 6739 - DNA, 2274 bp, Artificial Sequence
  Description of Artificial Sequence: Synthetic polynucleotide
ygtgtygggttygtttttaygtyggattttygatttygatttatagatttttttygtgaggggtttttttgggtttagaaygttttygygygygygtgtaggtatataygygtatatatttataygtttgttygtatatygttagtgttttttttttttatttgggattttygggtagtygggttggatgaataagttgtagttggtygyggygtttygttagggggaygagggtggggagggggagtttagyggggygtagggtygtggttagggtttggggatttgttygttttttttygyggtygttaagttttatygttgggatyggygaggaattttttttagttttttygtagaygttgtaygatygyggggatttttyggggtygttagtygygtygggtagggggygatagggagggtagggtatygggagatygtygtygtyggagyggtygttagttttyggygatygttgygggygtagtygaatattagyggtttgggttyggtygttgttyggggtyggyggggatygygtagygtttaygttaggyggttyggyggttgtaattgggaattttaagtaaagttttttgttgttttttttgtagtyggttagggatttaagagtgtaagtygtttaattttgagtattagtttaggtygyggaaggayggyggtygagttggtagtttyggttggggagttygttttyggggttygttygtttygttygttygaggattgggtgtttgttagttttayggtttttygtttagygttyggtttataggtagaagyggtgttyggttygtygygtttttygttyggtttygaygttagttttagggttttattattagggagttgtyggygtttygggygtttygygtyggttygygygtttygggggyggtagaggyggtttygtttatttgagaaygtttygttygtygtagttagtaaaagttyggttaaagtygttaggtaagttttaagtttttttatggtgttgagtgygggtygggtygtttttyggyggyggtgggtgggygygygagggyggagggggtygggagttttggtttygaggtagygaggagagaygggtaaatagtagagygttaagttaagtttttaaagtgttaatagttgtagaagttygaattttagyggttttaggggygygggtatagggttttgggttttttttttttgtttttggttttattyggygtttggygtygttggtagagggagyggagggygagttygyggagttaaaattttttttyggtttyggttgttgagttygtygttttttttttttttttgttygggattygggattygagttgttggtygtggtygtggyggtggtygtggtygtggtygygygygtttygttygtygtttttttataggtagttttaagtttagtttygggyggyggygygtygatgatygagttygygtyggttgygygyggggtttttgtttttygattgattggyggtgtttygtaggtyggttgaagggagygtttaygttayggtygttyggygtygtygyggttygttagagggygtgagygttygtgtttygtyggttygygttygagygttttygggagttyggttgggggyggtttygyggttatagttattatygtygtygaagygggygttagtygygyggggaggagyggttatygggtttttttygtttattttttygtttyggtygygttttttattttggtagttggttttggggagggtgattgtggaagaggttgygtygtygttagaagtttgtttygggttaygagtygygagtagtttgtgagygyggtygggygggattagyggtttgygatttygygggygyggttaggyggtttygagtttggygtyggayggygatgttatygtatagggttagttgtattyggagtygtygggtttgygttgttyggyggttgygggaaaagygagttaggagatygttgaggtttyggagggttgygagtttttttaygtygygggyggagygaagttggygggygtygggagatggygygggagtygggagygtygagtttygygatygttagttygttttyggtygggttygtygggtataygtygttggtttygagtattggygttygggaagtagggygygtttttgttgttttgygtttttattatgtttyggtgtttygtgtgggttygaagygagtygtaggtagtatayggaaggygg

SEQ ID NO: 6740 - DNA, 882 bp, Artificial Sequence
  Description of Artificial Sequence: Synthetic polynucleotide
ygaaggttgtggtygygttttygtyggttagtttttagtagtagtttatygtttttgtttygygttttygttttaggttygtayggttttagtttygyggggattagtattgagtyggtttygtygtygttttagtgaygggttgttgttgygggaagttaatygtttagygtttggaggagggygaygaggtttttygygygagygagtattagaaagtagtygggttttttygttttatgttggttyggttggygtagttygatygyggtyggtgtttgaggttgggggaygttttgattygygtyggtygtttttyggtggttttgggygygtttygtgtagtygggaggttggaggygttgyggtyggaggagttgggggagttggygggyggtttggtgtgtttyggtttgygygaayggttattgttggygaggaagtygggyggygagtttaaggttagggagggtyggttttggygttyggygygtttygygatttgtttggttgttyggggttgttgtataagtyggtgatattgttttgygggtttayggtttgtgagygttgygtggagttggggttygygyggttaygggygygggygygggygygggygygtgaaygtagtgttgagtygtttgttggagaggtttttttyggtygagtgttygttgygtaggttggagggttaggygyggagtttgtagygttagtagtagttygaggtygygttgtttaggtgygattaggttttggagttgtgatttggttgtggggtyggttygtttttttgatttttgttaagtttagyggttggagttaattygygggtttgggttttygagygttttgtttaggygtagggggttatttygt

SEQ ID NO: 6741 - DNA, 4359 bp, Artificial Sequence
  Description of Artificial Sequence: Synthetic polynucleotide
yggagygtttaatttagtatatygttttyggtaaattgygagtaatttaaagtagttygtttagtagggaggggagttggtgggaggggggtggatttygtygttygtagaggtggggagatttggggggyggtttygtttttaggttgtagygtgggtttggttttttgttaagttaggagygtagttyggagttagygyggttttygggtttttgygtttatggygagggtygygggggaatagtttttggtaggtaatttgtygggtatttatttgagtttttygtatygyggttygaaaatttgggagygttttaggataaagggttagttttttggaattagtygtgtgtgattagtgtgtgttagttygtatgtgggggttttagtgtgtaattaatttagttgtttatygtagtttyggagaaaygagtaygtttttttgtaygtgtttagggygggtgyggygggtagtgtattgtgaataaagtyggttatttttygygtygtatttyggggaygattttyggayggtttttygyggagagtygggyggatgagagygtggtgtgtgtgtgtgtgtgtgtgtgtgtgtgtgtgtgtgtgtttgtgtgttttgtgtttttttaaggagtyggaggyggttygygaggtagggatttgttttaatttgttttatatttggygyggttttttygaagttygggtggygtttagggtygggtaggtaygyggaggattagtagygttygttgtagaaaaagatatygttaatttttatttagaagtttatattgttttgagatttggttttttatttttttttaaaaaaaaaaaatgtaaattgatggatgggttttaattgatgygtaaaatgttttttttgagagtaagataggagggttagggaagggggaaataggtagttgatataatttttatagtttaattgtygagaattyggatttggaggtaaattygaggaygtattygaggagtaggygaggttgttttttagtaggayggtttggtatyggggygtattgttggggatttgattttttygtgtttttttattttagggattygtagttggttygygygttagggtatataygggttgygggagaaggtgaaagttaggatgtagtaygagtttygagagtggtttgggttgtgttttttaagagaatagtygaggttttyggyggttttgggaagttgtttttgggtygggagagygggaggyggygaygtaaggaygygttyggagtttgggygygtygggggygggygtttggttggaagtggggtagtgttttttatgggaaagygagattyggygagttttttggttgtttttttagttttygaggtgttygttttygygygtttgaggtagygtagttyggagggygaaygaatggyggttggtaaattttgagtgagagtgygtttyggattygaattgtygaattgtggttgyggtagggtyggtygagatataagttygtttttttygtttgttygatgggttttagggagattttagttttagtttggtggagygtttygttygagggagttgtgttattttgtttaggggtagggagggyggygttttgggygggtggggaagggtttttgtggtttttggggttttaagygttttttttttygtttttttttttatyggttttttttagttttttttgtttygttttttttyggggttggttggatyggygyggatttgttttagatttayggggagygttttaggtttttaatgatagtttaaatgtggttgttggaaaagtygaaagggatgtggttgaygtggggygtgtttygtttttttgtaagagtyggaaagggagttgggagtygygyggttggttttaggttttygygtttygtygttagtaagtaggtgggggagtygtygtygtygttagttttatttygtttttaagtttygttygttgygttttggtygygggygtygagagggtgyggggtttygtygtgttttttttattttgtttattaatttgtttgtttygtttygtttygggyggttttagataygggtttttygyggtagtattygyggttygttyggygtagtygtygtttygatttttyggtttyggggggtaatgagggggtagtggaaggggtattgtttttygggtattatttagagaaaygagatygtttygttttttygtyggttttttttttttttygttygggttygygtaatttttygttagagggtaagttgggagtgtttygtttttatygatagtttttttttttttttttttttttttttttttaaagtttttttagaagtgggagtygggtgggggaggaagaaggtttggttagttttygttttttattttattttttyggtttaatttgtttttttttttttttttttttttattttttgygygtygttgttttttyggagttgygttygggaatgataattggagygyggtttttttaagagttyggttttgtttttyggtagttgaaggttattaaatataaaagtttttagygttgyggtttaatatagygtatgygttttgttygaggattggtagagagayggtaatatggygagaatgtttggtagyggggattgtaatattagygygggyggtagygttagygttgtygtygtygtygtygagaataatggggagyggggygagggygagygyggygyggggggtygyggtygtygttatagtygttygtattattgtagygygggtgaggaggaggaggaagaggaggaggaggaygagatttaggaggtgtagataaygggggaygaggaggaggaggaggayggaggtggggggttggaggaggaygaggaggaggaggaagaggaggagatggggttggattgggaygagtttttggagttygaggattyggtyggggaggagttggagttygagtyggtttatatgattaatatggattagagygtygygttggagttygaggygtygtygygattgttggygtttygggttygyggtgggtygttyggggayggtttygagttggatttygaygtgttgtagygtttygagygggttyggttgagygagaatattyggttggttattygttaygtygtgygtatttttygggagtatttgagygagaaggygtagagttyggatttygagattatggataagggggygttgtgtygygtgttgygttttttttatgtygaggttygttttaaaagyggttagttttatagtaagtygtygtttattagtattygtagtttttttaatygttattttaatgagttttygtattgtygtaygttygattttattaaggatttygagttgygtagygttaatttgaygttggtygyggttattygtaagttygaggagtagggygtygggtyggtggtgtagaagtaagttattaygygygtygatttgygtaagttgtatatttttagygtttttagtattaataygtttttygggttgtttaataaggtttggttygagaygtgtatgtatttttgtattygyggtygygagaattagygtgagttggaggaggatttttttgggttggttatggaygaggayggtygtaagttygtttattttaagtttttygggttttattataagtygygttygtygtygtggagtaagaagygygtygagagtagygaygaggagaatttgtttygtatgtatgagaygggtatygagttttgtttttaygttagtttygttaagtatttgtygaaaygtaattttttttgtaaggygtttttttagyggtttygggattattgtagygagggygatgtgatttggtaygagaataaagttatyggtaagaatttgttaggtattyggatgtagatgttttttaaggyggttaagttttttaagatttatattaattattgtatyggygtygtttttatygttaygtttaatagtatygygggtattggtattaagttgggttygttygtttygtagggttgttaygtygaggttttgaayggggyggtayggtattatttttattatttttttatttattttttttattattatygtttttagtygttttygttggggaatatttatattttttttaaagatagttaggtygggttygaygtgaaattygaggttgygtttaagygygttttgtaygagtttgtgttygggtygggggaaatttgyggttttattttttttaaaagattttgtattygtttttyggagtttgtggatgyggtggtggtggttttygtgaaatayga

SEQ ID NO: 6742 - DNA, 2762 bp, Artificial Sequence
  Description of Artificial Sequence: Synthetic polynucleotide
yggggyggtgttyggygtattttaggttttttttyggygatttttygygggttgtagtaaaatayggggygtttyggyggggygggggygggyggttgtygyggattyggtyggttatagtygtagtttggtggttttygattggttaygaygygggyggggaggtttggyggaggagggaggygggggygagggyggyggyggyggygggaggaataggagaggggagygggtygygtagttaggtagygygtggggygagygyggggagagyggyggyggttygtttaggtygygtagyggaggtygagyggggtgygyggtyggygayggagggyggygygygygagtgagyggygtagggygaggatyggygggygggtgtyggtgygygggtagtaggggyggttgyggtagtagttgygygggayggagtygyggygggagagatygygtyggtttttygttttatttttttgyggtygaggtyggagaatagtttttaattygtygggggatyggaaagaggagtygagaagygtttttyggtttttaygtagyggaggygyggagtggygggattgttgttttttgtgggtgtagtaygtaygattyggagygtttttttygyggygttgttttyggygttttygtygygtygagyggttttggagyggggattyggaggaagtaaaattaygagttygaaatttygygtggyggagtttttggggagygttattygttttatttttatttttatattttttatyggttaaggttttygtygttgtatttttygyggttttygttgygtttygggtyggagtygagtygtttgygttgttatagtagtygtttttatatattygtagaygtttataygttttttttttttgttttttygttttttttttagttttttgatttttgggtttgttttattatttttggtgygagtttygyggatttygyggttygttatttgttattagttygttttttattggyggggagyggagagtagygaagaagggggtggggaggggaggggaagggaagggggtggaaattgtttggagtygttttttygygtygttgttggtgttgtygttgtttttttttttttygtygtygtygtygtygtygtygtttttttyggtttttygttyggttttttttygtttttatgtgtyggatagygggagygttgyggattttgttgtygttgttggyggttttgttttaggtaygyggyggttttygygggtygggttaygggyggggtggggygggyggygtygggtttttttgtttttygygtygttgyggggtygggttgygtattygggaagggaggtgttaygtygygtygygtygygtygygtggtyggtagttgygtaggtatygggtttygttygggygtyggggtagggttgtyggggttagtaggtttttygygttttttttggyggggttttaggggttggattgygggttttttttgtttttttttyggggtygagtaagttygyggggggtgtttttaggtagtaggagggtgaggtaggataatttttaggttttgtagttttttgtgtttttygtttttygtatagtattttgttttaatttttttgtttatttttgtagggatgggtygygagtttatagtaggaatttttattttggtgttttagttaygggatttgtttttattttattttattttgtattygtgygtttttyggtgtttaagggttttattgttttattgtttttattttagtttggagttgttttttttttttttttttttgtttttataatattttgtgttygttttatttggaaagaaaatttggtttttttgttyggaggagtttttgtyggttagygtttgtttgtagaaygagtttggttttttaygtttagtatttttttygggygagaagtttygttaygyggttgtttttttttttgttyggttgtttgtgttttatatgygtttygggggygtttttgtttggagtttttygtattttttatattttygggagagagttagygagtttttttatttaatttttattaagaggttttttygyggtaggaagtatttgttttagttygggygtaggttttttygttattgtaygttgygggtttttagttygggggtagtttaatttttygtygtttttaattygaggatgtttttaggtttttttygattagttagtttaggtttggaggttattttatatagtttyggtygggattttttagttgggygggtgtagtgttttggttttaagtyggttttygtttgtygtggggtttttygaaggttgygggaaaggggygtgtttattttygtygyggggtaggaaaatttayggagggtttttttgtttgtygttttyggggtaaggggagaggtgttttattgttagttggtagtttygaaaagtgyggaygtagttyggaagtgtttgtttygggggtggagataggtggtgtggattatttygtttygtggtttttaygggttagggtttggygygtttyggttygtyggggggtgagtgttgttggggygggggtaggggttggayggggttggttttygtagtttttygygttttttttygtaatttttagayggtygtgggtygtygtygygyggagttttgtttatggtgygttatggtgyggtaygtttgtttttgttyggttttaygtttttttttygggtygt

SEQ ID NO: 6743 - DNA, 338 bp, Artificial Sequence
  Description of Artificial Sequence: Synthetic polynucleotide
yggagygggggyggtttggagygttgatygggygtygaaaygtygggagtygggggttaagggttygagttaggaggtttyggagtagtagtygttygttttttaygtygtygtygtygttttygyggttgtttggataygggataatygatttggggtttygatygtagtagagtyggaggggtgggtaggygygggttygggagaygygyggggaaaygygyggagtyggtgagtygggggygtttgtgtttyggygygggygtttgtgtttyggygyggggygttgtygggyggygtttattttttttggtygttygtttgygygattttygygg

SEQ ID NO: 6744 - DNA, 1435 bp, Artificial Sequence
  Description of Artificial Sequence: Synthetic polynucleotide
ygggattygtgtgtttttyggggtttaaaggygttgggygggyggttgttttygggagaggygtagtttttatttttggattayggggttagtggttggggaagtttttggggygygygyggggaggyggygttgygttttatttgtttagtttyggaygtagttygggggygaggygtttagggattattttaatttaatattgggatttttaataaattaaggaatgggattttaattattgaaaatttagtttttttgggttagaatggtgttgggatggttttggttataaaatattaaagagatygatygttaagggaataggaaaaaygttygagatagtygttgtaattaygaatggattagatttggtagtayggggtattgattgttggtgtttaatyggattttttttttttttttttatttttttttttatttaaagtaggttttygttgyggtygggatttygtatttttgtaaygtggtyggggttgtattttttatgagtttagggtgaataggtgygaagtgygttgggagtattyggttagyggtygagygyggggaatatggagagygagygygatatgtatygttagttttaggattggtgttttaggatttayggggatttaggtaagattaagayggtgattygtaaaaaataygaayggatygtttagttttttaatggtttygagtygagttttayggataaygttaaatttaaattttgggttaaatygaagggtttttagttgggttagtyggaygaggttygygggggaggyggyggygttaagtaagtgttttaygtgtttgttaagattayggtgagtgattygtttttttttgttatttgtttgtyggagtagttyggyggggagggaggaaggagagaggygggagagagggggagtygtgagtygtygttggttygtgtgttttttattttttttaattttttttttaagtygtttttattygtattagttaggygygttttttttattgtatagtttttgtggttttttattttaaagyggtagygtatttttagagttggttttttttttygtttygggttttyggatyggttgtaggagttttttttttygggtygggyggyggygtttggygttttygggttgggttattgttttatgtttttttttgggygtttggygygtgttttatygtygttatygygtttaaaggttaggttggaagttyggtygtaygttttgagagtagaygagtttgatygatagtttatagtgtttttttattggtataaagttygaatgtagygttagyggtggatgtggggttttttttaggatattgttaggttttatygttagatygttgttygggaggtayggggtagttygaatgtttygattatttttagagatygttgtygyga

SEQ ID NO: 6745 - DNA, 510 bp, Artificial Sequence
  Description of Artificial Sequence: Synthetic polynucleotide
ygagygtgagttagygttgaaggtttagagygygttgtaygagtagaagattttgttyggggtaagtggygttygtygtggygtaagyggtygaygygtygatagggggygatttygggaggtygggyggyggygyggygygyggggagaggayggtagggygttygtygtttygtttgagttygggagttygygygtttttttaaatttttgggttttyggtygttygggtttaaygggattygggataggggttttatttggtygtggtygtgaagtttttgygygggtagtttggggygggggagyggygygtttygggttttyggagygggagttgttttygtygggttygygggtygygtgygygatygagttygtttatygagtygaygygggtygttttagtgggggaggagggggtyggygtgggagggggygtygtaagtgagattatygyggtttatttaaggagttagttttygtttttgataaattatygygtttygg

SEQ ID NO: 6746 - DNA, 2722 bp, Artificial Sequence
  Description of Artificial Sequence: Synthetic polynucleotide
ygaaagtggttagtygagggtyggygggggttaggttagtygtttagtttygtygttttagttttttagtttygtagttygygggggagygggygygttattttaatttgttaggtttttgaagygaagaggttgttttgaaaaagtaaatatgagagaggayggggtgtaggtaaatattattaaygtgaaaatttgttattttagttaagtttattattagtatttatttttataggyggggtygttyggattttgttttyggtttygygtttgttattttttttttygygtagtygagatgttagttttagtgggtttggyggggagttyggyggggttyggatygggyggttygattttyggtttttayggtaggaaygatttagtttygtatttygggagttgtaggtgtygaaaaygaaattygygggggtagygtaygtygygygagtttyggttyggyggtaatttagatagygatttaggggttttatttttttgatggtgattaaaaaaatatattttatttgaattygtaaagtagaygagggtaaattaagttatttttygygttggtttatyggttatygygtttagygttttttttttttttyggygggygagygggtaggggygttygatttttatttttttttygttagttatygggggattagtygygtttttyggggygggggaggtygttygggayggggatttttatttttygttttyggaagygggttggggygggggtyggatttygagtttttatttttygtttttttgtttttyggygyggttygatagtttttagttttattttggtaggtggtttgggtggyggtagatgtygggygggaggaagatgtggggttgttttggtaggttgggggtgtgaggaggaaaaaaaaatagagaaagatatatatagagagatagggagagagygygygygagagagtttttgtttatagatttatttatataatatatatttatgtagttttttttttttygatattgatgaatgygygttyggattttygggyggattttttttaagtyggttygtttttttagtttaaataaataaataaagttagatggaagaaaaaagygtttattttattttygtygtygtttygttygttatttttgtttttgtttygttygtttggygttttaatagagtatagtttggtggataaagtttttttatatatttataygaaaataaaaattattatttttaaaatataaaaagttgtatttgttgttattataaaaagaatttttaaaaggtaaagagaggaggtyggttgttyggttttttayggatattygtttttygyggtygtygggttyggaattttagygtttttygaagagttatgygtttggygttatttatagtygggggtygtttyggattgtattatygttayggygyggggtygtygaygggggaggygyggtggtygtygttttaygtygttttgttttyggtygtygttygtygtggygygggtttttatagygygtttattttyggtttttygygttttttttygygygygtatattygttatttttatttttggtttggttgggaatttgaatyggtttagtttgtttaaayggaaaggatagagattttgtttgtttaatgtaaaaaaaaaaaaaaaaaaaaaaaaaagaaaaaaagaaaaaaaaaattagattagattgagagagagaggagagagggagagagagagggagagagagagggagagagagaggagagggagggagggagagagagaggggggagagtagagagagagygygagygygagygagygagagaagaggagaaagagagagagtagagagygagyggagagygaggtgtagagaaatygagggggagagaattygagtgtgtgtatgygtgtgygtgtgtgagygygagygagygagagagaggagygagagagtgtgagygagaaagaataaaaggaaagaagattttttttatgtatataaagatggttaygttagtaaayggataggttgataaygtaagttttagtattaaygggttyggtagtagttygggtagtgtygggtatatgaayggattaagttatagttyggggaattygtygattatttttatgaaggattaygatgttattaagttgtttattgggtagatttttygtaatttggatgagaaggattttaagttttttttygaggagtttggtaaaatttaygagtttayggttttgaaggataggtttataggtatgtataaaggtgagtatattttttttttttaattttgtyggggagtaggagygggttggygggtygatyggtyggtyggygattgaygagyggyggattaagygagaggaagtttygggygggygyggtggagggaggygttygggtagyggagattagagttggggtgygtggggagttgttygttggggtaagattgggttttgggygaggtgttgataggaaygatgttatggagagagtagygggygtygatgaagagaaagagagaggggatygaggagayggggtttggatttttgggtatagygatttgaaagatggggatggggaaggttgtatyggtygagtttaggaygttgagyggayggattygygggtttttggtyggtygaggatygagggtgttgtttatygtygt

SEQ ID NO: 6747 - DNA, 1133 bp, Artificial Sequence
  Description of Artificial Sequence: Synthetic polynucleotide
ygagggyggtygtttttattttygggggtttttttaaaatggggtggggggaagttatygttygttttgygttttygygggtgtgttttgagttttyggtygttygyggygttygttttygtttyggtgtttgyggygatttaygtttygaagtagatttygaaaggaaaaagygatatttttgtttygtatagagttaaatattggaagtaygagatagtygaygtggattaggattattttggtttttygtgyggyggyggyggyggyggttgygygygggttttttgtggygyggttttggggygygggygygggyggyggyggggttgygggagtygtyggggygggaggyggagygyggggygygggyggyggtggggyggyggttggyggggagatagatggtttatggaaaggtttttttttyggtttttttygatatttaaaggygttggggtygtagttgtygttatataaaggygygygtagttaatgggagyggagygtagygyggygyggtttygtyggaatygygggggatagyggggatygygggygygygggtggyggagggagggaggggtgayggttggaagggggtyggyggttaatygttgyggttygttgyggggygygagggaggggttagttttaygggaagygtggagtttagygygggtttttggtygttygygggtyggagagggygygygtgaagygtttttgtatagatatgggyggygtgaatayggaaygtgtatatatggagagggaygtgtatttagatatgtggaggtgygttttttagtgtagagagaygggtaygagygtttttagtgtataygattttgaggtttttgtatatygygtaygggttattyggggaygtgygttyggaggttggygtaygtgtagagtttgattgygggtataagggaagttggaatgygaataagtagtygtaaataggatttaggtattgttatatagatatgtatatattaaaygttttgttaaygtaggaygygtgttaagaaygtatttttagagatatatagagggaatataygatgtagatataggtaagataygtatattttttaggttttttgtttggygtatygygtygt

SEQ ID NO: 6748 - DNA, 2401 bp, Artificial Sequence
  Description of Artificial Sequence: Synthetic polynucleotide
yggtttgatyggggygtttygtygtttttttagtgtattttatygttttyggttgggggygtagtattttggagagaggygtttggtttygygtttgggttgggggygttttattttgygttttgggggttaggggygtttgtygggtygttgtygaggggttttgtttatttttgtttagttyggagtttaggygagttagygyggygagtttttttttttttygtttgggtygttttgagttygygttygttttagttgttgtagttgttgttgttggyggttgyggggagygyggggygygygtygaagaggtttgggyggygaggayggggaygaggaggagtyggaggyggtaaggaggaagagygagyggaggtygaggggtttagyggygtggygataggattagggggtttygagaatatgggttagtaggyggttaygggtyggyggtyggaygyggtgaatttgtygyggtygggygygtattggygyggygagtyggagtygagygtagtygggggaggagggttggygtaggggygttygggyggagggggtygattatttattattaaygagttattatttaataagyggagagyggttygttagtygygygggaggygttyggggaagggggttatyggtygagygtagygtatattygtggygtayggygggyggygyggygtygaggatattygggatygygygyggagtyggggygggttygggggyggygtagatttygggygygggyggttygyggygttttttggttttyggygttyggggttagygtagttyggggygagyggggygygggtyggggagggggagttgttygygtattttatttttttttttttygggygggyggyggyggttygttgtatatatttyggygtatttygttaggtygygtatagygtttygagtttaggygttttttygtttttttttygygttttgyggyggyggyggyggyggtagtagtagtagtaatatggttgttgatgggtgtttggggtggygttggyggygggaggagttttttygagtttttgygtyggttgttygttgttagttatggtaaatggtggyggyggyggyggyggtagtagyggyggyggyggyggyggyggaggtagtagttttagaatgagtagtaatatttaygygaattattttagtttagaygygttttttttttttttttttttttttttttttttttttttttttttttttttttttttttygtttttggtttaygagtttaagatggatgygtttattatttyggtgattatggaggtgtygtgygatagtyggggttaaygtatgtggtgggtttttttggttttttttatggtgatttttttygggggtttttttattattttgttttggyggaygtttaagtatttgtggatygtgtgttgttattgygggggtaagaygaaggtaaygygygtttygggygttygttttttgygttagttttatygtttttyggygttttttgtagtttattttttygtttygygtygygtygtgtttttttttattttygtttgtttttttttygtygtttttttttttttyggttttttyggtgttttyggatyggggtagygggyggygygtygggggtgaggagttgtttttagttagtgygtttygggaygyggaygtttaattttgtttttttgtttattgtagggttgttggyggttgyggttggggtyggggtyggggatttataggttygggtgtygtggtgyggggtggggatagttaatttagyggggayggaggaagttgggggtagttgggtgygtgttttgtatygtttatttgtyggggttyggtttttggyggtgggygagagggagtatattygtttatattttaggaatttgttggggagatgagttygtggggttagaaagaagggaaaaattttttgggtaagggagagaataattttgtataagggaatttygggggaggagtatggttygagataatagggggatttygaggggygagagaagttggggagatttattttattattgggggtagtttayggggttgttatttttggaatgtgtygaggtygtatatttgatgtaattttttatttygttttttaggtgttttagtggaatatattttaagtttttyggtttttgtttttttgtttttaggttatttattttgggttttyggaaatgttattagtagygyggagttggagygggagttygtttgaggtygyggttttaygyggagygttttttttggygttygaggtggttagatgtygtyggttttagttatttttggtgtagaygtttatyggtattgaggttggygatattttyga

SEQ ID NO: 6749 - DNA, 769 bp, Artificial Sequence
  Description of Artificial Sequence: Synthetic polynucleotide
ygttgagtygtagggaagttgyggggttagttgagtagtyggyggtttgttgggtttttagtgtygygygatagtaygattygagataaggtatttggggttggtgttaggtagaggtttygygttgygtggtyggyggtaatagygtttggyggtyggtttygggyggggttgtaggygtygggttttygyggtygygaggyggggttggagggygttgygggttgygyggaggttgygggaagygyggggagtaygyggagttygattagtagggagatygygtygygtygggtataggtaygggattygygttttaggagggygtagygagaggygtattgygtatttaggggttgyggtttyggtygtygtgyggtgataagttgatttttygtygtygtttagttaagttygygyggggtgttggyggagatgtygtatgggaggtttttttaaygaggtgtaaatttaagttatttygtttgagtgaatgaagggayggygyggggygygggtggggtttatygtgataaaagtttagtatttggtttaaattttttttttttttttgttygtaggattagaatattygatattaaaatgttttagtgtagtagaattttttagygatttyggtggygggagagtagtattttttaggtatagttgtgygtatttttygggttttatygatygtattatttgatygygggaaaygaaatttgagtttaggaatttgaattgttttaygtaygttygttttygg

SEQ ID NO: 6750 - DNA, 1169 bp, Artificial Sequence
  Description of Artificial Sequence: Synthetic polynucleotide
ygggagttaggygygygggygggggttttatyggttatttygaaatygtagaatgttttagggttttygggatttgtgggtttaggggaaygttygggaygyggagygggtttagtttatttgtyggaygtttttttygtttattygaattygggagtttygtaggagggatttttttygtttttagtgattatagttyggattygggttgygttyggygggtaaggttgggagtttttygggtyggaggayggggygtatgggtttygggtttgtagaattygyggttgygggagttgggtttttttttttttaattygggtygygtttyggttggtyggaggaggtagagtaggggtgyggtygtgtgttygagygggagtggggygtttattttyggggagaagggggatygggaaaggygtagygygtygagtattygtttatatttygttygtttttygygygagtygggtgygtttttaatygaatyggggygggygtygggagagtygggttttttygagattygygtttttttttygttttyggtttattygggttttygtaggattagygygaatagayggggygattygyggtygagatttttatttaygygygyggygyggttagatyggygagygttttyggttygaygtttttttygattttyggattttgggygttgagygggagggggaggtattagtttygttyggtttygagtygttttygtttttttggttygaatagggggattttaaggtttttttygattttttygygttygygygtatygygtattyggagaagaagttgygygyggaattattagataggagttygygtttttygttttatygtttattgyggtttyggttttttygtygyggattttttattttyggttttayggygygtttaattttatttgyggtttagatttygygagtttygggtttygtttattyggtyggyggttttttyggggyggagygyggygtttttggagtyggtatttyggatttyggygtygtttygygtatygttttygttttagtttttagtggygyggygttttttygygatattygygggtttttaggagygagtygattttyggttgggtttggagtyggggttaagtttattyggagggagtaygg

SEQ ID NO: 6751 - DNA, 6036 bp, Artificial Sequence
  Description of Artificial Sequence: Synthetic polynucleotide
yggtgyggttttgggtattgattaygtttatatgtgatggttttygtaaygtgtaggtttygttggggagaggttagygygggttttaggttttagggtttygggtttattgtygggattttttttagttttttttttattggtttygttygtygyggttgygtygggtygatattgattttagygatttttggggtygttttagttggtagttagtattttttttgggatggggtttaaatgttagtyggttyggygtttgtattagggttttatygtaygtagttygttgttttttygtttttygttaaggggtgygataggtagggggattygttggtttttgttttttttatttttatttttttgggtttygtyggagygtttgggtttygggttttttgaatatygtttgggyggggttttttgtyggggttyggttatatttttattygtatttttatagttggggttgagaatgaaaataatttttgtaaagtttttattagygaattatyggyggttgtagtgattataggtttygtttttgygygtygtaaaggtttttagttggtaggttygtygyggygtygtttttttttagtttygttttatttgyggygggygtygttatttttttagygttgtttttgygaagtagyggatttagatttagattyggattyggaggttatygtttttttygttyggggttaagtaayggttttygataggggaagggtygygygtttagggttgggttaggaygtttttgttagygttttayggtygggatttgaggtttagyggtygtttygtttttttttggattttygyggtatagaggtaaggtttttyggtgaggygygaggtygtygtgygttgggygggggttttgagagtggtggggttygggtgggtagaggttttggggygatttatgggggaygtttatagygtaggtttatggggtagttagatygygtygtagggtygggagagaaygttttagaaggtyggtttaggttattattttaggagggtggyggaggtagtggtyggggtttttttygyggtygagtyggtggtggttgygattattatggggttgggtatatagttgaaggggggtattygggtygagyggttgggggagtygtgtyggttggyggggaagttttttayggygatttttaggttttygtgtaygaagggtgyggagatgggagttttggygaggttgggatygtttaygtygttgtygaggagggagagttggtygtyggygggggtttyggggggttttttggtttttaggttyggggaygtgttggagttggttttgggggyggygattttttyggtttggattayggygtygttggttttgygyggygggggttyggtyggggygttttygggygtggagtttygtagtggtagggtygtggygggaagygtgttgygtaggatgtggggtaygtttttatttyggatgygtygttaggtygtgttyggygyggttattttggggagyggtyggggtttttygtygttgttgyggygygyggygtyggttgaggtaggggtygyggggayggygtygtygggtttgygggttaygttgatgtgyggtagygaygygtagygtttgatagttttyggtygggyggygggygygygtataggtaggygggaygggttttyggaggtggtgtgtygggtagggygttygttagggttgggtygggtygyggggggtygttgtygggtyggggtygggttttgtyggggtgtygttyggagtttttygtagygygaggagtagaggaagayggygggtagygygggtyggtygyggyggggygaggygttttggggggtagaggtygyggattyggtygaggatagttyggagyggyggygtygtaagttyggygattttttgatgaaggttagttgtygtyggaagttygagyggtyggaggattygttgtygttggagagggttgaggttataygtattaggtttaggyggttttygygygttttygggttygtttyggttttygttyggtttttggggttyggtttygggattgttygagttagyggtggyggtttaygtygggtyggtttttgtatgaaygggattygtaygggygatttttgygttttgtgttgtttygttagaagggtgygygtyggygttttgggtatyggggaggtttyggggtygggtagggttttagtagtttgggtgatyggggggygttttttgggtaggggttgggaggygggygaggtttgggaggagttggaggagggggttttggygaggygggygggyggtgtggygtttttggggggttggtttagygtygttagtttygaggttttggtaggtyggtgtaggtttygygatygttgttgttyggggttygggattttggttggagtygygggttgtgttaggtaagggggygttatttttygyggtgtggygygggggtygggggtttttttgggttgggtayggggtgtygggttggggaygtagattattgttygttttyggagtatagttggtatttygggygtggttttttgtgtgttaygtggtttttyggggtttgtaggggaaygggggttttygttggttttgattgaggttgygttttttttttttggtygtygggtattgtttattttttttttygtttgtygtttttttttgtgtttggggggttgtagggtggattttattgatagttyggataygaaggataggatggagtyggattyggaygaggtttttygygtggtagttgttgtttggtgtagttaygtgataattgaattggygtttttttggatggygygttattttaygttatttaggtyggaggttyggttygagttygttgttttttygtygygttttygggatttttttgygggtygtttatttagtygggtggttyggggtttgyggygtygtaggttagatayggggggtyggygtttgggtagggtygagttgatgtatygttgtagaagttttttygyggttygygggttgggygagttgtygygttygttttttgggttygggtttttggtgatygygggttttyggtttygtggatggayggtyggyggtttygagggttygggttygttgagggagttggyggaggagtttagggagtagtagggyggggtttygttagtaatgaggttgggttgggttygggygggyggyggggtagttggtgtagttttggayggggtaggggttttttttyggttttgyggaygttttygygtaaaagygygagggatggtygatgtgygtyggtgggttggygtgggygyggtygtygggggtttttygttygagtygttgtygtagaagtagtatayggtttttttagtgggygtygtgaggtatagygattggagygtttygttttygygggttyggtygggttttgagtygtttttgtttgygggggygttygggggtyggtttaggggtagttttagttttgttttgtttttgttygygtttygagattgtttygygttgyggtyggygtttttygttttgtgtyggtgttttatggtttgtttggtagaggtggggyggtyggtgggtttttgtttgttygttggtttttygggttggtttttggggggtttttgtagygtttygtygttgagygaggyggygttagagaagttgatyggygtgtttttygyggagttagtgtaggagtygtttttttgggtyggggtyggggygggtattaatatgtagaygggtayggggagtgygyggygatttggtattagygyggaggttattttgygtagtygggtaggtayggyggtttttaggtattttygtagtagttttagtttttggttygyggygtygygagggygagaattygtgggygtyggttttttttttygtygtyggtgttttgtaaagtggaggtyggygttttyggygttttygtygygttyggggtaggtygagggtagtagtygtagttttaygttttgttgtaygtagtgttygtgtaaggttagygygttgaggttggaggygtaygagaagttttygtttggtttttttayggtaaagygtaygttgtttgygtttagtttagatggtagtyggtagygttttyggtagtyggygatgtttaggaagygttttaygtagtttttttattgtaggttgaattgggtggtttyggggggattttgtggygygggygttagyggtggygttttgtttyggttgggaggtatggtttgttyggggttgtygggtagttygttagggttgatggtgtygttgttttgttygttgtaaggtttattggggatggagttggygatggaygggttttygaagttgtttagygagtttatagagttgtagyggtttagtataagyggtgttttttgtaygtagtttttygaygagttggayggygtggygttttttatttttaggtttyggtttyggttaygtyggggagtyggaatggttaygggtagygaggtggtttygggygttygttaygtgttgtttagtttagtttygttggggtyggttttttttagtttttttagggaggagttattgttatttaggttattattttygttggggtttgggyggtyggtygaggatagygaggaaagggagttgtatygggatagygagagtggttttttttgygtygttagtttttgtagtgttttgttggttatagatagyggggtagtygttagtttttygggaattttgtttaggtggtttgtyggtagttaggtttgttttygggtttttggagagattttaggtttygygaggggttttgtattygtttttgaggtatttttaagtagtggtaygtgttgataggtaggygatagtttgatggtgygtaygygggygtyggyggaggtggtttygygggtygggggttyggtttggtagtygggtaggttaaggttaagtyggttgggtygaggttgtttatatttggggttttygyggygygaagttagtgyggttagygggtagggtagtatatgttygygtgggtagtattygtygttggtattgtygttgttgaggttgtygttggagaggttggygtgggtygttttgagtygtagtagygggtgygttyggttttttgtttttygtygttygtttttygggtygyggtatggygagtaggattgggygyggttttttygtggygttttttgtttygggtttttagagttgaggttgaagttatygtyggaygaggtgtgtagggyggagatgttttttattagttggtygatgygygttattgtaagygttagtttggttttggttttggtygttayggttgtttttttattggtgtttttttttgtttttttgtygtttyggygggtgggyggggtgygagttagygtttgtttttgtaggaaggggttgtttaggaagagggatagygyggtagggttggttggtttttyggtggtygyggtygtagttagggatgayggtgtatygtygtygttaaagtagttygaatyggaagtatagttttgggttaggtygtttaggtgtygtaggggyggtagyggttttttagtggyggtttyggttgtyggygggttttgtttttttaggtgttttagygtttgygygaggtgtygtgygtttagttyggtttttagygttygttgtttgygtaygtataggttgggtaygtagttgtttggggatayggyggtggyggtygtttggtgtttggygggtygatgggttagtaggttgygtagggyggyggygttgtttatggygattattttgtgtttggagtgtattagattaygtagtatgtttayggygtttaggttttatagtagtttttggttaygggygttgygggtygataggttttagagygtgtygtaygygttgtttaygatggttaggttgtgyga

SEQ ID NO: 6752 - DNA, 3400 bp, Artificial Sequence
  Description of Artificial Sequence: Synthetic polynucleotide
ygtgtagttgyggggtattyggggttgggtttatttgygttyggggtygtataggtaggtagagagagtygggtttagggtataggtttgttttttgttttttgygttyggggaagggggyggtatagagttagtgattatagygtagygygtatttgttttygtaggttttyggagygttttygygygtaagaaggygtagatygygtygtttttgtagtygtygtygtygttttyggttttgagygaggagttgttttggggagatttgtygtttaataagtgtttggtgttygtttygttggtggygttgttgggttyggttttttagttgtgtygyggtgagygtaggttttttagaggtggggygaggttggggtttatttgtgygtttatttttttaaggaaaggygttgtgtygttagggtggggtttgggagttttttttttagggttgggttttgtaygtttttaaagttggtttgtgtatttttttttaagtgaygggttttgygygttttttttattyggtgtggattttttgyggggtttatttttttygtygygagtaggttttggttttyggatgaattttgtgtaattttttttgtttygtagygttttgtygttttttttttgygttttttttggggatygtttagttygtgagygtttttygggggtatttttgygattttttttttgttaggggttttttatagttygtggtyggggggaagaatgattaattgaaagagygaggttyggagaaggggygtygyggtagyggagtttyggagtttttttttayggttygggggtatttttagttttagtygtatygggggagttttattttaattgtttagggaggggggttttaggggtgagggagggatggatagtgtggatygtgtttyggtttagttgattygggtttygattttgtygttgtagaygtygtttttggggaggtagtattttaagtaygtgtgttygagttttgggtttygttaagtttagtttygagggagttatygtygtttttggtaagagtttttttttattgatygygggtattgggatttttatttttaaggaaagaaggagttygggtyggggggaaggtgggygtttattttaggattttattttgttttgtagtttaagttygaggtttaggygtttttattagygtygtttgygtttygggtygaggtagaggttagatttaagattttygggagtygggaggttgtagagaaygaygaagaggagttyggygaggttatyggagaggtygttygggaggatygtgtgattttygtagatyggggatttaaggagaggtttyggagagaggggaagtygyggaaggagaagtygyggaaggaggagagatttaagaaagagaggtygyggaaagaggagaggttaygggtygttagggagtttygggaagttttattttagygttgggagttaygygaagggggttatyggtygtgggtaygggattttagggaygtygagtttaggaagaagtaggtttgggtgttttygaggygtttygaygaggagtagyggtttgggagtygttagaagtttygygtaggtaaggggygggattgagtyggtttygygtyggagtttaggggttttttttggaygtttygygattttggygaaataaagygagtgttgyggtygtagagttatttgtttttttaygtttggattyggtattaagttyggggtttgaaagayggtggtggggygttttaggtaggggagagatagygagygttatagggyggattygggtygtgygygaggagagayggtaagggaggttttaygggttttttaataygtayggatattttagtyggttgtttgttggtttttattggggygatgtttggggttygaataaatatgggaaggggygygagttggggygygttyggattttyggggtaggagttygygyggygtaggggttatyggtagttatattyggtggttattatgttgggtaygtggtgygygttgatgygttttttygataggttgatgagtagtttgttygygtaggyggtgggtaygtagtagggtgggygygttagggyggttttayggatttgtatttttagtagtagtattaygtggttgtygtagygygggttgyggtyggattgaggttagtygtataygttttggtaattgttggtttggtaggtttyggggatgagtayggagygttyggygyggaggtttaygttgagttygygtagygygtayggttygtyggyggyggtggttttygygttgygttgtgttygattyggttygygyggatttygttygygttattttaygygtaggttttgtagygtttttaggagtagtagygttygtaggggatygtygaggtygtyggggttatttgggtagagygygagtaggygygttagtagyggggttgtggtyggaggtagattygggaggtttygtagttyggtagtygtygtttgtagtttagtagttaygyggygygttagggtygtggtttayggygtygaygtggggtygtgtaggggygtaggattttyggtggtggtygtagtgggttttagtagtagtagtagyggtttttygtygtygagtaggygttttagygtygyggggttygataggttgattaggttttgygggaagtyggttagygygttyggatttagggttaggygyggygyggaggttygggtyggggggattygtagygttygtattaggygygtgagygtttttaggaaggggtttgygttgggtggygatttttygagtttygyggatggtttggaattygtaattggaggagttgagagyggttaygaggttaygtygttttygttygtttttgtttygtgtttyggtgtttgygygtatttgggyggygggaagggtayggtgtttagttggtygtgygtaggtagyggygygggttyggatygyggtagtaggagtagggtyggggttattygtgtgaagtagyggtggtygtygtygaatagtagtgtttgtagtygggyggtatttagtygggagtttgyggtgggtgggtaygyggttggtttaggggttgggggttygggggtagtygattyggtttttygtttttttttaygyggatttatttttttygyggggttgtagggttaaggttagttyggagtygygttaggttttygtagggyggtttatygttaatattaggtagygggtgtttygggaggggtagaggttttgyggagattagggtttagttyggttggatggaggtttatttagtttygttttatyggtttttttttttttatygttattggttttaygt

SEQ ID NO: 6753 - DNA, 1143 bp, Artificial Sequence
  Description of Artificial Sequence: Synthetic polynucleotide
ygggtttggygttttgtttattttttyggaygggtagtttatttttttttattttyggttttygtygygygtattggyggygttygttttaygttttaagaatttygttttttagggtgggtggggggtgtaygttygatagggttaggttagggttaggygtggagttygygtgygtttygggatttygttyggggygygygggaggygtygggggtygyggaggyggggyggggaggggtyggyggyggyggyggygygyggaggagatygtagtgyggtyggygttaggattygygggggttttttaggtygyggygtttttygtttttttttatttttygattttttttygtttttaaaatgaggaaayggagtaattygttttaagttgtgtagtygggatygtttyggggtgtgtagtyggttygyggaggtttttttgggggygggygyggggygyggttygggggygttttttgagtaggtgagtaygtyggyggggagaygtggagagatttygaggtyggggtggggggaaatttygagggttttaggygggggtgggttygggaygtgygtaggaagggtyggtgtgtgygygagtgtgygygtttygggygygtagygggtgygyggttggggyggagggtgtttagaggygatyggatttygygtggtggtggttggggttttttgggtgygggtgtgygyggttaygagtttygggygtgtgtattygygygtttaygtggagggttgtgygygtgtggtygaaaagygtgtgygyggttttgygtagygttttgygtgttygagtggttyggygttggygtttaggtgttttagtgtggggyggttgtgtgtgtgtygggggygggggataggtgygtaygtttttaggtgtggagygtttgtgygygyggatgygyggggaygtgtgygtatatttgtttttaygtggaygtggttttttgtttgtttgygygtagttgtgttygagttttgtgtgtttttgtgygtgtgtatgtattygtatgygtgtgagtataygtgggattggaggattttatgggaggygtattttggaggggtygagatttattttttagtatygtttattttttagttattagyggtygg

SEQ ID NO: 6754 - DNA, 220 bp, Artificial Sequence
  Description of Artificial Sequence: Synthetic polynucleotide
ygtggtaaattygggtttygaygatagaggtagygtagaagttygtttttaaatgagataattttattaaaattataattttttgtatttttatagygtttttttagtggyggagattttaggtgttttaygttagggtttattagagaatyggggygatygtaagtttagtygygggataggygaggttygttagttttaygaagygttatyggtaygt

SEQ ID NO: 6755 - DNA, 1860 bp, Artificial Sequence
  Description of Artificial Sequence: Synthetic polynucleotide
ygtayggaagtttttgtttagttgttagygygygtygttaggggttgtattgaagttgtggattygggatggggaggaggttggyggttttygaagtagggtttatagygggggagggttagygtygtttggyggtggttgygygtggttagtgyggatttaggttyggttyggtyggygttgtttgygtgtggttygggyggagygagggtttttggagttyggttygttttgggttttaggaagttyggygtgtagygttagaggtygygtgtgttgggggagggaggagtatagattgtgtttgggggtatttaggaygaatttatagaggggtggttttgttttatttagggggtgtygtgggtaaaggttttggggttatttgtttggtgttttggagggygtagggtaggagtygtygaggttygygggttattgtggggygyggaattttagattaggtattygyggtttaattttygggttaggggattygygggggttttaygaatttgtttggtttatttgtgtaatagaaattygttygygtttagtagygttyggggtygtttgygtyggattygtagtttagtatttttygygttttggatttygaggaggttaggtagagagyggttygygyggttttygtttgygtttttagtttygygttgggtagygggatatgtttggtttyggygtygttatttyggttttygtttgtttttgagtgyggagttyggagtttttttygyggtgygttgggttttagagggttagaggttattagggggtyggtatyggygggagtttagtygggygygttttyggtttttttttatttaygtttttygyggtygttygggtttaggggygtagyggggaggagatttyggttagggtyggggagygygagggyggggyggggttyggyggggaggggygygggygggyggggatyggggygggggtygggttygggggyggyggyggygygggygggaggaggaggagtttttygygyggggtaggggyggagygagyggtygygtygyggagttaagtgagttygtttyggagtygygtygtygtyggtttagtatttygggygttygtygttttygtygtygtygttagygyggggatgtaggatgtaggygggygttaggttttagyggyggyggyggtagttgtagtagtagtagtttyggyggyggtagttttttttttggtygatggaygtagagtygtygtygtygtygttttgggtttggatggtgtygggttyggtygggttgtttyggtttagygygggggtygtggttttttyggtgttgttygtttyggtttygtygttygyggtttygttgtttttyggttttttyggttggtyggtttygagygagtyggtgttttygttgttgtygttgttttttgygttagatttygtygtygtygtygtygygtatttttttttygygttttaygggtaggtaaygtgttttygtttygtttyggttygggtygtygttttttttgtttttgggygygttttgttyggttyggttttggttttyggttygygygttttttttttyggyggttttygtygttttaaatttttaggayggagttyggtagtygtgtttyggygagaaagttygtgtttggaygttyggtygtttattttygtagttttggtaggtgttttygggtgtttggayggagtygtggagggattygtygtttaggttygygtggggatygtagggaattygygttaygtygggggttattgtttatygygaggtgttgaagtggtttygtgatygtygygggtygtggttgatatygygg

SEQ ID NO: 6756 - DNA, 441 bp, Artificial Sequence
  Description of Artificial Sequence: Synthetic polynucleotide
ygtyggggtttyggttgttagygyggtygttatygtatggttgaaggggattgaggtygagttgggtaagaattttgggygtagattgtgaagttgattgyggggaggtttgggtttygttatagtygttttttatyggttttaattagtttygttttttttttygggatgtyggatyggtatttttattatttttaggtttttagggggttttggygttttagttgtggattttttaatattygtaggtygtagggttatataggttgggtttttaygtgtagaggatataaagtagatagaygaaaattggagtttyggyggtagygagaaataaaggtygygttaaatttyggaagtygttttgtttgttttagttgygggtttgattggayggtttttygtttagtgttttygattggataaygtttaaggtttygt

SEQ ID NO: 6757 - DNA, 5587 bp, Artificial Sequence
  Description of Artificial Sequence: Synthetic polynucleotide
ygygggaagaaggttttggggggggygttttygatttaattaggaaggagtatgtatatgtaaatgygtttagggggygggttttgggttyggagtttttyggggygtttyggygtagttttagttttgygttattttygygygtgygtttttttttygygattttttattygagtygtgtttttggygtagtaggatygtttgtttygatggyggygaygttgaygaggtagtagtagttgtygygattgtggtggtgggygtgtgggtygtygaggttgtygyggtttyggggattgygggatygatggyggygggagggttttygggyggygggtttttgtygtygyggtygggttyggaggtggtayggttygyggygttygygttgttggygttggyggygttggttgggtygtggygaygygggtygttgttttggatgtgggatayggtttyggyggtttgtatgttgggyggygygaagygygagagtaygygtagtatygtttgggttttgtgtttttgygtgtygtygtygttgtagttygataygyggtattygtataygttttygttttgtagtygtayggtagatagtygaagtyggtgtgagatgttattgttttggaygygtayggtttgtaagagagtagggttagaggtygggttgggtagtttttaaatttatttttttggttattttggtygtygygtttttttattygygtattttaatatttttyggattttggtttgtttattattaygattyggttttttttttattygygtttatttagtggtatagggtttttaattttgygtggaygttaggtagttagttttttggattgtgtttttaygtttttattaygttaattaaaygtttattttgtatttgtttygtttatataaattaatattgtttgttttttygtagttggygttttagaagggtagagtttatttttttttttttttttttgtatttttaggaaattttaggttggattttttgttttttaatttttttaygtttttttygtttygaygygttttaatygatagtttygttttagtyggttttttttatttttyggagtayggagggtttgttygaatygttttttaaggaaagttattttgttatyggatttygttttttatagttaatattgtgtttttttaagaaggtaagtaaygttgaggttgttgtttggttttttggttatttgttattaattygttttttygygggatttttagaagttttttagygaagtgttttttttttgygtttyggtggggatttygggaagtattgttttayggtttttaataaatatttagggagtttttatttttgaatygagtttaygaggaggtttygttatttttaggtttttttaygttttaggtgggaagtttgggygtatttttttttagagttagtaattttatgattygggtttttygtagtttggtataattattttttatttygttttttgtaagtttgtaatatttygtatttagattygtaatttaggyggaggataaagggttgtagyggagggygtagagtagatgtttagggyggggtagagggggygggaagttggygttayggtygyggygagggygagtagtygygygttttyggtgttaggaggaatgttygtagagyggaggttggtaggygygagaggttttaagygygtagttygattaaggggagttttataggttagygtygagtygaattaggggatttaagttttggatttttgatttatataaaagagaattygattttgtaatyggygatagatggygttyggataygtygagtagttatygatgtaaggttgygatygttgttttatttgygyggttttatatgygyggtygtygyggtttgttaagggagggagttgygggattygaggyggttagaaggggtttttygyggttygygttgggttttatatttaygttgattttagttgtatttttatttgttatttaaaatgtaaagagggagagagagaygtgaggttygyggttttttggttaggggaattyggattygtttttaggtaagggtattttttttyggtaggttaggatygaaatygttygggggatgggggttgagggtataaaggaygttyggttttttaagagttttttaggaggaagygggttttggagttagtatggtgtttgattaaygggtggttgttttggtgtatatttgtyggttgaattggggagattggatggatattagggtgggaaggaaagtttttttttttttttttgggtatttttaggttttgtygygtggtttaaaatttttttttagtttattgggagtygtgaagaattggagggagggtygttgtgtttggatagtatttagygggaggtttagtgggagtaattttgggtgggattttgggagaatgtaggtgtgtgtaggtgtaggtgtgtgtgtaggtgtgtgtgtaygygagtatattagagtgtgtaagagagtgtgggttttgaggtagataggtagygtgggtttgttttyggttatagagaagtggtttttttgtgtttttgagggttggaggttttgtyggtttttyggtattyggttttttggtggtttttggaaygtagtygtgggagttttggggtttttaaagtggtagagggyggggagagtttgatgggattaagggggttttttttattatttagtatttattagagggtygtagttagygagtaygagtaagygattaggttgaggtgtggttttttaggggttgggygtgaatggagttttgggaggtggtgggaatagygatgttgttaaaataattgataggtttgggggtaattattgttgattttgaagatgttttgggatgygaaggtggaagatgggttgygttatagggyggygttttgygygagtgaagttygttgtttttttttttgggttagttttygtygtttygggygygagtygggygygygtyggtatygygtgggyggygggttattttgtttygggygttyggtaygttgagygttagttygtgtagtagttttyggggtggttttttgaggtattattattgaatttttagygaataygaggtggtttygttggttyggaaygygtagggtatttygatgtygtttttttttygtattgttatatttttggggatttttgtgaatgtagttgggggtggggagagagagagaggygtgattagttgtaggtygggggtttggggtaatttaaagygaggtagtyggtttttggttggttggttttgtgttttttatttygtagttgttttttggygtayggtyggaggggttagtaaagttyggggaagyggttgtagggtygaggtagggatyggttatyggttgtttattgttttttttyggatggggyggggyggtaggggygattygtgtttttttttygtttttggtygtatygttagagtttggttggggygygtttattttygtttttygtaggtatttttttygtagtyggggtttyggygggattgggaaygattygggygyggygttgttgttgyggygatttttygtygttygtttttttttattttttygggtttaggttgtatagygggattgttggagatygygaagtttttyggttygtttttttttttttttttttyggtggyggttttagtaaagattttttygagtttatagyggtagtaaagttttygygtttatygtyggttaygaagagtagtagggtatgtagtagtagaggyggtaggtattygagggtatygagtyggtttygttgttttatttttygyggggggygyggtggyggygggggttygggagyggagaggyggyggtygygtgggttyggatyggtttyggttygggttaggaygttttygagtttgttatggtttygygyggygtttttttttttggtygtyggyggtygttaattagtttygttttttygtyggtttgttyggtgyggtttyggyggggggygttgygyggggtgtgtaggagaygyggttttatygggaggttgttggygatyggttagtgtttttttttgttyggtygtttataggayggtggggattygyggtttagtttttgttyggygggtygggtaggggttgggtygygtygggatttatttttggtygagggagtgygtgttayggagtygygagtttttgtttttttgtttttttttggttttgttttygattgttatttttttyggttttygtagtygttttygtyggttttttygyggtttttttygtagggygagtgggygtttagtygyggygygtagatttggygttygatttagygtagygyggggagagygggttyggygtggyggattyggagtyggagagaggyggggagagggggaggggaggggaagggagggggyggttagtggttgggygttaagtygtttttatygttgtatygttttygttttttttttttttgttatagttygtttygttttygttttagagygtttttttttttttttygggggtygttyggagggattatygtttttttggttggagtatagtttygtttygtattygtttgggttgggagtttttttatttaaattttttttggtttttttttagtttgtayggttygagayggtygtttatttttgtttttygtgtgtttttyggttttttttgtagtttttagtttttaattttttattttagtttgggtaattagttgtttygttgtttggtttaggtttgggttatgayggatgggtgggygttyggggtygygagaagggyggaaygttgtgtttagtyggagattaygttgggtggyggyggtagygtygggagtttgtagtgygygagggagaagtgagygtatagygtttagygagtaggtgtttgyggygyggagagygtataygttagttagttygtagyggtygtgagtgayggtaggggyggygggggtggggtggggtggggagygtygggtaygatttagggttygggaggttttygggagggggyggggtttttgtttttggatygygggtttttgtgtttttaygygtttttygtyggtygtggttttttttttgttyggtgtaaagygagatgtygaggyggtaggaagtyggaatttatttttygtttgttttggygtattyggtatttyggtattttttttagtttttattyggagtttgttttttttttagttatttgagggagygyggtttggttttygaaggtaaatgyggggtggatatgtggttyggaygtagygygtagttatagttataggggygagttttaaggttygttttgggttttttttatttttttttttygggagtttttagttagtgygtttyggtatttttgtttttatttyggtttttaygttttagttttgattttaggttggggtggggtagttyggtggatttaygtgtttgttttttyggttattagtttttyggaggtatygt

SEQ ID NO: 6758 - DNA, 3643 bp, Artificial Sequence
  Description of Artificial Sequence: Synthetic polynucleotide
yggygyggygygattagtagtyggtttygttygttygtagttttgtttttagyggyggttattgggatygattgttygttttygatttaggtaagatgtttaattgygatygygygttttttaagatygtttttygagtttygttataggtataygygtggtttaaatattttatttggttygaaaagttagtagaygggggaaaaaaaaaaagttgtgygagtagttagtygggtagtttyggagttygyggaggtygttttttygtygtttagtygtttagtygtttataygygaggtyggttyggggyggygygtagttygyggtatttygttttyggttttgygygtttatttyggggygygtygaggttatygtagggtatttatttggtatttgtttttgagtgtgtagatygtygyggtttttatttgggtttttaaataagttttagggagaaagaaggaggtaaaaaaaaaaaatttaattatgtaaatggatttyggattgggaggygygggatggatttgaygtygttattgtaygagttttyggagtagtttygggtygggtagatttatgggggygygttayggttaygttaggtttygtygtyggagtatttygaagttaattaaagyggtaatgtttatttttttggygatttttygtgygtgggtttattattttattattaaattygatttyggygggggygggggttttgtttttaygttttttttttttttttttggtygtttttttttttttttttttttygttttttattttttttttttttttttygtttttttaagtygtttgttttttatttagtgaataatgaataaagatgtgagtgatgggaaaagatygtttttttttttaattttagtagagagtaaagtyggttttaaagtaaaaatttagttgttagtattaaattgggaaagaaaatagygygtttttagttttattattttttttatatatatataygtaygtatatatataygtaygtaygtatattttattttaagtttatttaagttttggttggagattggggygttaaggttagggygygyggggttgtttaattygtyggggatattagggttggggaayggygygtgttttggttaggygtgtttttygygtttattttygtyggtttttttygtyggtttttttygygtttttatatyggtygattaggttyggyggttygttygggttgttyggtygtyggatgygtttagtaaaygyggtttttgtyggatttttgttaaattgtatagyggyggyggyggyggyggyggttgtygggagaaggygtaggaggaatyggagggtygtatygygygttygtttatttygtttttttygttygtttttygtttyggtttygtyggtygtyggtttttattygygtataygatttagtttttaggaygtatygggtgttygagtttygtaggtygggatatttygtagttgtygtattttttgttaaagtgaaaaygaaggyggttgataaattaygttttyggygaggtattygttagatataataatatttggtaaataaaattyggtygtygttgttattygtaygyggggttgagatttygttttgttttttttyggtttttagtttttggttattgygtttttaattttaaygtttttygttttttaatattttaattttttatttaattygggaayggtggatatgttttttaataggtatatagtaggaattatttataatatagaagtgaaaagggggggatttaattttttatttgtttttaaagaaagttttgtyggagtttatttygtagagtgaagagtgagtaatataggtttttttttgtttagttttttttttttttttttttttaattttttygygtttygatttttttttattttatatatattygtttatatggagatatttatattttaaattatttgtaaaattgtaatagatgggygygtygagatttggatatttttttatttattaaaggaaagtttttttttaattttaatttttttttttttgtttaaaatatatttygagtttygtttaygattgttttttttaatttattttygaaaaataatgttttgaagtaaatagaaaaaggtttattagtaaagattatttttattttagttatgtatttgygttggggggaygggaggygtttttttagattgtattttttttagaygtygygtaagttttgttttttttttgttttttagagtttttaygttygtattttttygttttgattggttttatttttttagtttgggattggtyggtttttttttttttataatttgttatttatttatttatttattttttttttggttttyggttgggtttttaggtygaggttyggttggggtaggtgttgygggygtygtttgygtttgtaggygttayggttttttttggggtygygggttyggattttggtattttagttttgaaattaatttttyggttttagtttggttaggttttyggggtataggaggtygatgtaattataaaatggtagattttagyggttttyggygttygtaagtttgatatattgtaagtattagttaattttaattgaaaaaaaaaaaaggttgtaaattattttttttttaygggyggaggggtyggaatttygtagtgagygyggattagagaaagagygtaaggygaattttygttttaggtagaggagaaaatggggaaagttatttgagtagaagttttygyggttttagtttatttttttttttttttattttttttattttttagatttttttgaaagtttttyggggtttgagagtggttygygggtygttygygggtggggggygtyggtygggttttyggagttggaygyggggtttygatygygygtygggygttaggtttygggatttttttttaaagtaayggtttygggatygygggyggggaggyggyggtttaggygtaggtttygttygtygtygaagttttttagygttataygatgttyggtygtagtygtyggttyggttttttttttttttttttttattttttattygttgatagtttttttygttaaygttatagttayggatatttaattagatygtattttttaatygygatggggygagaaggaatygggyggtaggtttygtygagatggggagggggaggggaygggggggtygygttaagagtttaaatttattttgttatttttyggaygtygaagttgtttttttattygtygtygttttttygygtygygtttttygtatygygtygygtttygtgattttttttttatttttgttttttttattttaaatattgaaaygygggygttaggagtaaattygggtaygtaaayggagygttgtaaaagattgtgtttaatgaataatgaaatatgtttataygattgatttgattatttttyggggttgaggggggaygggygttttgttygygygttttattygtttattyggtagagttttgygaattgtttttagtttagtyggggtagggygggttygatttttattagtttttttttagaatygtttygt

SEQ ID NO: 6759 - DNA, 808 bp, Artificial Sequence
  Description of Artificial Sequence: Synthetic polynucleotide
ygggattttttatatttygggtygtagygtattgtgygagtggagggggtgagttttttagtagaggygtaaggagggtgtagggtgygyggtgtggttgtgggttgyggataggggtygggggygygttygggtyggtgtygygtggtgggagtagtaggygygtaggtagyggggagttttygygtatttagttygygggtgattattatgyggyggtagttgttttyggygyggtgayggygtttttaattgattttattatttttttttygtaaggtgaagtgyggtygttygyggggttygggygygggtagggtyggttggtagtygygggtyggygggggtagygttyggtttyggggtggtattatygtygggygtygygttaaygaaygtaggyggygggaggttyggyggyggggttygygtttttgtatygygatygygttagaaaatatttyggggttgggyggygtttyggagaygtatttttttgttatttttatygtttttggtaaygattattaatgttattatgttttatttttttttattttttttygtttttagagtygygttygygygttygatttttaggygtttygttttttttggaattaataataatgatttttaattaattttttgttagggttgtttgttygtgaatggggygttttttyggttygygggyggtaggygttttagttygggyggggggttagttttygttttttyggtyggattygygggggttygtaattygttygggygtyggttgggggtggtttygtagttttttygg

SEQ ID NO: 6760 - DNA, 3415 bp, Artificial Sequence
  Description of Artificial Sequence: Synthetic polynucleotide
ygggggtttttttgygtgtttygatatggtagtatggttgttgygtgtatttygtatagttygtgttgtgygtggygggttgtygttgtaatgtgtagtttattgatattgatggatgygttaatggttggayggatagatgttagggyggatygtatagygttyggygtttgagygggggagggttaggtagygatttagyggyggyggtyggttaygyggagattygagtttaggtygyggttygtagtgggagggggtygaaggaatagaggtttgtaagaatagygaggggatggaaaggaggagaaaagygygattagggagaattataygttttygtgtgyggygtttygygttgtgtataygtygtatygggygygtttaagtgggagtttygaaggtgagttgggagtyggygggagttgatttygtgyggygtaattygtttttaggygataggagtttagygyggttattagaatggtgaggtygtyggyggtgtyggttaatttatygttttttygtttgtaagaagygttttaygttttayggtygygttttttyggtttggaggagtagyggttttggtttttgyggtygygggtatttaaygygtayggygttttagttttygagttygttagttygagagtttygtygtagttygtttyggattttttgtttygtttggggttygtattttataatttygagygtttttgygygyggaaaggygttggaggyggttttatagtyggggaggttagyggyggygtatttgtattttgggagaygtttggatttagtttaagttygtaggttgggygagyggagatttttgattttatygtgtgggtgagattattgtttttyggtttaaaagaaaagaaagtatgttgtgaatttttgaaataaatttgtaaaaatagtygtagagaaaaaataaaaaggatatagggtagaaaaagagggagaaagagattaaaaaaagaaaaagataaggggagggggaaggaaggaaggagagaaggaggaagaagtttggggtttgttgttttaggagygtttaggtagtyggtgttggagygyggggygttygttttygtygggattgtyggtttyggggtttgygagagygttagagttttagtyggygygttygggygtagggtygtttyggggatagtgggttyggaggtygttttygygttttagtagtygtygttyggtagygttyggagtyggtttyggygyggtygttttattttyggtttgagagttggtttagggagaygtaatygagttygtagygtatygatgygtygtygttygygtygttygggtttyggttttygtttagtygtygtygttygggggtygttygtatgagtttyggtttattygygtttttatygtygttygtaagtgagttygygtygtttygtygtttaygtygtttagttagtttttttttgtygyggttagtyggtygggtyggttyggagttttagygatttygattattaattaataattaatttttttagtttagtagtttyggtaggtygggygygggatayggygyggyggttttttaggttttyggggggagtttttggygggggatgggtaggggagttyggtttttttttttygttttygtttygttttaggatyggttygygtygtggatggggggygyggttyggttttygggggygaggggyggggtggagggattttgattattttaaagttaggagaggaaatttgaaggaatttttttttatatygattttygggaygggtttaggaaagtttgttyggggaaaaaaaattgggggaagtggttayggygggttttgggggaggagttgggtggygyggggtttgagggttgtttttattygtttyggttygygttygttttttttttggagggggtttgttygtgggttttggttttttygggggaygttagtttyggttyggggattaygttgggggtttyggagtyggygggtggagaggagtgygagtygggtggggtagttggggggtggttggggaygaaygttgggtgggaataggggtggggggtaaygagygtttygggaygggttyggyggggttggygtygygttttygygtgtgygtayggggyggaggyggaggggyggtatttttttygttggyggggygggggttttaygygggtttggggtygggggygggggygyggygttttygygggygggygattgataygattattttttttttttttaagtttgtttgttgtygaygtygtygttttagtygygttaygggtagaagattggatygtygagtttygggtygyggyggyggttgygygttttttyggatgtygtgattttyggtttaggggygggggtyggggtagtatyggttygggtygttttygygtttttttttttatygttttgttygtttttttttygttttttagtttygaatttygygtatttygtttggggayggggygggggggggtagggtygtygttttttttygttttttttttttttggtttttggagygatttgttaaattttttatttygtyggtagygyggttttttttttttttttttattttttttttttttgtttttttttttttttygtgttttttttttttygagtttttttygttygttttttttttttttttygtaygttyggggttygyggyggagygyggygygggggggaygyggagagtttgggygtagtagtattttgygggyggtygtttttygggggggaggttgagagtaggttygtttygttttttygygggttygtygttttttttttttttgtttttagttyggtagyggyggyggyggyggtagtggtagtygtyggagaagtattatgtygaggaggaagtagtaggygtttyggygygtagtaggtaygagtygtttttttttttttttgtttttttttttttttttttttgttygtttygygtttttagygggygygatttygtttttygtttygtttttttgttygtattgagtaatttygggygtygtttttttgtttgggtgygtgygttygtttygggtatygggygtttttyggaygtttygtygygttttgtttttttttttttygtatttatttggggagtygttygyggagygygttgagtygygttaggtttttatttttttagtttttyggttgtagagggaatgggaagtaatttyggtttggttttttttgtgggtggygggyggggttatttgagtttttygggatatttttygygtttttygagyggtygatygtygggggattgtttggtgttygtygagttagggagygygaaygagtgagygagtyggttttttygg

SEQ ID NO: 6761 - DNA, 3415 bp, Artificial Sequence; identical to SEQ ID NO: 6760
  Description of Artificial Sequence: Synthetic polynucleotide

SEQ ID NO: 6762 - DNA, 1592 bp, Artificial Sequence
  Description of Artificial Sequence: Synthetic polynucleotide
ygtgttttttttygttgattyggtygtttattygaggtagtttyggaatttyggattttagttatgygygtagggaattgtygggtygagygagtttatygaagtagtttygygtygtgygygtttygagygttygttttagttttygggtgagygtttttagtygtygttyggtygygtttgggtygttttttyggttagggggtagygggagtgtaggtagygggaagggagtyggtttygtaggtttyggggagygagygggygyggggtaggygtygggygggaggaagttagygtaggygtyggtygagtttygggagtygaggttggaaaygttggagygggygttgtttatygaaggyggttygggatygggaygygggttygagygatyggagygygggttgtygtggygttggtygtagtttaggttgatgtygttggatygggygttgtygttatygtygtygtygtyggatttygttaggttggttygtgggttgttygtaggttgygygttgagtttyggaatygtygygygtyggggatttygtttttygyggtttagttygttygtttyggtttyggggtygtygttgtttttttttttgyggtttagygygggygtygtttygtttttaggtttaggtygyggttttygtygttttygatygggagagtygtattygggttttagttttygtagggttagttyggttaggagtagggtygtttygttygygttygttttggagygttgtatggttyggttygtyggttttggygygttattttygttttygtttttygtygtygtttyggtygggtygtygtatygttygttygaagttyggagttygtttygggatttttgggygyggggyggggyggggtyggygtygggtyggggtygtttyggyggttaygygygggtygggggaygyggygttttgttyggyggygygygyggyggaggaatgtaagtttttaggygtygggtygygtttttttttygtygyggtttygygyggggyggagggatttttttgygggggtaggaatgygaggaaggagayggygttgyggtttttggaatgtggggggagtggyggyggtygygttgygtygggatttyggaggggygtggaggtygggttaggaygtaggggygggyggyggaggtatygyggggagagtttagggtttgyggggygttygggtygtygggtygttgggaagagttyggattttygtaggttgagttggaggtagttggygttattygggtyggagagatttaagtagtygatagttttttttatatttygttttattttttttttttgygtygttttgtttttyggygttgtagggtygatttagtttagtttggaatttayggygtttygttygtttygygtttaggaatattgtgygtttagygtagatgygtttttaygattttttgtttggttyggggttatgtggtygygtatyggtttttgaagtttttatttgattgttggggaaggygtttagaattaggagygggttggttggggattggttttygygttgggtygtttygt

SEQ ID NO: 6763 - DNA, 903 bp, Artificial Sequence
  Description of Artificial Sequence: Synthetic polynucleotide
ygggttyggttggtttttagtaggtttgtyggggtttttgtattttgtgttygggatttttaatttgygaatagtttggggaggttgagygygagttaggagyggattygggggtgggggtaagygttaygtgygygttaggtttttggtgtgttyggtaggyggygttgygtggttgyggttggtttygagggtgyggggggyggygattygggagggaaaatttttgttttttttyggggtttgttttgttygttttttaaattygttttatatttttttygattttygtttttgtaagygttatttgtagttttatyggttttygtaayggtggtggtggttggtggggggtttygaagtttgtttttggttagtyggatttyggtgggagatggaggtagaaatttyggttttttaggagaagggygtttgtttatttttttatttttyggggtttggggagggggttgggtaggggyggaagygagttggagtygtgtttgtygyggygttgyggagtggaatagatggttggggaggggagagggtgygtggyggggaggaggaggggtgygggggtyggaggatagggaaygaggaatttygaagtttggagttttttaggagaagttttttttttygtttttttttagaaaggggggtatatatgygtttgtttttttttyggagagttttggtttttgttttgtggtagattttgtygygtaattttttgttttagggygygttttttatttttaaattttygtygygggayggggtggyggggttaggatygttaggagyggttygggtygygagggttaatggggtygtttttttaggggygaggaggyggygggaaaygggttyggggtggggaaygagttttgggatygt

SEQ ID NO: 6764 - DNA, 1592 bp, Artificial Sequence; identical to SEQ ID NO: 6762
  Description of Artificial Sequence: Synthetic polynucleotide

SEQ ID NO: 6765 - DNA, 382 bp, Artificial Sequence
  Description of Artificial Sequence: Synthetic polynucleotide
ygttttttatttttaatygygagataataygggttagaggttaggaaattatgttagtattaatgygggygtttaygagtgyggtggatygatgtggaagggtygggaygtagttygagttttagttttygtygtagygatggtygattttttagtygyggaygttgaaagygaggattttaygtygatgatttttyggygtattatgttyggygggygtttggttaaatagtttaagattgyggaattatattygttattgtgtatttggaygttatttgtagatttagygtttgyggggatttyggaaaygggagagygggttttyggaaayggtgattaatgggaaaygtgattagatgttattaggygaatagttygt

SEQ ID NO: 6766 - DNA, 665 bp, Artificial Sequence
  Description of Artificial Sequence: Synthetic polynucleotide
yggggaagtagggtygygaaggtttttgggaaatgtagttyggygtaggaagtagyggaaygattygattttttttagtattaagttgygtttttaattttttagagttgggttygygggaggtygttygtgtaaaatttaggttgagtttttttgygyggagttgtgagttttggaatatygtggtttgttttttaggaygygtaaatagtgaagttagtttygttygggtgagtygygggggtttttgggaagygtygtttttggtgtaayggatygagatttgtggygtttttagttatygatagygtyggttttagtgtygtttttgttttagttygygtyggttttgttattttggtagygttaagtgtggaatyggggtttgtgttygygggtttggtggtgagttttygggaaatygttagttttgagygtyggattttttgtgttgggtgggagtgggggttygyggttttggtgttttaatttttggaggaggaygtygggyggggygatgtttgtgtttgtggttttttgaggtagtgggagtggygtgtgaaggattgtgagagtttggygtgaagtgattgttatttgttagatattygtttggttgagtgtggtttygggatygtgttygtaagyggatttygtggaggygt

SEQ ID NO: 6767 - DNA, 764 bp, Artificial Sequence
  Description of Artificial Sequence: Synthetic polynucleotide
ygygggtatyggtttaataaggtgtagygaatagtygttygttttygttttaatttatagttttatattttayggtgttattgattttttygtatttagttatataggaygtggataggtatayggggtgatagtttygtattgaayggtattaatttttattygtatyggagttatatagatggtttgygaygagttttyggagatttataygttattttttagtttattttygatttgtagaatagaattggtggaagattttttttttgtttygaaggttyggggaatttgtattygggttttatygttatttttagttggatggaatttagtttttaygggttyggaaagaagygttttagttgttttygttttyggaggatataaaggggtygtyggtttaattttygyggggttygttgggaaaygtagttyggagtagaaaaggtygyggygtygtagtgtttggtagtagyggtgtagtttygygtagggtttgtaatayggttttttttttattaggtttttttatattggttttttttyggttttttagagagttygaaagttyggattttttgtagtttygagtttggttyggttatagggayggggtttagygttatattataygggttggtgtggaagtgygtaggtataagygttttgygygttttttttagtaattagggyggggagttgagaatygtaggttggtygtagggaaaaggtttgtgygtgggaaygygttagtggygygt

SEQ ID NO: 6768 - DNA, 1394 bp, Artificial Sequence
  Description of Artificial Sequence: Synthetic polynucleotide
ygatgttaggtaygttataaaygtagatataaatygtaaagattttagagattygttatagttagygttagagttaggtattatygygtagttttttttgyggtattattttaatttttygttagagaayggtataygygtaygtagtagtttygtgtayggaaatattatttygttagyggttaggtattyggtttaggtaygygggggygyggyggtygttatttagtaaatattataggtagtaygygtygygttttggtttaggttygygatattggggttttttttatttaatttaygttagggttayggttataggtttagatttgaatattttatttttatygggattttgtagttaatttttatttttttttaaatttttygatttttyggtaggtgyggttttatattttttttttgttttttgaagggttttagygttygtttttygygygtttgygtattygaggtagaagtygatttttaaaggtttyggtgaggygtygttgggggyggggyggggttygtagttttygtttgttttygagtygagaattaaatgaaaaataaaaaggyggaatattgtttttttaaattttggatygtagtgtttataggggagtaggtttggattatttttaatggtattggttagttayggggyggttattataggtagaggtttgaggygagggatattgyggtttttttggtttygttttttyggttygattattttygtygagattyggttttaygygtttttttyggttyggagtagttgygggatttgttttygttttttygygygttagygtattygygayggagataggygttttttygtattttggygtygttgatttttagggttgggttattttttgagtygggtgaggttggggttgggagtygggygttattgtggtygttgtttttttgagggaaaagagygyggagtgggttaggttttgtaggtygggttaaggtggagaaaaggtttttgtggagttttaggtyggtgtgttttttttttygggattgagtttttgtagttttgaggtttggaggttygggyggtagtaattgtgtyggattaggttygtgggtgyggtttgtggtgtagttggagatygaggtttygygtattttygttygygttttagttatttaggttyggtygtagygaaaaggtttaagagggaagttagaggtgaaygttttaggatgaaggttttttgtaaaaygttgggatttagatttggggtgggtgtttggggtttaggaggataygttggatagtttygaaaagatatagtgggtggtttygggygtgggtaatygggtgyggaattatagygtattyggagttgygaatttagaygygg

SEQ ID NO: 6769 - DNA, 949 bp, Artificial Sequence
  Description of Artificial Sequence: Synthetic polynucleotide
ygttttagygttttygagttatatttgtgyggtttatttaaygygatgtttggaygtagtttttagagaggaggtygggattggaataygtagtyggggaatggttgtaggtggtttagttttygttttygtttygttttygtttgggtttygtgyggtttygggtgygtaggtgaaagttyggttttagyggtttyggttttgttatggatttygygttyggygttttagattttygygtygygtygttygygtttttgggtatttygtaagtygaggtgttggaggaygtgttgygggagtagttygggtygttgttttagttggtygttgtttgtyggtttaagyggttgttttygggyggttattygtttattgaaaatttttagttggtgttggagyggyggygtgtggttaaygttaaggagygtgagygggtgagggatttttagggtygaygttygttttttttttttttgttttattattaaatatttggttaatattygggggttygtttatygtttattttygttygaggygatttygagttttygaggttttttaygtttttagtttgttaggagaatggtagtggttttttttttttgtattttygtgtagttgttygttggyggtygttgyggtggtygtttygttygttaattttttaggatttgtgtaggattygggtttgggaggggatagaggaggggttttgataattttaaaaatgtttttttgggtaggtgttttaaaagtttygygtttagggggtgygtttttattttatatygtaggygttggtgggtgtttgggaygygtagggatttttttygttttttttttttgttttttgtatttyggtttygaagtatataygagggtgaggagaaaggggggtttgayggaagtgattttttttttttaaagtaaygaaataygaygt

SEQ ID NO: 6770 - DNA, 1365 bp, Artificial Sequence
  Description of Artificial Sequence: Synthetic polynucleotide
ygtttaatagtatygttyggagygtttatttttttttatttygtaaaaaaaaaaaatagggttattggttygggtygagagtygttttgggaagygtttttgttattaagygttatttyggggtgtgygagggagttaagggaygyggagatygggagtagggttgggtttttttgtagttttagygttggttttttgtttatygtatttaggygttgygtygtttttatatttatttttttttattttagtagygtgygggggaagtttygygtyggggttttttttagtaagattgtygyggttttyggttttaattgtaaggtaaayggtggtagagtttttttttattttagtygtgtgtgatttttatatttagtgtttttttttgtattggggygtyggtagtggygatttaggttttttagttttygtttagtttttygygtgygggygtygggatygtagtatttgtgaygtygaagtttagtaggtygtagaygggagttaygygyggttttggtatagggtaaaaatttaygtttaggtaggygggtagttaygatgtygggtaagtttagggtagattttyggtggygtatagggaagtagyggtttagaaggtygggtggaygtaggyggagttygayggttgggaggtygtyggygygtaggggtygggtttygttaggatggtttygatygagaaaggggattygaagygttygggagygyggggygtgttygggttagtaggggatttgggygtyggagagyggttagagygyggaggtyggattygagagttygagggagygggtggygggttgtttygyggtttggggttaggtatgaygyggtygttgttyggayggaygtaaggaagggagttygggagaagtgagaagattttgtaaaaggtagygagtaagatyggttgtttgggaattttttggygttyggygaaggtttttaaatttggyggggyggggtatggggyggtttttttttattgyggttygggyggggtttttaaagtttgtgagygttygttttgtgygaggtaaggtgggtatagtattaaagagtgtgtttttttttttttttygtttttaaaaatgtttattttggggyggtygtggggaggattttgagttygttggtgattttgggygaaatatttagttatygggtttygttttttttttttgtttattgaagaagggatgttygttttttyggggttttgtagaggyggagttgtgatttggagagyggtagggtagtgtttgyggttttggttttagttgattygygtygtttttgaygtagaagtttyggttagatttatttaggatygygygg

SEQ ID NO: 6771 - DNA, 2638 bp, Artificial Sequence
  Description of Artificial Sequence: Synthetic polynucleotide
ygtygatagygaagtggtaggtaatgggaatttgggygggaagtaaagaattattaygatttatatygygtttaagtagtagtaygygggaatttggtatatagtaggtaggygtttatttaatatttgttatyggatttagtatttgggtagggagtttaggggtggagtggyggtttgggggatataaaggtttygttagtttttagttgygtttttygtaaygyggggggygggagtttagagttagagagagggggygaaggaattygtttttatttgtaygtygtttggggttyggttaatttgtttaattatygttttaaatgttagygggtagtatataataygygtttattaataggtttaaagtgtygtagygttygttttaaatgagaaaagtaggygataaaagggggaaaaagttaagttttttaatttgaagaatgttttgggtygtttygaaattatttaygygagtttaaaattyggagttagtttygtagaaaagttgaggtttyggtgygagggttgggggtgggaaygggggttgtgaataattygttaygaaaattgggttttttaggaattagtttgtagtygtttagtgaattyggagtyggaggataaygtygttaatttagttttttaggttttttgttttattgttagagaaagttgatygatttttaagaaggaaagygagatttttttaaagygggtataaatttaagtttttttyggtgtaggygaagaattttggaggttaaggaagattttagaggtggattttaaaattttaattygtaagaggggaaaagttaaagtaattttatttttatttaggtattggttagygtagtttygygttyggtygttagagagtagtttaatttygtaaataagttttgtttgggatyggygtagaaggttttattttttattttatggttaagttygggggygtattttgygggtygyggttttttatttttttyggygygttygaygggtatttayggtgygygttttttygggagataggggttygttggagaggtaygggttgtttaggttygggattattaggaaggggtatttagggtaygggggttttttaaagaaygygttgttttgaggtttttttattgygaataagattaaggygaggtgaggtttaggttttygggattgatagygtygyggtagggggttygaggygggagttggggattttagygttttttaygygygttttaygggggttgtygttaataaaggyggagggtaagggtgygtttatttaagtaagggggayggtgggtygttygggttgagtagyggagygtagygggaatygagagtggggggttgttttagygggtatatattttyggygaaatagtttygyggtttttggaaagtgtttyggaygggttgygggygttttttygtttgyggaggagatataaaggtaagagygggtgagyggaygtagggtygggatttttygggggtggtygyggtgtttttttattttygagttygagttgttgttttggtttttygattygttgattagggaygatttgatttygtttaggtttygttgygtygaggygttatygttgttyggtttttgtttttygtttttttygttttggaaggggattagttygtygttygtttygaggtygtttttttygtyggtygtttyggygttggagtygtygtttttttygttgtygtygtygtygtygtygttttygtygtygagttggggtatggtggggtygygggtyggggtygtygttttyggagtttttagtygttygygttttgttyggttyggttyggygtttttttygttygtttgygggttygttgygttagtygtygtaataaagtttgatagggygtggtttygygggaagygggttyggygttgttyggtyggggygtaggyggttyggttygggttttttyggtagygtygagtttagggttttttaattygttatygtygtygtttgtttygtyggggygttttagtttttggttygtyggggaggggygagyggggagggagggaggagggatygtygggttgggtaggggggtyggagggaggagtttyggttgtaagttgatattygygygtttygyggaattyggagagttgyggtgygygygtatatatatatatatataygtatttatatttatatgtttatattygtattttttaggggttgygtttttttgtaaygtgtatygtttttaatttttttttgygttttatattgtattttyggyggttttttttayggtttttttggagttttggaagttttgygtttattttttygtattttttaatttttttttaaagaatttttagaatttygygtaggtttttatttttttttatygtatyggygygygggygggyggtattgttttttgygggaaagtttyggaygtatatattggtygyggggttttttttttgtttagagttttttygagtgygygagttgatgtayggattaggatattggggatatttatggaatttyggaaaatgttyggyggtttttygygttttttttttgtggggttttaaygygattttygg

SEQ ID NO: 6772 - DNA, 1531 bp, Artificial Sequence
  Description of Artificial Sequence: Synthetic polynucleotide
ygaaagttygtataaatygtatagaaaaygaataaatgtttttygaatgtgagygaatttatagtttggttagaaaaatttaatattgattttygtttttttaattatagaattttygaggagaaggggataygttaagygggtttgttaataatttttatygtatattttaaagygttgtaaattatatygattattttygattggaagtygatyggttgagattggaygtgaatttygygattygattataaaaggttaggaggaaagaggtagaaaagttaaaaggatgattaggtaggtggttygagyggttattttaagttaattttttagaaattattygtattgttygggttattttttttttaatattygtggttttatttattatgatgttaagaaaygtgggttaggaatggggtgttgttttttgttygaaatttggaggygtyggttttttagaygttttygggttygggtagaggggyggtaggggyggggygggygggtttygggtttgggygygygggtaggtggggygtggygggggygtggagagtttaggttygyggttatygtttygtttygggtyggtttaggaggagtygygtygggttyggttataagaggtyggttagtaggygtttygttagtattygttygatttyggttyggagtatygggygtttagygygggtgaaggyggagtygtagggttggtttttaaagggatgttttygttygagyggygagattagtttygttygtttttygtygyggtygygtygtagtygtttayggtygtygatatggttttttattgyggygataatttyggagtgtattygtagttyggtttgttttygttygtygttatygtygtygtttygggygttttttyggtagttagggygttttaygggttggtygattaygtygygtygtyggtygtygtygttaatttttatttgtggtttaaygggttyggygtgggaggttygtttttygtygtygtygtagtygtygtygygtatttgggygtttygtygtygtygtygtttttyggggtygyggtygggttttttttgtagttatygtttgtygtyggtatttyggttgtttttagyggtttttygygtagttygygttygtygygttygtttygttygtygygttygyggggttyggggagttgggttggttgtttatggttagtygygaggatttgatgaagatggtgyggtygttttattygtattyggygtttatygttatggttatttagagygygttygagygtaaatttatttttagttatatttattagttygtygtygatagtttttttttttattagygtagtaaggtyggttggtagaattttattygttataatttgtygtttaaygattgttttaagaaggtgtttygygaygaggaygatttaggtgagggtygttggtaggtgttttttagtyggggagggyggaygygggtygtaagggtyggygtaggggtyggtgtgygg

SEQ ID NO: 6773 - DNA, 2045 bp, Artificial Sequence
  Description of Artificial Sequence: Synthetic polynucleotide
yggygttttygttttgtttgtatttttttttattgtttttttaygtttggaatgttttygtttttgtagtttgtagatagyggaaatygygggtgtaaatgtgtaggggtygttgatatgatyggttgtagaagtttatttagggttattygaataggttagygttygggattgtataagaggttaggygatgttgtgggtttttaaatttgtatagttgygatattttgygaygtgttattttatttttagtggggtggggtgggggatttttttygtagttygttgaaagygaggtaggaattattgtaatttttttgtttaggttgaggtygttatygtttygyggatgtaygygttgtaggggygtttttygtygygggtayggygygggaagggatggggtttggtgggagtgggtaggtggygggagaggygygtgttygtgtattagaggttttygtgygtgatataggtygatgagtttttgygggttgtatttaygyggagttatagatygaaaaggttagtyggtggtyggtgtgttaatatatatagagagaygttygttaggygygttgtaggttgggaygaggttaggagggtttaggttggaggagggttgaggagggttgygggggygggtttyggygtagggygttyggagyggagggggygggttygaggyggggygggtygyggygttgaygggttgtygtygttgtattygtttttagttygyggtgtygagygtaggyggaggtatatggtttygaygggaggygygyggygagtattyggagttyggttttttgtttgagtayggtagtygygttttygttygygygttttygttttttyggtyggtagttygyggatatgatygtgtagtttttttttgggttgggatttgtttgaagattttttttatggaagygatgtttttttagtaggagattttagggggatagtyggggygttttttttttttgataggagtgtttyggttygygggaggtagttgtattaagaaggtgaggaygttgagygggggttygtgtttttygtygtygtagtttttattgtyggygygygtttttygygttygttatagtagygygttaggyggaygtygygggaatttgaygttygaggttygyggtttttaatgagagttttagaatatttttygtttttgayggttagyggtagygtygtygtttttygtagagygttygttttttygtttttagagttttagttttttttygagygatttygtagtttttttttygtttttattygtygtyggttttgtagttyggttttttttttagtttaggygygygggttgtagtgggygatygttttttttygatttttygtygtgtttttgggtttttygaagtggtttgggygagtattgattgttttttggyggtgttagttttaaagttagggtyggygatgtttgttygggagyggtagtyggygttgaagaaggtaggtagyggggttgyggygttggtgggttyggtttttttatttgttygtygaggygyggttgttttatagtagttttyggggggtagatatggggagtattgttttttatattagggttttggatgatttygggttttttaggtgggggttatagtttgaggggygattgtggatgataaygttygatattayggggatatgtaggttyggttgggtttagaatygagtagggtgggggygggtgggttgtggttgggggttttgagggttgaggtgggggattttttttttgtattggtttttggtttttgggattttggtygggttggatagggattygggtgtyggtgtgggygtgggggtagygygtgttttttgttaaagttgggagagggatgtaggtgataatttgtagygttttatttygataaatayggtygttgtgttgygggaggatttygattygggttaggtttygttggaayggttttttgagtaagtgtaygtgggtygygggttgtyggtttttgtygtttygt

SEQ ID NO: 6774 - DNA, 476 bp, Artificial Sequence
  Description of Artificial Sequence: Synthetic polynucleotide
ygggygataygttttgggagggygggttggyggtttttttagttyggagygygtggaggttgygygtaggggttygggaygygggatagggatttygygtagtttaggygtyggggaatyggggttggagtyggggatttgagtttagyggaygtttttttygtttggaggttyggtayggatygggatattagggygttygtggtygtggttyggtttttggttgttgygggtygyggtttttagtgggtttttaggatttttttttayggygggtatttatygaggttgagaggttaygtygtgttgttggggtttttygtygattatatttttgggygttagttygggtagagatygyggggattggttaggtygggttaggtygggtygggggagggtygygttttygggtttttgattttyggyggygagaggaagyggtatttgggttatatttttttygygygggtyga

SEQ ID NO: 6775 - DNA, 455 bp, Artificial Sequence
  Description of Artificial Sequence: Synthetic polynucleotide
ygtttttgtttagygaggatygtgtagaagygggaatygggtattggagggygygygyggtaygygtatttyggttggtattttttggtttygyggggtyggaaagaatttygaatattyggttttaaaaggtttttagttatttygttttttttattttttatagtatagatggggaaattgaggtttggagaataagygtggtatatttagggttatyggaagagtaatgagttgaattagagaggaggaaygggaagygagatttttaagtaatgyggggtggttttygggttatyggaggaggtatggtygggtaygtttttaagtttyggtattygtggtggttgtgttagtygatatgagtttttttttttttaggaaggygtaggattyggggaagttttygyggttaggtygtttgtttattygtagatttygggygtygttygygt

SEQ ID NO: 6776 - DNA, 749 bp, Artificial Sequence
  Description of Artificial Sequence: Synthetic polynucleotide
yggggattygagttttygggttgaggatygygggggattttaggtygggayggagttttttttggttygttgtgygygtaygtttggaaaggygggatttaaggtagygatgttgygggaggttttgtagtgttaaygagttttygaayggtttygttttattttttttttgtgtgtttygtaagtttttgtttagtaaatygttatagtttyggygygygagagtggygttggtaygtttaaatttyggggtttttggttaggttaggggggygggygtgyggyggggtygggtygggtygggtgygtttagygggtttygggtataygttttttatttgggygaggttyggtgygtaggygtttagygygggggtagyggtygggygtttaagttyggygygggtaagagttggatagtttaggggtygygtygggtygagttgtygttygygttatttttatygtygtygttgttatygttatygttatygtttgggttgtagtagatygygggagaaygtttgygygaagtttyggtgtagttttggygggatygtagtaattatyggagygtgagtaatagtttttyggttggaggagttattgttttaygygttygyggttygygygtygaggtaagttttgggygtttagtttagatyggygttttyggattgggygttttttgtttgttyggttttygttttttttygtagagygagtttgtatttgggygygtygttyga

SEQ ID NO: 6777 - DNA, 1134 bp, Artificial Sequence
  Description of Artificial Sequence: Synthetic polynucleotide
ygaggagggyggggygttyggtttttagtygygyggttatygtttgtttagtttggttggatttgagttyggttygtygatygttggtygaggygtagttgaagtagttttttagtygyggygtttttattttttaattttayggtttttgyggygygggygygatgtagttggttyggggtgaaggtaaggygyggggygyggggygyggggtattgggagygaggtattggygygggatgttyggygtaaggtgtagggygygggtygtttttttttygygtttttttatttygttaaagtttttttaygatggtttttatttyggttgggttagtttygtaattttygtttgttttttgttttttttttttttttygagtygyggggttttyggggygygyggattttygttaggggtygtgtaggygyggagttttagtyggtttgttttgggttygaagaaagttgtggtttggagttagttttttttttaygatttttgggggygtttttttttttttttgagttygygatgggaaggygtttttattttattttyggggtttttgagattttttggygaggtggggyggygyggtaggtgtagggttggggagggtttgatagttttggagagtgttygattttagttygtygtygttttttaggyggattttttagaggtaggttttagttttyggygyggggaggyggygygttttagaggggygtagggtgygygggggtygttggtttttygggtattttttttttgyggttttttygttttttttyggagttggtgtttgaggtygttgggattttagtttggygttttttttygtttygagygaggtaggtgtygtgggyggtttyggttatttttgtatttygagygtttattttgtatttagttttaagtyggagagttttggggatagtygagagtgttagtggttttatagggagattgagggttttgttttatttygggygtygtgtgggtttgggttgtttatagtatttttgygttttagtgataggagaagttaagygygaggttttttaatagttgygtgtattttattttttaggtatttggaatttyggygtttagaaygtgtttttygg

SEQ ID NO: 6778 - DNA, 1645 bp, Artificial Sequence
  Description of Artificial Sequence: Synthetic polynucleotide
yggygtttttttttyggaaaggaygttggatttagggygygttagtaygygtagtagyggttygygagtyggtaggtgggtagtttyggygygggaggaaggggaagttatttttttttyggaagagggygttggtttttttattttgtttttataataaggttatyggaggagaggaagtagttagttgtygtttgygttttgtaaagtatgtagttaggggagtagtttttggtgagtttagtgaatttgtttggygygtatttttattygttggagagtgygygaggyggtagyggygggagygttggttatttttttagygyggttttttttttttagaagttggatttagataaagygtttaagaagtttttyggtagttttttttgygaggyggtgagyggggagttygtagtygttagygtaggggttttygyggttatgtttagtgatatygaygtyggggaygtatttgttagygttgyggtagtggttaagtyggggttttyggayggtygtaagggttttttttgyggggaggaggagttgtttttygtygttgtagtygtygtygtygtygtygtygyggttgyggttattgtgygttattttatggatagtttgagtttygagyggtattatttttagtttttyggtttttaggggtyggagttggttgygttttgtttatttttttygtattaggyggyggttggggygttttayggatttgtgtattyggtttttaayggggygygttatttttayggttttatgttgtttttyggyggttttttygyggttgtgtgtttattygggagggygtagttyggtttaggagtyggtgygggtagtggygygggyggtagtagyggygggggyggyggttygggtatttattagtatagttagggggtttygttttaygggtygtattttggagtygtagyggygggattttgyggaggattggggggtttgggggttttaggttttggttttygtgtttaygtttatttgtgtaatyggtttttgtggtttaaattttatygttattaaattgagatgattattaygaaatagggtaggtgagygtagygtggaggggtttttgggttyggggataaagggtgaygtgtggttttggggaaggttygggatgagggagttgaatttagttgtttygygyggtgtttagagtgttttatygygygtaataaattttygtagatatygtatttttaatgyggtgtttttttgtgttagtgtttyggyggtttttgtagggtgttaatgttayggttgtatatygttttttttttttattatttttatttgaatagatttggaggaggyggaaatggaaattagggtatgtttataagttggattygttagatttttttgttyggyggtatgtttgtgtatgtttgtatgtyggtaaggagttayggatagggaaggtttaagagttggttatttgagygtagtagatgggttttygtagttttaggygttagggtttttayggggygttttygggaggtgggtatgaaggttagagygtyggtttyggaagttyggtyggagtaggtggttagatttgttttggagttagatttggttygggttyggtgygyga

SEQ ID NO: 6779 - DNA, 4698 bp, Artificial Sequence
  Description of Artificial Sequence: Synthetic polynucleotide
ygtayggattygygttygtattygaagattttataygtttttygtattgtttttatagtattttaygttygyggtgtaygtttatttgtyggtagaygagttataygtttyggyggtttagattttygtgtygattttygtgggygagtttaygygttgggtgttyggygygtttttaggagtggttgggatygygggttggygtygggtagggyggtgggaygtttggagtyggygggaggagtaygtttaggygggttygygtygagttygagygagygggygagtygggygggaggggttatttgtaatygagtagaygttattatygttttttattygyggggggygggggygggyggttaggtgayggyggtttatttttygtygtygagtygggtggtttttgttygggaggagttttttggygygttttgattggaattttygtygtagtggygggggaggggggataygtgatygttyggttaggyggttyggygygttttattygygatgggtattttattttttttttggaaaagtygggggatatagagaaggyggaggagtaygyggggtgtaggagagtttattagtttttttagtygtagtgttggtgatttyggtygttgaattyggagaggaaaggtttttaygyggttagtyggttttgattgttttttygttttgtttttggtygtagtatttttttttyggttgtagtaatygttttttatatttttaggtaagggtaygtttagtgtagattattgttattttatagatgttagtgttatttaagagtggtgttgggtttttttttttttttttttttttttttgtatattagtatattgtattygagagaaatttayggyggtgtattgtagatatygtttagttttagggttygaagatttttygattaggtttygggatgtttgaggttttttaggttattaygtggaggaatttaggtttgttttttgygtaggaggaggaggygtygygggagttgtagttttygattttttttaggaagtyggtygggtggaaggggagagggtygttatygtggtgygaatttaattygtagtttttgggagtaygttgttaataaaggttaaattaaaataattaagtggtgtyggtagggaygygtygtatggttaggagaagttyggttattaattatttataaggagtattgtttttttggtgtgggagaatggggttgtgygatagtttttyggagttgygttttgttttgaattttaagtttttttagagtaagtggattgygtagtttattattttatttttttayggtttttttttggggyggtattattttagatggtaggaattyggagaaaatgyggtgttaygttygtygttatgttygtataygygtttgygttaattttagtaataygtggggatygtgaatttgggygtttgttttttatttaggtggttatgtgggtatatttatatgattattgattaaaattaaattggayggagaagtttgtttttatattggatttttttaaatttttgtttaagggagttttgygttygatttgggyggggaygtagtttttagttaagatygtygtagygtttagtagagttyggggatyggtggtggtggtggygggatggggaggaatagaggtttttgattttttggtattttattttttttttttatttagattagtygggtaataygtttttygtttaagatggtttttttaattggaaygtgatttagataatgtggaagttaggggtttttgatttatygtatttgggtttygttgggtataggataagggttgggtaggtttatttggaaagggagtttattygtaaagtttygggtataaaygttagatagygaaattttgaggaagtttaaagtttatttattgtaaattggtggggggtgggggagtattttatgtaaaaaggaayggttttattaaattagtaagtattttattttygtagtggaygttttgttgtttttggttttttttttttttattttatttttttaaattattaaggttggagaaattttataaataaagtataagttygtggggggggggggggggggttatttggtgttttaaaaaaataataataataaaygatttttgtaataagaaaggtgggtaygtttttatttttaggttttaattttaaygttayggttaygttaaaattgaagttgattgagataagagaattttagagtatagtaygtagatagataattttataattaaaaaatatgtattttttttttttygttttygttattttttttttttttygttattatttattttygtttggattaggggttgggagaggaggaggatgtagttttttygagtgtataagggaggyggyggggttatttgttgttgtatygttagaagagttaatttygagyggatttggtagggagttaaaattttttttttggatgygaygttttagagatygaggtagayggygagaatagatttagygtttygagatgtgttttttaatttgaattttggattatttttgtttgaaatgttttgttttgtaygtttgggaattattttgtgygattaaaygygtgatatatataygtataygyggggtygtttygtaggggggagggtgygtggtataggagtttyggatttttaggggttttgtatttggggagtggtgygagggggatygtttyggtgtggttgttgaygtgagataggtaattyggaaaggttttttttyggttgttttggtaatgggaagttgtgggtaaaggtgtaggggyggtttyggagygtatayggygtagttygtagtgaagggtagtggtgtggtggggtagagagattagataagggtaggygggttttgtygatttygagtttattygtttayggggttaygttttgttgagaaaatgygygatattyggtagggagagagtgatattgattaagtgtttttggagggtygagtygtttgttttygggagggggtygygaggttygttagtattyggttttygyggaagttgtgttagygyggtagtttygtyggygtttggttttattagtttttgtttttagygtttttyggtggtatygttygagatttgyggagtagaagtygaggataygagtaattygttgtgggtttgaagtgattaygttttagggttgtgaaaagttgtttygtggtgatttgggtaygaggaggttaataaagtgtagaattagttttgatttttatttaaaatgaagttggtagtattgagygtttaaatgatttygttaggattttggaggttgtgggagyggggtgggagagggtaaatgttaggtttaggataatataggatatgtttaatttaaggaagttttttttttygggttaygttttttgtagttttatttaattggaatygtttttgtattyggggttattttyggtattatgatatttagygttgttttttaaattttaagttttygyggttatattttttygtgtttgttggtattagtaagagtttttgtttgtttttttttttttatatggatttttttttttttatttttagatygtagtgygattggtaggtattttttygtttttttygygtttygygtygayggtgggaatagtagygatagygygatygtagttttttagtgttttygttttttttttygyggttatattttatttattttattygttaaatttygtatttygtygtygttttttttttgygygttttyggygttaatttagttagaagygggtggaagttygggtttatgtgtaggtgtttttgtgygggagtaggggagtttataggttagygattygygattttattttgtttttagttyggggtttatttaygtggaattygtyggttttygygggtatttaatattagtttttygggttyggttgtygttttttygaagttttagggygtttttaygggttaatgattattttagtttttttttaagttagggtttggttagttgggaaattttttygttttttgtttatattttttggtattttyggataaagttattyggtttttygtttyggtatygggaaagatgygygtggagagygtttttaggygttgggttayggtttyggtttttggtygtgtttgttgtgtgyggagttggggyggygggtatygtttgygyggggtaggtattttattygtygtttttttagtaygggtattygatygtygyggygttgtaggaaggaggtttygtygygtyggtttttttatatttaygtgtttttygtgtgygygttttyggtttgtagatgttataaggttggygtygtttggattttygggyggttttatttttygyggtygttaygtttygttttttgtatttagtttttttggygttttygttgtagtatttaagattaggygtygtttttgttagtygtgttgtttagtaygtttgagggtygttgtyggtaggttttatttttygttygggttttttatttatttttttttttggayggtggggtttaagttttgtattggggttgttaagttatygtttaygattttttgtagggtgtagygggagggygttttygaggygt

SEQ ID NO: 6780 - DNA, 462 bp, Artificial Sequence
  Description of Artificial Sequence: Synthetic polynucleotide
yggttygtaaattgattatgaaatataygatgttaattyggagttgtattttttagttgggtattttygygygttggttttyggggtttygttttttattttttgtttttttttttygygttttgtttttattttttatttttygygttggttatttygtttttttggtagtttttggyggtagygygttttattygttttygtgtttttttygtttatggaattaattttggttttatttgttgttyggtttaggttggggagaggayggagggtggtygtagygggtttttgagtgaattatttaggagggattgagtatagtattaattagaggggggttagggggtgygggattygagygagtaggaaggaggtagygtttggtattagggttttgatttaatagaattgagataygtttgtaatygttggygtgtttygygtataggattttagyga

SEQ ID NO: 6781 - DNA, 300 bp, Artificial Sequence
  Description of Artificial Sequence: Synthetic polynucleotide
ygttgtaaaatagtygtygggtgtagtgggtygggygttyggttattttggttgygattatygtagttttttaaaggatgygggtagatgtagayggttttggtttatttgtttttaaaggtttgggattgtgtttgygtgtttygggagggtattygaaatttgggagtttttyggygtttttagtttygggtatttggggttttttgttttttaatagtattaattttgagaataaygygtatygaaggyggaggtttttgtgttttggataagttygttaygggtaagttagttyga

SEQ ID NO: 6782 - DNA, 554 bp, Artificial Sequence
  Description of Artificial Sequence: Synthetic polynucleotide
ygtyggggyggggattattttgtagtaggagttygtagatattgtagaagyggagaayggygttgygtttttaaattatggttttttttttaaagggttggggaaggaaygagggggtaagtagatgttggtgagyggggtaygagagtgtagggtttygttggtgtttttttttyggygttygtyggatttatygtttttatygttgyggtgttygaattygyggattyggatyggyggtagtagaagyggtagyggtaaagtattygtagaatggggtatygygaaatagttttttttttttttttttttgttggtggtgtagtygygatagttygttttttaggtaggggtttggagtttgtttttttttyggygygtatagtaagttttagagttygtyggggttgttygagtaggtggtgtagggatgtyggggtgttggagaaggtgygggygagggttgtaaggagtgggtaggttayggaggggaagggttgggggagaggaggagtaagtaagtagtattgtygttygygttyggggtgtttygg

SEQ ID NO: 6783 - DNA, 1153 bp, Artificial Sequence
  Description of Artificial Sequence: Synthetic polynucleotide
yggygtatataagttgaggattgtygaggygttttttgygaggtaaataygaagtygtttggttagtgagaagaaattygaggtggtttttggggtagatagagtaggatttgtttttgttttttgtttttttygtttttttttttttagyggyggygatygtagtaatagyggtagtggyggttgttgttattgttttgtygttgtygagtyggttatttgggtattygyggagtygygtygttgttatygtttyggyggtttttyggagtgygyggagggggyggyggaggagygagatatttatagtaatygaggatgygaggggygtttagtagtagygagtgtttgggagttaggaggaggttttygygygtyggtaatttttagtgttaggygttttgtagttttygygygtygygtttgggttygtatygttttygtagtgagggttygttygagyggtaagtttttttyggyggttaagtygatatttttttttygtttygtygtttatttygggtagtagtygyggaataatggagagygtagttagtagttttggagayggygttygggggaggaygygtygtygtygtygtygttgtygttagggtaggygygygtygygtggagtygggygggtgygagggygygyggyggggggtggggggtaygygtygygyggggggygggggtagtggggggygygygygygggttyggggagttygyggggagagttyggygttyggygtagygyggygyggttaagtttygygtttttttygttttttttyggygygttygttttygtttygtygttygtattygttgggggygtttagaaagatgtatagaggtaayggttaggggagyggaggtttaagttatatgtttgygttttygggggttagagttygttagttttygyggatttyggttygyggttagttygagyggttygggtgagtagyggtatagyggttttttygtttygyggttttygttygtygagaygtggttttaagaagtggtgtygtagtyggggtagaggyggaggaagtygagtygggtaagtygggaaggttgyggagaygttttgtyggggtaggtgttgtagttttagttagyggtttttayggagggggygg

SEQ ID NO: 6784 - DNA, 1603 bp, Artificial Sequence
  Description of Artificial Sequence: Synthetic polynucleotide
yggttygtagggggtgtttyggggygttttttgygygaggtttygggaatagggtaygagggtttaggttgtttagttgtaggtgtagttgtttyggaggaggaygttgtttgyggygtyggggagtttttygyggttggaggygaggggaattgtatttattatagtgtttygtttgygygaggattatttatttgggtyggagagagygygygygygtaagagygagttygggttgtggtttgggggaggggagygagggggyggggagygttttatygygaggaygggggyggggayggattgttaggtggggygggtagttggggyggttygaggatttttttygatttaagtgggtatttgyggagttaaaagtaggggaggygttgtagttgtgaagaggygtgggggtygygggaatttttttttggtyggtgygatgaaagtygggyggaygaggtggtttaayggggttgagagtggttyggtygaggygygggttgagtttttagtatttggtttgagyggygtgggtagtagtttgtatygyggatatttttaattttgtygygtttgygtygtattttggtygtggtagygatttttygggtatttttgaggtygtttttagttttataagtatttagtygtttattttagagtagyggygtygatygttttaagaggagttagttttygatatygttttttatttatttttttatatttttatygttggagggggtgagtgtygtggataggygttttygttyggggatagtttagyggyggtagttagttygattttttttygygygggtygtttaaatttgattagtagagygagyggtttagygtagtagtygttttygyggtttttagttgtagaaaagtaaagygtygggaggaagtagtagagggggggttatatgaggttggaaagtggygggtgtayggygttygggatygtygaggtttttgygtygttttgyggaggtgatttygyggtggaggttaygagtatygtygtagttttgaygttgggatttaggggttttygagygtttayggygtggtggygtygggtygygtttttttagtagtttaagggtygagtggygygtggttatatttatagtagygtaggggygtygtgggttgayggtttttttygygygagtygttttttygyggtatttatttttttttygygttygggtttttyggaagtygaggygygggttatttggtgggatttygyggttttygttttagggtyggggtaaygyggygtgttgattgggaggattttyggygttygyggtttttattatttygtttygyggyggaggygggygtttagggtagggayggagttyggagygttgtagagttyggttaagtttagttttttttyggtttggtagtygyggttyggatgtygttagttyggygttagagggggttagtygataataaaaatgtttgtatygttygtaggtggaggyggtttattaggttaggaatygaaaggagggagggatgttgttaggttaaatttaaygttttggttaagggygygttaaggaaatygtatygt

SEQ ID NO: 6785 - DNA, 1411 bp, Artificial Sequence
  Description of Artificial Sequence: Synthetic polynucleotide
yggttttygttattygggtggattttgtttatygygagyggggaggyggttgtttttygtgtaggattttygttgagggtttataataagyggttttaagygggggtatatttttygttattttygyggttttttaaataaataaagaagttaaagtyggttgttttaagattaatgtaagygtttaggaagttttgaggygtttgagggygaggtaggttgtygtgggtaggtgtgaatattttagttttygyggygggtttggagtygtttagygtaggaagagggtagaagtgggttygygtttatgygggtattygaaatgaaaaagagttgtaaayggtataaaagttygggggttaggygtaggaaaatagagtaagggagttgttttagtttttaaatattgtatatggatgggtgtttygyggaagattattttagattttgtgaaagaagtttttattgggygtyggttayggtattggggtgygygtttgttttgygagaagggttttttaggtygygygggggaaygtaggagaygtttgttttygggggaattagyggaggattgttttattttaaagtgaaaatttgtaggttttgggaaaygatatttaaaaaagtatataatttttatatgtygtttaatggaggatttttataatttatagyggtagataaggttagagggtgtaataaaaaatttgaagttttttttttttttttygtygttttttyggaattgtattttgggtagyggagtagaattyggaatgtgaatttttttygatatatgtttttygtagataagtaaataatttggaygtgaaatggaaatggtaattaatgtagtaatgttgttatatttygagtgtgtaaattttattgattygtygygttayggggggtgtygggygtayggggatyggtggygtgygtttaggttgtttattttttttttttttttttttttttttttaggttttygggyggggygtttagaaatttygtagggatgtggaygggttgygggaagtaaggagttgtttaagyggygttygggattttyggttttyggtttttggaggattgggygggtgttttgygtttgtttygatagtygtattttttatttatttttttyggttattatygtygygttagygttagtagggttttttyggggttygagtgtagttyggttttgaagtatttaggagagtttgagttygggygatagaggtttggaggtagagggaatttttaaatttagtgyggygggtggttttgagtgyggyggttaggttttttttttttttttgtttyggggttaagtgttgtygggttgtttggygagagtttttttgaagtttttttttattttygtatygaaagygttgatygt

SEQ ID NO: 6786 - DNA, 2629 bp, Artificial Sequence
  Description of Artificial Sequence: Synthetic polynucleotide
yggtagtaaayggtagagtaaaggagtygtttttttttatttgaaagtygygaggaggtttggagygttttttttygttggggttygagttttttgggttttggtygggtgygggtagattttatyggggttttygttattttttagtttagttygtagagygagtatyggtagattttaagggygygtgagtttggttgtyggttgggtttttgaggttygttgggygggggtaggtyggtttaggttgtgyggggygtttataaaaagtgatttggagatgaattygttygtgygyggttggtygtttygttataggggygaaggygtttgaygtaagyggaattyggtggagtttataygaattagaatagagygaggtttttggygtattagggattttaggaggtagtttygttagagaygygggtygtgtttygggaaatyggggggyggggggaggggaagagygtagaaaagaaaatttattaaggyggggattggtttgagyggggaggggyggygaggtyggagtttttttttgttgggyggattttttatggttagaggttgagttttattttygtyggtygttttttaggggaaggggaaggagaggggagagtagygataggtttttagtaagtaagygygggyggtattygtagtttttagaagtttgagatttggtygtaagyggattygtgygttttaattttttgtygygttagygtttggagyggagagtagaggyggttyggtygyggygygtyggttttgttatgatggttagttatttygagttygaggaygyggygggggttttgttggttttagagatyggtygtatagttaaggagttagaagggtygtygtygagtttaggtaagggyggtgggggtggyggygggatagtttyggagaagtyggattyggygtagaagttttygtattygtaygtggygtttatygttatggygattygygagagygyggagaagaggtttaygttgttyggtatttattagtatattatygygaagttttygttttaygagaagaataagaagggttggtaaaatagtattygttataattttagttttaaygagtgttttattaaggtgtygygygagggyggyggygagygtaagggtaattattggaygttggattyggtttgygaagatatgttygagaagggtaattatyggygtygtygtygtatgaagaggttttttyggtygtygttygygtatttttagttyggtaaggggtttttyggggtyggaggygtygtaggygggtgyggygtggygggygtyggggtygayggttayggttatttggygttttttaagtatttgtagtttggtttttttaataattygtggtygttatygtagttttttttatttatgttttatgttttttgttagatggyggtagtygtagyggttgtagtagttgyggttgtagtygygggtttyggtagttttggygyggtygttgtggttaaggggttggygggttyggtygtttygtaygggtygtatataygygtgtagagtatggygttgtttttyggygtagtgaattygtataatggtttgggaggttygtyggtygtattttygttttygtygtatttttattygtattygtaygtatattatttgtaygyggtygtygtatygtygtttgttttatygtattayggggtygtygygtygtygtygggttagtttagttttgttagtttagttatygtygygttttyggygttygygtttattagtgygtygggtttgtagttygtttgtgttyggtagttygagttygttatgatgtattgtttttattgggattaygatagtaagatyggygygttgtattygygtttygatttttgagagtttatygtatgtyggtgtagayggatgygaggatgtagggaygygygaygtyggtttyggtygtagtygaygaygtygtygttagtttgattttatattttttgggttygtttttggagttagygtttagggtttttttgtgttttttygtttttttaagtttttgtygtttttttttgtttttttagtttatgtttttttgtgtttatttttttgatttttgtgattttgtatttttttggtttgaagttgtttttttgygygttttttattgggttygttttttttyggagttttagygttttttgtttaaatttatygyggaaagggttyggggyggaggtgygatygggygtyggtagygtagattttttggtttttttttataggtyggtgygttygtttttygygtttttygttygattgtygtgtagtttatggttagaygygtyggataggattgatggygggatygygttgttygagaaagggayggattaataygtgtgtttgtttygygaatttttttgaagttgtttagaagtygtttgtygyggggtttattaggyggggygggggttgggatttagygggagtyggggtagtttggttttayggtttgtattyggtttatatygygggygggygyggagggaggttgygtttttttygttattagtttygtygtttygggtattttygggtttyggygg

SEQ ID NO: 6787 - DNA, 1686 bp, Artificial Sequence
  Description of Artificial Sequence: Synthetic polynucleotide
ygaygtttttaggtagttgttaaagttyggggttygtyggtttttaggttygtttgatagagttaggygttygtttggatttagttttttttygggygggaggygyggggaggttaagttttttaaaggaatagggtgggtaggggagtggtgttaggttaggtttttyggttttyggtagttagagyggagtaggaaaggtagyggggagttttatatttygygtttttttyggatttygtygtttattyggagggtataygtttttyggggagttagagaygttttgggggagtttgaggagtgttagyggggttttttttggagtttataagtttttattttattttygagttgggagataagttatagttyggttttttttttgaaagtatygtygttgattttttttttaggtaggagtagatatttgtttgtttttayggygygttagygttttgttttagtygtttttgggttagagttygaaatttatttattgygtttttatttyggtatagatagtttttaaagttgttygtattttttagatttygttttttgtttagttttyggatttygtttaggggttgagttgaygttygygggtggatttttttggttygttgygtagggaattgatttygggaatttagggygtatagaggttaaagaagttgyggtaagggagggtgggtaaatttagtttgagtttaggtttttgtygtttttatttttaagtttgttttgttttttttttgggagaagagtaaatttttttagtatttatttttagtygygaggaggyggygttgtyggttgttttygttatygtygttgtygttttttaygtttagygttagtaggagyggtatttagtatagtygtttaggtagtattttygtagtagtygttaaygagttgtagtygtygtttattgttygygtyggttttygtttttyggtgtttgtygtatygtgggtygtttygtygtgttygatgggtgygtttttagygttgtygtygyggygttyggtttygggttttygtygttgygtygttagttygtyggtagtagtygygtttattggygyggattyggagyggtttaggygtttatttygggayggttygtgaygttayggagggagggaggtggttygtgtatatttatgaaygygggtatyggygtygggtttygygtttttygttttaaggtttygatttttaattttttttagtygtttttaygtttyggggttttgtttaggtttttttgtttagtygggatygggtttttagaggattttggtgggyggtttyggagagttttttagtttygygtttttatttygattttyggaaaagttgtygtaagggatggagggtttttttagaaagtggttattygaggtttgagggttatttggggtggygygagggattttgatttgttatgttttttgaattgatatttgggyggagaggattgaygggygtygttaagggttttgtttttggttgggtttttgggygttttgygtygattggtttggggagggygttaggygtatattagagtagygtttagtggtgttaggggttgtygggtagagtagatagttttggatttggatggtaatggtagggtttygygttattttygagaagtaggggtagtygygg

SEQ ID NO: 6788 - DNA, 1686 bp, Artificial Sequence; identical to SEQ ID NO: 6787
  Description of Artificial Sequence: Synthetic polynucleotide

SEQ ID NO: 6789 - DNA, 2132 bp, Artificial Sequence
  Description of Artificial Sequence: Synthetic polynucleotide
yggttygaagagttggtgagygygattatagggtagtttgyggayggttttttyggataggataagggygagggaaayggtagaatggtgaygtatttgagtgygtttattagaygaaagaagattaattaagttttygtgtagtgygtagataggtygatatatatatatatatatatatatatatattaatatataygtaaagatagtgagggagygagaggygtatttttaggtagttgataatgatayggtttygattyggaygygggtttaaagtttttygattttyggagtgttttttttttyggygattttyggagattatygttggygtattttttygttttgttyggtttyggygttttttttttttttygtagtygtagtttttygtttttygygaaygyggttttttagtgttttttagaaygttygygtggttgtygggtttygaattttagggtygattttagtattyggygygygygtygtygygtygtygattagtttgyggttttygtattaattattaayggggyggttygggttgyggyggttygaggagggggatggtayggaattygagataggggataattttatttttygaagyggtygygaaattttagtttgggaggttttygttttttttyggtgygttygttttttttttygygtttyggttygtatatttttatttttygtttygggggyggyggyggyggaggtattygtatygygygatgtttagttatygttgtygygttgtygtygtagttagtygygtygtygtygttgtygtagygygggyggtygygygtyggtagtaggggtttggygaggaagtygttgagtttygygygtttygygtttttggyggtygtagygttgtttattaattgatttttttattgatttatttaatttttaggagyggttgttyggaggtaygggtttttttttaaatttgtagygaygttttyggygtgggtataaaggtttygayggyggtyggygggggttgtttagygttygggagtyggygttagaggtygtttgygygygttttagtygagtttygggtattatgtygyggygtttgtagtttyggggygygggtataaaaggtttttyggtttyggtttyggtagtttygggggtygttyggaatttttattttgtygtttttygggattttttagygtttgttaagtygttgttgygttgggaygaggtgttygaygatttygtggagtgttttattttgtygggttatyggygtttgtygtgtayggtttaggagtgtttagtttyggtgttgaagtttattaaygagaygtttaatttttggaygtattttatttygttgttgttgtttttgagtaagttttgtygtttgttttttttgagyggyggygaygtgtttttttattattygtggttgttatygttgtggtgttaygygtygggagtgttgttgattttygttatgagttgtayggygtaygtgtttagttgtttgtygttgygtttgygygtygtttttttttatttggattaygygtttattagttattayggtttyggtagtayggtggtttattattattatttgttgttaggttttagtttgttggatgttagagttatgattttatatttgtagtagygtttgggttggtaygtggattgtaygygttttatygtygtttatygygttttggtgttgtttgtggttttygtgttggyggtggtttgtattgtggtttgttgtaagagtygtatygattggtgtatttattygttygygttgygtattttygttttygttatgtygtttagtatggtttgttttattatgttygagagttggtttttygatttgygtggggagaattttatatttttygtgtatttttatygtygttatttttggttggtggtggtygttttttttaaygtgagtaagattttygagygtatttagtygggttttttygatattatyggttatagttattagtttttttatatttttattttttttagtatttaygattaggtgtattaygtagaagagggtttgygttagtttttttaggygtygtttgtygtatttattttttygg

SEQ ID NO: 6790 - DNA, 2954 bp, Artificial Sequence
  Description of Artificial Sequence: Synthetic polynucleotide
ygtttagagygtggtagtttgyggggtygtttaygtttttttttttggygttaagtttgtggttygyggtttttaagaagggtatgyggtgagttygygggtttyggttgygtattatttgtaggtttttayggatgaggtygtggygygagyggattygtgaattygttatygygyggggattaygtattaagtggatgattttgaggtttagggtygggtttygtagtagtggygttaagatygttaygtygaagaygygtatattttttatgattagtgtgyggtatttgyggtattttttttygaaaygygttaggygttgtggygggtattttttgtataygyggtygtttattaattttaygatttttttgyggtaggyggggtagagtggtgaygagtatattattttgttggtggttgygtygaagatgtttagygtggtgaggttgygtttttygttgttygyggggttatataattggaagatagagaggtygtagyggtaaagagygtttagtatgtttygygttgttttttgtagggaaayggygtttttyggatatagtttttgttatatatgttatattggttygtagagaaagaatatttygggattttggttgaatagttygtygaagaaygaygagttagagygttaygtggtgaataygtatattagttgtygtttgttttygaygttttyggtgtttygagtgttattgtttggaggggtygtaattttygttatttttgtygyggttgtaggagtygtttygayggyggtagygggagggyggtaaggagtgyggaggtttaaaygggtatgagtayggggyggttyggtyggaggyggttttgggygtttttagttgttttyggttgttttygttgyggtatttagyggtttatyggggttgtattgttgtagyggttttttgtgttatttgtagtttaggaggttgagtatagtgagtattagtagtagtgtatagttygygtataatattagygtttttttayggaatatttttatttygagaggggaygygggttagyggygttttgggygtyggggttattgygggagtagggtaygyggygyggttgtaggygtagtttggagtagtygagggagygygttygggggtagagttygttgygggttgyggtttattataggtataattygggtyggyggygyggyggaggtagttttgtagttygggaaggggaygtagygggttggttgttggygtygggattygggtygygatttygaggygggygyggyggttggtttttagygtttaaggttggtttttttatggtagyggtttygggtaggatttgygaggggaagyggagtgagyggatgygttttaattttttttttagttttttttttttaagtaaygtttattttyggttttgttyggttttttygtttatttggagtygagggygygttygggagyggtttyggattatygttyggyggattgttyggttgttattygtttttygatttygttttttttygttttygttgggggttttygtattttygaggggtttggggagtyggtygatttatttttgggtagttttygggtagygggygttttgyggttygggaagaaaaatttttaygyggtttagagtttygtttygygtttygtygaattyggygtttttyggttttagygaygtttttttygttttttygggatygtagttttttgtttygtttaggggaaygaagtyggttgggggygatggttgggggyggtttatatgggatttagttttyggtatagyggygtagtttttttygttttyggttttygtgyggygaatttttttatttttttggtagyggtggatggggtatagygygatttygtagyggyggyggyggttgtttttattatygggaggatgttygggyggatagygtaggtaattttygtygtttygtagttttygattggattaaaggatttygaatatatagttttaggtaaggaaatttaggtgtgtagtattgttygattygatttaattygttttyggtattagygtttttggttaaygaggtatttaagtaaagaaagatttygtygtagtygtygtygtygygygaaagyggygtttaggaggatgttgttattygattttttttaygtygggygttygtaaygygttyggattagtttttgygyggtttttgttagtyggygttyggttggtgygygtygtygtttgtygtygyggtttttttttttygtygygtagtttttttttttygtyggtttygttttygtttttaaygtygagtyggtttttatygtygttgygtttygggggttggagaygygattygttttatygygaygygygggggttgtagtttaygggttygaaggtttagttttgygygtaaagygtygggatgygaaygygggatttggagttygtyggtgtygagagttgttagagagttggattttgygtgtagttgtyggattyggttttatgtttttgtttttagaaagagttggtgatgaagtttgggtagaaattttttgtyggtygttygttttaygtttttttyggggtygatattgttaattttttygggtattgaggatatttttgygttttggagyggtgggaggaygyggagygtygttttttggttttygatattttgttygttttttttagtgggtttgtggttgygttttttygaaggaagtaataaatttttttgattttgggggttagaggagaygttttagtttttyggaggggtgtgygggygggatygttttttygttttattggatttttggtyggggttgtttttgttttattgtgttttatatgyggagtttygatgtttttygtattttygttygyggtgttgygtttattgtgattgaygt

SEQ ID NO: 6791 - DNA, 2954 bp, Artificial Sequence; identical to SEQ ID NO: 6790
  Description of Artificial Sequence: Synthetic polynucleotide

SEQ ID NO: 6792 - DNA, 885 bp, Artificial Sequence
  Description of Artificial Sequence: Synthetic polynucleotide
ygttygtygtttttttgaggttayggygtaggagagaaggagggygyggaaaygtyggtatyggttgggaagtttyggtgtttygggttttttttggygagggyggagaagtyggyggtttttgtttagaattttgtgattgtagggatygagatattaagggygggggtgtagaggattataagttttttagygygttttatttgtatataaatgtgttttgttttttaattttgtttttgttatttgtgtatttgttttttattaaattaattaattattygtggtttaggaagaaattagaattggggggattgtttttttaagggggatatagttgaaygtggtyggtagtttttggtttttygggtttgggtttagayggatttyggygttgtttttaagatygatatygggtatttggtygtyggygtatttaggagtaygattttatgygtgtgtaygttttttgttygggttaggagttttgttttagttttatttygggttataaatttttggtttygtttagygtagtttyggttyggagggtagtttgttagttaggttttgggttagggatggtttayggtgygygyggggatygttatattttttagygttaygttggggtygygygggtyggagtagggggagggggttygatgaygttatggaatagttggaggatttagttygggaattygtyggggagygggtttyggggtyggygttttatttaggtygatagygtttygggttyggttttatttttttagayggtayggttgttttttaygtttagagygggtttggggttttgaaggaaattagtgtaygatygygaggttaggaattttggagaatgggtaygtaggygtgygt

SEQ ID NO: 6793 - DNA, 2174 bp, Artificial Sequence
  Description of Artificial Sequence: Synthetic polynucleotide
ygygttgtgttttttagygttttaggggttyggtttttagttyggttttatttgggygttttttygttttttygtgggtyggygggtygtgygggaggaattttggttgtygygggttttgygttttatttgttatttyggtggttttygttygggtttygagttttttgyggagttagtattttagttgagttagtyggaggggyggyggyggtttygygygtttagagttttagtttatgaatgggattttattttgagygttttttttygggtttggggaggyggyggygyggyggyggggggygtttygtaagttygyggttttgagyggttattygygtagtaagttgggygagttggtagtygtttgtatttgttttttggtttyggtttttgatttygttttyggttttaagygttygggttgygttttyggttgtttygygaggtagttttaggaggtttaggggtttygtttgygtttttggygttagattatggtgggtagtttyggttaggagttttagtygtygygagttaatatygtttgtagttagttttygttttattygagyggaygygygggtattygtagygygygggttattttttttttyggtygggatgggyggygygggattgagtgatyggttttgygttyggygggtaatttttatttgatttgttgtttgtgagttgttgattgtyggggygygygagtttagggggtaygggtagtagygyggygatgatttgatttygagttygttagggygtttttttttttttttttttttttygttttttttgagtttgtgyggagattagttyggtgyggyggtttygggtggattatggyggggagttttagttaaaggygtgtgggygtygagttggagaggatattttyggtatygttgttttttgagggggtttatttaaattattgagttattttagatttaggattttttaaataattattaattgtgttygtttygtgtyggaaagtaagyggaaagagaaagagygtttatttttgggatttygtagatygtttttygttggttttttttygaggggtgtttggttttygaggatttttttttttttttygygtttttttttttttttygttttttgttttttttgtagtgttgttggtygggagttgtttttatygtagttggaaatagttgttttygtttygygtttttatttagatttygggtaatygtttttatttygygtttttyggaattttagaattygggtggtyggtttttggaaagtygtagtyggygygatgtattttgtagattttattttgttgggayggattttttaatttttagaatygygggtygtagggagttaaattgttgtttttttttttttttttygtgyggttggtggtttgttttttaaaggaaygttttatttattttttagtattttttatygggggygygttattygtttgggtttagattttgttttgtaaaygggttttttatgtatgtatgtgtaggtatattttggatattttataaygtttgygtttttttaatagaggtaygttttgttattttgggtatygtttttttttttttatttggtatttygaaygtagtgtgattaaattttttattgttttttggaygtygatygttttggggtgtaagtttggggtgtaaaygtttatttygtaagagggtttgggatygtttygtttygtttttyggtygttagaggttggggaagtttatatttggatttttatatattttgtygttattgtttagattttgattaattttgtgagygtygggttttygatattgtagtttttttaaattttagtattgttttttygygattgttttttttttggtygtttaggttttgttttygtttyggyggagygtaagtyggagggygtagtagaggttggggtttgaggttttygttgagtagttatggttgyggygatagttagttttttgattyggtagaagyggtaggygagggagtttaatagygatygagtgtyggtttttaagygtygttttagttttagtaaagaygggygttttttgtgygagaggtaygttttyggggtgtttagtaaagtgygtttttgtagyggtygtaagaggtyggtgaggygg

SEQ ID NO: 6794 - DNA, 873 bp, Artificial Sequence
  Description of Artificial Sequence: Synthetic polynucleotide
yggtygggtttagygatgyggttgagttgtttattygygtttgttgaatyggttaattagyggygttttyggatttagygggagygtttttatgtygatygyggtaggygtgygtttttyggggtygtatygttatggygatttgtttatttgattygtttygggtggattygtygygatttttgggygtttaggtttttgagggtttaaygggygayggttttttagttttagttgtgygttttygttygggygaggtggggttgatygyggtygtttgtataygttttttttggttygygttttyggtttgggagggyggattygtttattttaygatggtttyggttttggaagggattgttttygtgattygtttttttaatagtygttaataattttttttaaygttttttgygyggttygtttttgagaattttggttygggagagygaygyggggttttyggggttgygtaggttgyggygttttgtttaygttggttygagggygyggttygtttygggtyggtttatatatttaygttttttgtygggaggyggttgggaygyggyggggttgttttaagtgtagtygyggtagtgttgygtttttatygygggggtttttgygggtygygtttgtttygttyggttttyggtgtatgtggtttgygaggyggtagaggagatgtggggatttagggtygtaygtygtgttygaggtttttaygagaggttttttttygygggtttttgygtaattgygtgaagtyggttygggaaagttaagattgtggtttaggaagaggaaggaaygygggygatagagttggggtttgggaygttgagggggtyggtggtagtttttygg

SEQ ID NO: 6795 - DNA, 2174 bp, Artificial Sequence; identical to SEQ ID NO: 6793
  Description of Artificial Sequence: Synthetic polynucleotide

SEQ ID NO: 6796 - DNA, 510 bp, Artificial Sequence
  Description of Artificial Sequence: Synthetic polynucleotide
ygygtagtyggagaggagggggyggtattygggatttggygyggtttttgttttttgygttagygtgagttyggttagggtttttayggtygtgtttttattttttagggaggygtyggtgattyggttatagttttagttttygtygttttgtgatttgygggtattggatgattygtagttgagatttygttatatttttgaagtggggaaatggtgagtgtgggggtagggygttttaaggttggggaggttttattygaatyggygggaaatggyggyggygggayggagtttgygaayggagttttygttgtygtygtttagtttttagtttttggtttttttyggtgagggattygggtttatgtyggttttygtaaggyggttttggtttagtttgtagttttatttgtgtagttttgygttygtagtttygtattttttttgggttgtggggtgaggaggagtttatygggaaaaygtttgygtggygtgygaggtgttygt

SEQ ID NO: 6797 - DNA, 511 bp, Artificial Sequence
  Description of Artificial Sequence: Synthetic polynucleotide
ygttttgattyggtttgggygtaagtaaatttaggtttggtygtygggygtttgggtygygttaattygtttttttttttttaygttygttyggtattttttggttygttaagttttagatgygggtgtttgttttagaaaattttyggyggyggttygtattgagtatgttyggyggyggggygggtttggggttyggaagttttagygattyggyggtattygtygttttgaggtagygggtttygataggygatggatttttygggttttygggggygttttaygtgggtgttggtygggggttttttggtagtggttttggygttggggggtygaggttgtttyggygttagtttaygttttygttggygttttttyggygygtagttatttygggatttttaggtggtttttaggtttgggttyggtttgaggattttttyggggyggagyggggyggggttygagagtagtaygtaggtaaggagggttygattttaggtttygg

SEQ ID NO: 6798 - DNA, 417 bp, Artificial Sequence
  Description of Artificial Sequence: Synthetic polynucleotide
ygtygttattttttttttggagtagaaggggaattygaygtttaagyggttgygtgygaagtttttaattaggtttaaggagtygtagagtyggggtttygggttygtaggatttagaagttaygygtttygygtttttygtttygtygttgtttgttyggtygatttatttggtgtygygtgygttggyggttygygyggtagttaagttaaaggtygaggtygaggtygagygyggygtttagtagtayggygggggttagtagggygggygtyggtygtagygygtttygttttagtagtagtygygygtygtttttgtaggtygtttygtygygggttattyggggygtttaggttgtygtttygtygtatttygtygtttgttgtatygttttygttagggyggygaygygg

SEQ ID NO: 6799 - DNA, 1748 bp, Artificial Sequence
  Description of Artificial Sequence: Synthetic polynucleotide
ygygggtyggggagttgtattttttgtaggttyggttttyggtttygttttttagygtyggagttygggagtygyggttgtagtttatttttttaaatgatagttgaggttygggttttagttyggggtttgaygttagtgttttttttygtgttgttaggagtagttagygttatygtyggygtttyggtttygyggtaygtttgtaagttgtyggggyggygagttttttttgtttyggttttttttttygttttttttayggagagtygagtagtagttttagagtttttygtaagttttttttatattttttygttttygttttaaaggagtagtagtttttttttgtttttttattgtygtygtygtatyggyggagtttttttttygygygtttttttttygatggagttygggygtygtygaygtygtygttgtttygaattttgagyggggtygtttyggtyggaggaaygygtygtttagttygagggygtagagygttaggagtaygyggagggttggggygygggtttygggaaygagaaagtgtagttttttygggttattgggtyggyggyggggggattatggttttgaaggataygggtagyggyggtagtattattttgtttattagygagatggttttttygtttagttygttyggygygtyggtygtygtygtttyggggttttgygtattttygtttttttttgaagtagtggagttgaaygtaggyggttaggtttatgtgattaagtattygaygttgtttagygtttyggatagtattttggttagtatgttttygttttttagttttygtggyggygttyggygtyggggygagttgtttagggatagtygggygygtttttttatygatygggayggttttttttttaggtaygtgttggattatttgygggataagtaattygygttgtyggagtattttttygagaaggagyggttgttgygygaggtygagtatttttagtttatygatttggttaagttgttgtygtttaaggttattaagtagaatttttttaaygaygagggttgttagagygatttggaggataaygtttygtagggtagtagygaygygttgttgttgygyggggyggyggtygtygtgttttygggttygggagygtayggtggtggyggyggyggyggygygtaggataagygttygggtttttttaygttgggttatyggggtttttatattatygtgygygataattaggtygaygttaaatttyggygtgtggygygtattatggtgtgygggygtatygygttggttaaggaggttttyggggataygtttaaygagagtygygatttygatyggtagtyggagaagtataygtttygtttttattttaagtttatttatttggagtaggtttttgatygtttgttygaggtyggtttttatatggtggygtgtaatttttygggtatygtygttttygttaattagtatygygaygataagatttggagtagttatatygagtatattttttttygtaagttygtagtttyggygttttttagtatttttygttttttgttgagtygtygttagtttgagtttygttggaggtttygygggggtgttyggggtaggygttggttaattttttatagagagyggttttttttgtaygatttttttatgtagtagataygatttatattttatygattyggatattttygt

SEQ ID NO: 6800 - DNA, 1748 bp, Artificial Sequence; identical to SEQ ID NO: 6799
  Description of Artificial Sequence: Synthetic polynucleotide

SEQ ID NO: 6801 - DNA, 648 bp, Artificial Sequence
  Description of Artificial Sequence: Synthetic polynucleotide
yggttgtgtygggagtaaaggttygggttagtgtgygtgygggygygggtgattttatttttagggaagtyggygtttaattatttaggtagtagtttyggttgatttttttttttttttttttttttttttttttttttttttttgygtgttttttttgtatyggttttygtygyggagttaggyggtagtatygaygtygtygtagtttttgttygtatygygttaattygygttttyggtttataygtagtyggagygattgagtyggtagtttygggtttaygttgygtatygtgtgtayggyggggttggttgagttgatttgygttgggtttyggygtygtaggyggttggggagggyggygtgggagaggaygttgagaygtaggggyggtygygtygaggtgataagttgygtatttggaaagttattyggttgtttggtgaggttygtgggtygggggttttgggygtyggggtgtgagggygygyggggagggayggggtyggggtgygygygtgtgtatgttgtgaatgygttgygygatgtgygtttttattttatatttagtyggttttttgtttgtgttgttygagtgtggaygtgtgtaygygttgtattygttyggtgtggtagygtttygt

SEQ ID NO: 6802 - DNA, 863 bp, Artificial Sequence
  Description of Artificial Sequence: Synthetic polynucleotide
ygatttttaaygttgtaatttgtgatygtgattaaattttagygatgygagggtaaagygttttyggyggtgyggtgtgagttatttttyggygttgtttgttttttttagtagttttttaagggataggttttgtttttggtggtygatttttaggttttyggtttttttagggygattttgaygaggggtagggggtggttttygggaggatttagaggaaaggyggggataagaagggaggggaaggggaaagaggaagaggtattatttttagtttaatygttttygatttttataagagtgttygtgattttaaatttaaygtgaggygtaaaagygtttttattttttygttttgygyggttaggtaggyggttggagttgatggtttatttygygttttttgttttatttttattygagatagggaygaggagtaygttgtagggaaagtagygagygtygggagaggggygggtagaagygttgataaattagyggtgggggyggagagttgaggagaaggagaaggaggaggattaggaggaggaggayggygaygattagaaggggtttaagagagggggygagygatygagygtygygaygyggaagtgaggtgygtgygggttgtagygtagatttyggttyggttttttygagagygttttgggygtttttttaygttttgtttttaagttttttgtttttttattttygtgagyggagaattgggagtggttattygaygataggttagygggtttgttttttatttttttagtttygygtygtyggtttatagyggttttttttggggatagtttttttygggtgtygttttygttttttttgtgygt

SEQ ID NO: 6803 - DNA, 1288 bp, Artificial Sequence
  Description of Artificial Sequence: Synthetic polynucleotide
ygttttttgygtagtygatttygtttyggtttyggtttaggttagagaggtggttttyggagatgttgaagttatttygygtagggggaggggtygttaggtttttttttaattayggtggtygttttagttatttgtatatattatgttaataatagattttttgtttygtttttatttaagtttttygttttttttgggggtttttygggtyggttygygggttgggttaaggtgaatatattatgataataaggygggtttttgttttgttttyggaaggggggygygtagtagygggagyggtaggtyggaygtygggygtygggagggggtygggggagggaygtygtgttyggagygygygygtatttatatatttatatatatatttaygygagtatygygaagggtatttaaggatygygtaygyggggttgyggagatttttygggtagtygygatttyggtttygygagtagtattggttttttgggtttatttygttttttttttttttttttattttagtygtttttttygygttgygttgtagygtgtttttatagtttttttgttttgaattgaatgtaggtgggaaataggtyggygtgtygaaagatatygagtaggtagaaataaggtaaatttatagaggygtaataggttyggtttttygtggttagggygagtygyggtttygygtggygtttyggtygttgttttyggattttgagyggttattgttggggttttygaaagaggtgtyggttttttgggagtyggaagagttgtttgggtgggtttygttttgttttttattttatygttatttagttttyggayggagggtgttttttatttttagttgggaggagagaagaaagyggggatggtgtaygtttgygggtttggaygttgagtaaggtaggggttygtattygttygtgggtttgattttattaattagttgtgtagttatagggattgaattttggaggaatygatttttttttttttttttaggattatttgaggtgtagagggtgggaagygaagtygagayggtygatttygttaygatgttgttgaagaagtaygtagggaaaggagggggtygggagtttagattygaggattygatttttgtygaatagtattgtgttyggattatgttttygtgtgtygttttggyggtttttttgttagtggtggtygtggtgttttgtttgtatttgggtgtgaaaattaaygatttttaggygaggatygtygttttygaattygt

SEQ ID NO: 6804 - DNA, 1275 bp, Artificial Sequence
  Description of Artificial Sequence: Synthetic polynucleotide
ygtttatttygttttgtttgttygtttttattgtttttaagttygtttygttygyggtaagtgygtgtttaggygtagttatyggygagattaggagygtagygttygtagtttgagggaatyggygtagggtagtagyggttgtagttggattygygygttttagygtttagtggyggyggtygggatattttgggtagtatttygtatygtagtattttagattaygagtaatygtgttygttttygtyggggttggagggygtagggtygttattttgtaagttygtgggttttyggttatttttatgagagaaggygaagtygggygaaggagtaggaygttyggtagtaggattttttygtaagtttygygggttttttgttttygygtttttygggygtttaagaagtaaaatgtaattatygygttatagttgagaggggaaggggttagygttattygttygttyggaattyggttttygyggyggttgygygtttyggtygyggttttttyggttygggagtgagtagtagtaggaggagaggtagyggttyggggttggtyggggttggggaggagggaygggayggagggagggygygggggyggggagggggtttyggyggataaagatggtaatgttttttatttaagygtgttgtagtttggtttttttaatatggttgttttttttttgtttygtgtatttgttttgtttggattttatygtggtygagaaggaggaatggtatatygttttygtgaatattatttaygtygagttygygtyggatttyggggtyggggyggygggyggyggyggygyggagttgtatayggagaagayggagtgygggygttayggagagtattygtttaagtaggaygttygyggggaggtggttatggttagttyggtttaygatygtttggtttgygattttaatattaagttygtygtttygattygyggtaagaattggatagtttttatttttaagggtaattgtaygtatagggataagattyggaaygygtttttgtagaaygttttagtygtggttatttttaaygtgggttttaatattaaygagattattattatgttttaygygggtgagtggtttagygggygygggggaggggagtyggyggggayggaggtgtttagagggatttagygtttgtttttaggttttttttgggaagttygtgyggygyggaagaygtgtttgggttttttggatygattaagttttgtttygygt

SEQ ID NO: 6805 - DNA, 1071 bp, Artificial Sequence
  Description of Artificial Sequence: Synthetic polynucleotide
yggygttgagttttgtttagygygattyggatygayggaygygtagagattttgtygggattygttttttagtyggygttyggggagtygtyggtyggttttatttttygttygggagtygggtagggygagaaggtagygygagtggyggtggygattttygtyggggtttttgygaygagyggtgattagtagygttygtagtygyggtttygttttttattyggaygtggttaagyggyggyggttaygaygttyggtttttygggatygttyggttgygttttgggygtatttgygygtttggtttygygtttygyggagagggygatgggtttyggttaggattgagtttttttttttttttttttagtttygtttggtatttttttttttgtttygagggygagttayggtttgygtygtygttttttttttyggtgttttyggttygtygttttttygygtttttttttttyggattygttttyggggttattatggtygyggttatygttagyggtttgattygttagaagyggtaggygygggagtagtattgggatyggtygtttgttagtaggaggyggagtagttttagtaagaatygygggttttgtaayggtaatttggtggatattttttttaaagtgygtattttyggttttaagaagygtaggttgyggygttaaggtttgtgggggttatggtygggagatgygtttygggtygtttttttttygtttaaayggagtttttttaggttttttttttttttyggttttttyggtttatttyggtttyggttttttttttgagtattttgggtgtygtygyggggattttggagttygttgtygggtaatttgtagtygtygagaagtgtagtygttagagatggtaagttggttgtttttygtyggyggtttttgtttttygygtttttgtaggttgggttttgggaaatttgttttttttgagtttyggtttttygggaggatagggattggtattggttttggaaygyggggtatttttttttgttatattyggggtygagttatygttygt

SEQ ID NO: 6806 - DNA, 694 bp, Artificial Sequence
  Description of Artificial Sequence: Synthetic polynucleotide
ygttagggttgtyggatagttygatgattaggagttttyggttttygaagttgygttttatygtgtaaattttgttgatggyggtgtattgtagttatayggataygagygtttygygtagttyggggtagyggtggtattygaaggagatgtygtttttttgttgtagtygtyggygtygttttatgttygtygygggygtttygggtttttgggtttyggygtttaggagttattygtaggtagttagtgtttygtatagagttagtagygygttgttttttygttyggttatygttgygtttygtygtygtyggtygtgtttttttaygygggyggttttttttgtttgttyggttttgggtttagttygtyggygttgttgggggyggtaagtttygtattagtttttattygttttatttttttyggttgaatgagtgttagttygygtattggggttatttagaggagaygggtaaagtygyggttttaygggttgtattattggtygyggagtttaggggagttgtaggagaaattattgygaggagggggtyggyggagagaygggtyggygtggatttgggagggttgttggygttatttgttggttyggaattaygttaatagttaaatggygttygggaygaygtaggtgaaatgatagttaaggttyggggttygggaaygt

SEQ ID NO: 6807 - DNA, 694 bp, Artificial Sequence; identical to SEQ ID NO: 6806
  Description of Artificial Sequence: Synthetic polynucleotide

SEQ ID NO: 6808 - DNA, 1424 bp, Artificial Sequence
  Description of Artificial Sequence: Synthetic polynucleotide
ygagagttygaggygtygtttttgtygtttygggattggygtgaggagtttttgaygatatatattaattygagyggttttaaagatgtagttgtatatggagattttgttgggaaaattygtttgttttttttaygtygtttagtttaggagaattatygtygttatttyggagttttttyggttatygygtagagtttttygagagttygagtygyggttttygagttttaaggtttatttagggttttagatttttgtttygaaaggagaggatttgagaaaatggatgtattgagatttttttgaaaatttttygagagagygygagaggagygaggataygttattygtagttaaaattatatttaaggattaaaataataataattaaaaattttattaaaataataagygtttaagaatttagatygggttggtggggggaggggaagaggygggaaggggagggtygtayggaggtagttttgtagtgagtagtygatttygtygtttttyggtatagttggatyggtttttttagtygyggtttagattygtttttggatttygggttagtttyggtgttaggatygyggttygggtttggattttygagatttygygtattagtttygygggagtttyggtatttttgtatgagtaygagaggattttgttttygygtagtagttygggaagtaggagtygaagygygggtygtggagtaaggygggaatyggaggyggyggyggyggyggttaggggygtayggtgttaggattagttygtygygttttatggggagtyggyggtygtagygttgttgaggygggttyggttggttaggyggggggayggggttygggttgtagtagttttttttgyggttgtygggygggttygggygttygggggttggggggtggggggtgggggaggaygtygagygttgaggtaggggttygggtygagggygyggyggggttgygygtaygttggggygygtggaggggygyggagggygaaatgagtttggtaggtggttttttttattattyggtggtgtattaygagggttattygtttgtygtygtygtygtygtagttgtygtygtygtygttagtygttgtagttatgaggagaatttttatttttatggttggtttatyggttatttygagatgtygtttttygattatagtatggttttgttttatagtttygagtatgttagyggygtygtyggtttggattatttttattaygggggggtgtygtygggygtygggttttygggtttgggggggtygygttyggtgaagygtygaggtatygttaatygtaaggagyggygtaggatttagagtattaatagygttttygtygaattgygygagtgtatttttaaygtattygtyga

SEQ ID NO: 6809 - DNA, 1215 bp, Artificial Sequence
  Description of Artificial Sequence: Synthetic polynucleotide
ygtgygggagggaggataagaattygggagtggtygaggataaagygggggttttttttattttayggtgtttagttttttttygttgtaygtggtttagggtggtygtattatttttaaagtyggtttygttaatygttagtttygggattgaatttgttttttyggtygttygtttttygtaggggataggggyggggagggagagatttagaggggggtygggggaggtggggtygtyggggaggaggygagggaaayggggagttttagggagayggttttygagggagagtgagaggggagggtagttygggttyggtaygttttttttttyggtygtttttttttatataagygtaggtagagggygygttagttatgttttgtttttgygttygtygtygtygtygtygtygtttagttyggygygttttggaggattttgygtygyggygttttygggtttygtygtygttagtygtttygtygtttttttttygttttyggtatygtygttagygttttygtygtagygttygyggttyggttttttttatttyggggaaggggagggaggagggggaygagggttttggygggtttggaggggttgaatatygyggggtgttttggtgtttttygtttygtttttttaaaaagttatatygaygyggatygyggyggygttttttttygttttygttttatttygygggtttygaatgyggggagttyggatgttyggttttttgtgaggtttttatttgatattygtygttttttttyggtattggttgggagggygttttgtaaagttgggaaygyggagtttyggattygttttygtygttttyggttygtttagggggggtygtygggaggagttygggggagagggattaggaggggttygyggtttygtaggggygttygygtttttatttttgttttygttagyggatyggttttttattttyggtttttttattatgtatttgttgggttttttttttgtggygtgttttttgttygtygttgygttgttttygggttttygygaggygttygtygtygtygtygttttygagttyggattygatttttyggaygyggagttygaygygggygaggttayggtaggtttgygttagggtttgyggagaattygagagtttgygttagggtttgyggyggattygagaatttgygygg

SEQ ID NO: 6810 - DNA, 1184 bp, Artificial Sequence
  Description of Artificial Sequence: Synthetic polynucleotide
ygaatgttgttttygtatygatttaaattygygtygagtttttttttatttygatattataagggagaagagyggagtygtygtygtygtygtygttattatygttatygttatygtygtggttttyggagygagygagygattttgtygygyggggagttttatygggagtygygtttygttagttygttttaggtygtygtygtygtygtygtttatttattttgtygyggygygttttygttgtggtygtgaggaatygagtttagygttgttaagttgtttgggtttggagygtatygtgttatagygtttggtttygggttygggttgygygyggyggttagatatgataggttgaggtttttttgtttatattyggtygtygagggggyggtgygtygtttaattttttygygtygggtygttatygtygtttttygttagtttygygtttagygtttyggttyggtygtygttttattttttygttttattttttygtttygttttatataygygggtyggggtttgtgagtagtygtgtttttagygaagaygggggaattgtattgagaattygttttyggtatttttygaagatttygyggggyggtatttttttttttatataygtaygttygygagtygtttygggtagyggtygtgtttttyggyggggtttygtyggyggtttttgatttygttttagagttgtttttyggtagygttattttttygtgtttataaaagtattttttttttaatttatgaayggatttygatttttgttttgttattatttatgygtttygtattygaggtgtygtttttatttataygttttayggtttygygaaattyggttttttagttygygggaygygttgtttgttaggygggttyggyggtatttygggggygggaggggtyggtygtagggtttttagtttggygttygyggggygttygtagygaaggggtgggtgtygttygtgaaygtagtagggattagtttagttygygttygtttttgggtttyggttatygttttttygttattttttyggtttttgygtggatyggttygtggygggggttgttttgygttttygttttygtagtagtygyggatttttattaaygttgaygagttagtgtygygattyggggagagaagaygg

SEQ ID NO: 6811 - DNA, 5820 bp, Artificial Sequence
  Description of Artificial Sequence: Synthetic polynucleotide
yggagggaaatygggtygaygataagggtggttattttygggtttttygygttyggtttaagygtttttgggtggggtagtttaaayggggagaggggtttygtgggtygagggttygaggtygtagygagtttagygtttggttaaatttggttygygygtttttttattgttttgttagggttgtgtgatttttyggagttttaygttttygtttaaatagtttttagygtttttgttggtattyggggygtttttattttagtttttgtattyggygygtygygygtagatyggayggaggggaaagttggtaagagygyggygttygygggagaaagygttaatgggyggtygggtgggagtagygygttygttygtttaygttaygtyggtgygggttyggttgaygatygyggygtttggggaygtyggygygtttygttygttaggtgtttygtttggaaatgtttttattagttgtygtyggtttttygttggagygygygygtygagttttygygyggagttttygygggttgtygggagyggtttagygttatygtaggtaggtgaggtttttygttttygttttygtttyggggtttygagattttttttttttttygaggaggyggaggtttygygyggtygtygaggggagygggyggyggyggttgyggygatttttyggtgygtttygggttgygagttgtttttygyggtttyggtagttatayggygygggygggagtttttttagtttaggtagggagtgggtttygtygtataaattttgygaggattgtttttgygtttaaggggataaagtttgttattygtygttaggttttttagaggtygttgygtttgttgtaagttgygggaagtagggtgygygggtyggygyggggyggggggtggggggttyggagtggttaggtttgagttttggaygttyggayggygtttygtttagttttaggtygtatttagggagtaagyggygggggygtagygggagagaggagggagagggtygygggtttttatggagggyggttgggaatttagagatttatygtttgtttttgtggtttttttttttattattggtttygagggggtttyggggttgtgaggaaatgatttgttaatttygaggttygttagtgyggygttagygatygtgaggttttttaaatttatattttagtygggtgtttygagyggtgggygggtataggygtttttaaggtttttggttttaggttttagaaagaaaggtttttgtttggtgtttygggttttyggtttygtttttggttggagttaatttttttgggttggaaggagtttttttyggaygagtttttggtgyggggaattggtggtttttagggtaatttttgaagtattagggttaggttggtygaagaagggttagggttyggtttgttttttyggaggttttttatggtttygayggttaayggtaatttygttaaaataggygattygtttgygtttygygttaggggttgattattttttgttttttttgyggtttgtttyggttttggtttttygtttttyggagygttttaggttagygggagtattttattttttygaagttgagtyggtgttgtgtatttygggagtyggttgatttttggtttatttgtttaygggtgtatttagtatygggggtttttagagggaggaaggtttagtatttygagtttatgtagaygygtttagttgatatttgagatgttgagygttttatygttggtgaaagggatattgggtgttttygttttaggtttggttttttggtgaaggtatttggaaaatattttagtattatttatgggagaagggtggtttagtgagaattttyggtttgggtaggygggtttaggttaggttatagggttttagtgagatgtttyggtggtygttaatttataggttggattgattttgtgttttggaatgagtagtggggtttgggtgaggtygggygggttaggaggttttttgggtagttgygagtttttygaggtagggtgattgtgattgggttyggattttaggygttggggtttgttggygggtaggaagtggagygtgtgtgtgyggyggtttgggaaagtygatttagaggttaggtttttgggttayggagaaagggtygttygttggtggggattggagygtygatttatgtatataggttggaaaggtaaaagagaataggagaaggtggyggtggtggttaaaggaagttttygaaagggtttttaygtattggttgttttgggaagtggaggttgttttttttagattttgtttagaagatgaatggtygtttgttttggggtttyggttttagttaagtttygtygggtttggaaggaaggaaatgtattagttttaggtttgggtgggttgagttgttgtattagagtttagaggtgtagggtataggtggttgggtttttgggttttggtttttttttttagtyggyggagtgtttatagtygtygaggttaggttttygagtataggtgaggaaaggataagttatagttgaatgttttttttttgggggtttttattttttattttagtttttggttyggttgggtttatattttttttttagtygggttttattatttggagagagygagtagtttgtaaataataaataatgggaagtagaaggatgttygggaaaaattagaaaattgtaaggagtggggaggagggagggtgggagaggggaggaaggagggtgggggaggggaggagtaggaggagagggaaaggggttgagagatttatttttagygagaaatttyggtggttagttttttattatttataggaaggtgatattagygatttaggtgagaaagaaagaaaygyggtttgtygygaaattaatatagaatttagaaataattattaatgttatttgattygtgttttttatatatttttygyggttatygaygttaaattgtttgaataatttgtatggagyggttatttattattttygatggtttttttttgtaagtagttyggaygtggttygtttyggtttaaygygatyggagaattygtatttttatttgtaaattaaagtaattaygtagtagatattatatgatgtgtattgtggtttttagatagttattaattatttttaatygagttgttaaaagagtaggtagatttygtttttgggaggtaggtttgtagttggggagagggygaggaygttattattaattagagggtgattttggggygatttataggtttgaatttaggaatttttttgagtaagtttgtataaygttgttttgtayggttttttttttaatttattaygggaggtyggtttagggggygagggtaatyggggygagtttyggtttyggagggygatggygtagaaggyggggaaygggttygggatggttygggygtttttttgtygtttttttgtygtttgtttattggttttygttttgaatttgggtaaggttttagggagggtattggtygagggagttttggggtgggygttyggttttttttttygattgtttygtgygttttagatagaaagttgggtaaaatggataggggagggygttttygttaggtatttaaygttttttttttygtagttagttttgyggggygtygggagggaygagtttagygggaggggtyggggtttgggttgaggaatttgttttttygagygygtagggtygttyggtagttttyggtttagtygygaggggtagggggaagtyggyggagtayggtyggyggaaaggggatyggggaggaaagtyggggaggygaggtgggggyggtgggttgagygggaatttaaaagatygyggtggagaagatggggygtttttygygatattyggttgtttagaggtgtaaagtyggtgggygtaygttyggggyggttttatagttttygggtygttagttttagggtgtygggttttaattaaggtttygaagtttttaygtatttgagggtattttgattagtttttgygggttgttttgyggtygtagtgggttttgaaagtttatttyggygtagggtggaaatyggygggaggygttgttgattttygattaaataatagtgaygagaygygtgyggggygtttgygagtttttttttgttattyggagtagagygygttagygygaggtygggtyggtygtttgygtagygtygggttaattttaattgttgattatatttttagygtgtttttttataggttttatttgtaattgagaygaatgattatagtggggygggaaggagtagttgtttattaattaatttttaattaaaagtgtttttygttttygggtgattaaagagaaatatygttygttgggygatattgattyggatggaatttatttgttaaygttyggaggaatggttttttygtttatygygyggtygggattgttttggtttttttyggtttgagtygtyggygagtgatyggygagtttgyggttaggtygggttgygygaggtggggttgaygttagagtttttttygttttaagtygygtatatttgatttgaygggttygygygattygtttttttttttttttttttygtaaaatatgtatttttgtygtygttgygaggtygttyggttttagagttttttygagttttyggaatgygaagttaaaggaatygyggyggttatygttgtttattttgttattyggttagaaaagtttgyggagygyggggatggattaatyggtttttttgtttygtttttttagygtttagaagtttgtagtttyggagtagtggtygygttaygtyggttttagygygtagaattttgtaggtttygttygttygtttygggtygygttygttatgttttattygtagtttggatatttttatttttyggttttttaggtaagyggagtttygtttygtttaggttatygtaggtgtyggtagggyggatggggyggggayggggggtggggagtgttygatttaygattgtttgyggttttygagttagtaaggtttgggtygygygttttttaygtttaatttttgttttttaaattttyggggaaaggtygaggygttaagaaaattygaygggtygggttygggttttttgatgtttgaattataaggtttaggttgtgttttaggggagttttaggattttaaggaatttttggggaaggaggtttggygygtaaatggygttagaggttttggaaatttttyggggaagggtgtaggtgttyggttgggttttaygtggyggaggaggttagaygygtataagttagtggaaaggggygagtattttggtgtggayggygggaggttygggggtattyggggtaygttttygtgggyggygygygggattggtaaggtttagggttttagtttttagttyggtttttygttagttttygyggtttttttttgtagtttttgatggttattaattttttgagtaygtgttgygagttyggaggtygtaygttggyggatttygggttygtygtttyggtttaggygtyggtttattgttyggtttaygagagtyggttgttggttatygygygttaygagtttaattyggtygyggygttgggygtttatgggggtttttatggyggatygtagggttatggtaattaygtgatttayggttyggaggygttygttttttattygt

SEQ ID NO: 6812 - DNA, 1233 bp, Artificial Sequence
  Description of Artificial Sequence: Synthetic polynucleotide
ygtyggttgygtagtttagtataggttataggtyggggggtgggttygggttttgyggagtgggygggtttgagygggttggaaygtttygtyggttttatygtaggtyggtattttagttttaggttttatagygggtttttygtttttattttygygggttttgtagggttggggttgtttttgagtttttggtaaggttttygggagttttagttttgyggagattaaagtttttatattttyggtagagttygggygagtgtttygygggtggyggyggttgtggggtygtttgggatttttygtagtattgattttgtaattttttgtgtttgygtttygtggtgaggggyggygggatgygygygatttttttttgatttagttaaayggaaaagttygygygtttyggttggaaggtggaggttaggtaggattyggtaaaggtatattttaaaygaagtagattttattttttatttgtagagggaaggyggtgtggayggatagaaayggtttttatagttatagaattatygyggttatagtagygyggygttyggtagggagyggatygtggtggaggtttttgagtygagtaggttaygtagattygggaggygttgaagygggygtagttgygttttggagtaggtagattaggttayggyggagggagaggttyggggaygyggygtagtttttgyggagaggtaygggggyggyggggaygtttttttattggttgaaatgttagggatyggtttgggygtggagtagtyggggygagttygtttttaggtatygtyggttgttttaggtagggtttgtaggagtggttyggagtygggtatygaggtatygaggyggggatttggaggggtaggggtyggggtagggtttgttaattaagtttaygggggtygtygggtggtggaggtgggatgggggaaggaggttgagtattagtttygggygatttaagattttttyggtttaattttaggagggaggtagygttggygggtgaagtygttattttttttygggaggtygtttagtagttgtttttttaygtttyggggttattgygtygggttttggttattatttgggttttggtttaygtttagaygaggggtagygygattttttygtagttttattttagyggttgtygtygtagagtatgaagaggtttggtttttgtagaaaygtagtttagygyga

SEQ ID NO: 6813 - DNA, 2865 bp, Artificial Sequence
  Description of Artificial Sequence: Synthetic polynucleotide
ygttttttgttttattygggtggatgttygyggttttggggttttttttatgttttgattttggggagtttyggttggtattggttygygaaggtgatttgyggatagattagttagagattaygttggttggtygyggygygggttataaagtttagyggaggtggggtaggggattaagttgtttyggygagggaagaaattgttgtttttaaattattgyggttggaggagtygatttgygttttagygtgttaggataagggyggygygaggggtttaggggttaaatggggygttgggtaggaggggttgttttttgtaggggaggaggaatggttttttgttagggatttggggaaaggtaatagttaggaggggatygggtygtaagaagtttattttggattgtagtaygggtagttagygygaatttagttaggaggtttayggggatyggtaaaygagaaggggatgyggtgaggaygtyggattggygtttttgtygygttgatatttygattgtttttttttygtatygygttttttagtttgagayggggaagttatttagggtatygygtttttaaatagyggggaaaaggygttttgggyggyggttgagtgatygagggatyggttyggagttaggagttgggaggygyggggatgtggtggggaggaggggagtgggggtagtgagggggtttaaattttgyggggaygttygtttattttgtygttgyggttagttttttgygttttttygaygtttatttygygtygtattagygttygtagtagttttaygttgttggygtaggyggygygtaggagggtygtygttttygggaygtttttygggaygtttttygggaygtttttygygttttygaygtygtgttttttttygttttygaaagggtagaaagagtygttygaggygatgttgygggtgtttggtagattygagaagtttttaaatttttygtagttagyggggtttttttygatttgygygtttyggggtggggayggyggtggtggggttatgtagygygtttygtygtttttyggttyggtttyggttagtagtattatgtyggyggtyggggygygggtygggggtyggggygygggtaggaagagygggaygyggggygygygtygaggttttygtttttygtttttgygtttttagagaagtygtggttygygygttttagttyggyggaaatyggtattaggyggttgygtttaaagaaaaaagttttyggaggttgagygagtttttggggtgggygggatygygggggtttttygaggyggggyggggyggggygyggggataygttttttttyggggtttttttttygygtttttttttggttagagtttagagttaggtaggygttttttygagygyggggattgggtatttggtagygttgttttagagttggggatagttggygygggagaagtagaagtaattattaaagaagtygaattygagtygygggyggtaagyggtttygttttttttttygtyggttygygggatgggggyggaggtggyggyggggggaygtyggggyggagtyggtttttagtttygggaatttyggatttttggagtyggttttygtygagggygtygggttttyggatttgggtggggtyggtttttttygtygttttagaggagtagagygggtttttttttttygggggatttygggtttyggggttgattttattyggtygyggtygtttggaggtyggggaattttyggggygtttggygggtagaggagtygggygygggagyggagtygtttatttgggatttgtgttyggggagygttgygggtygggttattttgaattgggggyggtyggttgttgtgggggagttttagttyggaagggaggataatttttagagtttttygtttygyggaatyggggtyggtygtggtttgagggttggttagattttgggatggggggyggggtgtttyggaattttagggagtatttgagtgggaayggaygaygaggaatttttygtttttatgtttggtttgtgttaygtgyggggatttgyggatttattttyggaggttgygattgggygttgattttaygtttggttgtttaaaagagtagggtygygggygatagtygtagtttaggtttatagtttttttggttyggttttgtttttttttygttagttttggygtyggggatgggyggggaggaggagggygtgtgaggatttgttatagggagtttttgatttyggggtaggaggygtygtgagttaattttgggggaaggtttttgygtaaaggygyggaggtgygttygygttygtygtaggttaaagattgyggaggttattagttttgtgtttttttagttttttttttttttttttttttttygattttgatagygtgtttattagttgttagtyggtgggaggttttygyggttttaaggtgaatatagttaggttggygtagtygttggggattaggtttgaggtttaygtgtygttgggtaagttgaggggtaygagggtatygaattygaaatagtygtgggaggtgtaggatgaggataygtttaaattgygaagtygttygagttttygtgttatatygtattggttygattygttgttttggtygtttggttttttagtgtttttagtaggagttaaagggtttgttggyggttttygattyggtatttgtagggtttyggagggtggggygygygggagtatygatttttggtgaagaygttttygtatttgggyggttttgagygagtagygaattgagattygt

SEQ ID NO: 6814 - DNA, 1154 bp, Artificial Sequence
  Description of Artificial Sequence: Synthetic polynucleotide
ygtgygtttttaaggatgttyggtttttttttaattygyggtttttttttttttttttygyggttgtygttgttgtygygaaaattaggagaagtggaaygygygyggygaagygtygttttygyggyggtattgggtatgtttygtattyggggtyggtttyggyggyggggyggaygtttttttattagtygggygttygggtyggtygtygaggtttaggtggaggttgaggttgtygygygtygygggaggagtttygttttyggyggttgaggyggyggyggtataggtggygygggtygygygyggggygtagttygggagygttyggygtygggygtygyggyggttttaggttygygttygyggygatagtyggttgagyggagttgygggygyggyggttgtttttttagttyggtyggttggyggyggygttyggagtttygaggagttygtaggagttygtggagttygyggagttgggtagggggygttgygttygtygagttyggaggggtygtygggtygggygttgygtattygygtygggagtygtttttygttygyggygttygtttttgtygttygttagtattttttgtttygyggtygygtttagataataaaagyggaagatgttgtagttgggtaaggttaggattttgttttgaagtygggyggygtygygtaygttttttttyggattgaggagttgtygtyggyggagggtgtatgtttgygaggaagtygtygggygtygygtttttgggtgagttgyggggttgggyggtyggggtygggygtagttttttttyggygtygtttttttttttttgtygttggtgggggtggttttgggttttyggtyggtaggyggyggyggyggttgttgyggggtttttgtttgtttyggggaggatygygatygygttaggtttttttyggaagtygttgtgtttggaagggggttyggggttagtgttttttttggagyggttattaagtggttgttttgygtgttttttttttttgttatttattttttygggaggaagygtatttagggtaatatygataatgttgtttttygttattttgagaatatattyggtgtatttatgaygtttttaatataygggaggagaygg

SEQ ID NO: 6815 - DNA, 1154 bp, Artificial Sequence; identical to SEQ ID NO: 6814
  Description of Artificial Sequence: Synthetic polynucleotide

SEQ ID NO: 6816 - DNA, 396 bp, Artificial Sequence
  Description of Artificial Sequence: Synthetic polynucleotide
yggyggtttttygttttttttttatttttttygtttttatttttattttttggtygttygaattttygatygggagtttagagttttgttagygtygtattgtgygtygygtaagtygttygatttttttagyggtatyggttttaagtagtaaatatttgtgygtttttgagttagggaygygygtggggggtgggygtgtaygygggtgggttagygtagagtgggagtttgtgggtgtttttygtygggatttttaatttagttgttttygagagtttaagttgagygtygtaygtgttygtgttatttgttgtattggaygtagtttaatagygtagagaggtttttattyggtatttagttygatgtgggtygtttttttttttttagygg

SEQ ID NO: 6817 - DNA, 438 bp, Artificial Sequence
  Description of Artificial Sequence: Synthetic polynucleotide
ygaggagtaggggttgygggtygggtttttgttgttygyggttttygggggtygygtygygtygggttaygtgggggttttygtttttygagygggygtyggtgggaaatttgygyggygagagatagggggatggggygtttttgaygygattgtggggtgygggtagttttggaggaggatgttyggttaagtttattttgtttaggtgtyggatttttagtttaggttgyggtttgttttgggttygtgaggygaggtygtagygtttygaygtygggtgggygtgtgggtggagtggagatttgggtttttyggygtatgggagtttygtygtttgyggtagggaatygttttttatttttggttyggttygggtygggagtygtgtttygygttgattyggtgtaattttttagtttatttttttttaygyga

SEQ ID NO: 6818 - DNA, 438 bp, Artificial Sequence; identical to SEQ ID NO: 6817
  Description of Artificial Sequence: Synthetic polynucleotide

SEQ ID NO: 6819 - DNA, 411 bp, Artificial Sequence
  Description of Artificial Sequence: Synthetic polynucleotide
ygygtttyggttttyggggagtygttttttagatttgtttattygggagtttttttttygygtattttttagattttttttgagattygagagygttggtttttttttattygygatagttttgggatgatagtgygggtttttttattygtagtttttattatttggyggttaggggttygyggttygggygggyggygttagtgttttttggagttgggyggggagggyggggygggyggagygggtatggtggggtgtygggggtygtaggygtagygttttygttttggttatggagyggtyggygttyggygaggtggttatgagttaagttatttagtyggygtaygttattgygygyggygagttgagygyggggtagttgtttaagtggatygatattatygt

SEQ ID NO: 6820 - DNA, 1137 bp, Artificial Sequence
  Description of Artificial Sequence: Synthetic polynucleotide
ygygtttgttaggtttagatttataygtaygtygtttttgtttgtatatagtgygttttyggyggttygttygtttttttttagtttaygttttattgttttttaagttagaagtttygtagtygtygygyggagaatagygatagtygagygttyggttygtttgtttgtyggtgggtttgtttgttygygtagtagattyggggyggtygygggagttygygtttygttygtygygtttttgtygggatttattygtagyggagggttgagttygtyggyggtttttyggagtttatttattttygygygtyggagygtaggtaaaaggggaggaaaggtttttttttttagttattattttygttttttttaagaatttgtttaataaagygttgaggaaagagaaygtttttttgaattttttagtaggggyggagtttgttgttgttttgygttgttatttyggttatattgtttttygygaygatttttgattagtyggggttaygttygggagaygggattatgaagygttyggtagtygtttggtttttggtygggtttagtttyggtgttttttagttyggtaaaggtaaggygtygggattyggatagttgggtgagggatgggttgggagttttttgagaaaygtygygtagggggtyggaggyggttttttyggygtgttaagggtggygagygtygttggyggygyggaggaggygtygagttttgggtgtttygagaaagtgtttgtaaagtttgagtagagtgygyggggtygagyggggagaagggtgyggggtatyggggtgagatataggaaagaggaggayggtggggagyggtagaagatagygtttttaggattagygattttgtggtttattyggttattgggtttyggygtaaattttttttaggtagtgygggygatgttgattgtagaygtygggtagggttttygtgygggygggagygggggaagttagtgygttygggygttagttagttgatgygggaagaggttggggagttgtagggtygttygttttygggtgyggtgttttggygtagggtttgggttgagtygttygtaaatttagattyggygttgggygttttggtygygg

SEQ ID NO: 6821 - DNA, 2383 bp, Artificial Sequence
  Description of Artificial Sequence: Synthetic polynucleotide
yggattttttaggatygyggygtyggttggttgtttyggtttttygyggtygygtgagtttttttttggtggtggagggygtattttaatttggaaatttttagtttttaatttggtttygtagattgaygtygttttyggtggggyggtgggggtaggagggtaaaggggaggtttttttttttttggattgaggttgtaattaatagtttygtgagtttttatttttggttgattgygaatttttttattttaggttaggggtygggattttatagaaagattygtttttatttttaattttgyggtttttgttyggyggggaagtttagttgygggttagtttagttgygggttyggttaagtttggygygtttaggtattttagtttttggttygyggtygggygaggayggagggggaggggaaggggttgttgtttttttttttaaattyggtttttaatygttttatttttygtygtttattygttttgtataggtagttaaaatagagttagyggttaattgayggggaygggaagtaaagtygtttagygtttygttttttttagtyggtttttygggttttttttttyggygttyggattttggttttttttttttttttttatttttttttttgttttaatttygtttttatttttygtttattttttttygtattygggttygttaatttttttttttaagttttttttttagttyggtttttttttygggttygttttttttttttttaattttygttttttttttttttttygtttttttttttttttttttttttttttttatttaattttggtttttttygttttttagtttygattttttttttattttgttttygtttattttgygtyggttttttagttygggttgagttttaygtgtggayggtygygtttttattgatagtygtygttygtyggttygtttygygtttygtygggtttttaaaattttygygtygygttttttatygtygtattttttttagygtttagtttttygtttttttttttgttggtygtaygtttyggtttygygtattttygttyggtttygtagtygttattygygtttygttgttttgtgggatttygagygagttyggagggaatttttttttttttttgggggygatttttgtttgtttgtttgtttttttttggtgatttttgtagttttttaatattygttttyggagygtaygggaattygtygagttttgygtgtaggttttttttttttttgaggtttatattttttgaaattttaygttagggtttttgtaattttttttttygttygttgayggttttggagtygttyggggttttaggtyggttatgtaaygtgtatygttyggggttgtyggttgtattttygtygygtttygtygtttattgygttagattyggygtttygygtttygtttygtgggtagttagggggtyggygttttgtygaggtttttagttagagtagggagttygagttygagggagttttyggagtygaygaagggtttattagattttgatttttttttgaggygygtagattttgtttttgattatttttttttygygggtttayggtygygygttttyggygtyggygatggggagaagayggaggttgtgtttttagttttattttttgtggttgggttgtgtggtgttttgggygtagggtayggtyggttagttttagtttttttygtttaagtygtttyggttttagtygtygtygtaataggttyggttygttatagtaggttttgaaggygggtttttagygttygagtatygygaggagggtgtygtagtggttagtygygttygtyggygaggatagtaggaygtgtttygagggtaagtgggtaagyggtttygtatttagggtttyggtttgggggaggggggaatttttagtttggyggttttttggtttatttygttttagattttttagttggagtttagagttgtagttttttttgttagaatatttaaagatttttaggagygygtttttttttttttttttaatttygtagtttagygggyggaaagtttttttttygggggttgggyggygggtggttagggggtttaggggtgtygatygtagagygtgtgtagagttygygttgygggaataggttttgaatgttyggyggtaggygggtttgggttygtttgttgtaggggttagagaagtttgtttgttttttaygtyggggtygtygttygtgagttttttgtttgaggaygtgtgtagggtttatagtttatttttttatygttaattygagygttttattttgygaygygttttttttgataygtygg

SEQ ID NO: 6822 - DNA, 2367 bp, Artificial Sequence
  Description of Artificial Sequence: Synthetic polynucleotide
ygggtyggtttttygtttyggaggttggggagggggtygtgggtttttgygtttttaggttaagyggttttggaggtayggattagtaggaygtygaggtggygygggtygyggtttttttygtagtagttgtyggygagaattaggtagggaggygtygttgttgattgtattttatgaaagatttaggttyggttgtygygttgttatttttyggtattttgygtyggaaayggtygttttggagttygtggtygtyggygggtaggtttagtygttttagtttttgagaaaggtaggttatagttygatttgttttgtggttttattttataattttaatagtaagtaggtttaggttgggtatttyggggtattaggagtaggttyggttaattggtttttattatgaggtttygygtatagggttatttggttaygaggtaaygttggggagttttgtggtttgagggtgggtaaaggataggtttttagtttttttgygtttagttygttttttagyggtagttagttaggaayggtttgyggggttataggggtggaggygttatygttygtaggttygtagtaggatggtygttgggggatgtgtaggtataggggttggataaggggttttagaagtgtttgttttgaggggttggtgtgttttttttttattagtttagtttttgaggagagggaagaaggtaatttttttaattagggtaggtygggyggttgttttattttaatattttttatttttaaatatagaaaatttggggtttgtttttaaatttttttggttgttaygttttgggtagyggattttttttgttaataygtaagattagttttttttygtaggttgagtagaaagaagaaaggtttaattttaaaattttaaattygattattagttttygtttaaayggaagtagggttagttttttaygagttaggtgggaaattgggtttagggagagaaagtgttttagggttaggttgggattygttttggtttygttygtatgyggtagggtttttttayggaggttttagggygygtttttyggtttygaggttyggtygttagtygygyggattttagtttaygtttygagggaggttaggatttttagtyggygggattgygygtygttttttttttygtaggtttyggygaatatttagttttttttttttttatttttttygtttttyggttagtgttttygtttttttygygggygaygggyggyggyggygggaggagygggtygagtygaggaagtttyggtttygygygttgggatgtagygaattagtaggggtygaagaatygtgtagtgttagagttagagttggattyggggttttagtyggagtygaaatttgagttagagttygyggygggygagttyggagtttaygagtygtagaygtagygttgtttaggtggggtaagagaygttgggttaggggygtagggttttygyggtggaggggygtagggaggtggyggtygagttttgygtagtttgtttttggygtgtgtgggtttattyggyggygygggatagygtaaggygyggaaggttaggagttttygaggtagygygaggagttygtttttgygtttagggtatagttatagtygtygttatygggtgttattttatttaatyggygggattaattttttgttttggtttygggtattttaagagggtagtagtttygggggtaygggttayggtttygygaagggtataatttgagaagttygtggtagtttttygtagygtygggtgatatagggtttttttatttttaggagaagtgggtaggagagagggtygttygttgtttttygttgygtttagggatggagggttttattatttatggaattgttggtttttttgygtggttygggattttagtygtggtttygygttaagagggtattttttttaaaygaaatygtttygttygttygttygttygttygttygggtagtaatgtygtagaaaagtagtagaygtyggttygygttttggtttttttygtttyggatttygaygtttygtygtagygttyggaggtgtttttagtttaaggtagtttgttttygtyggtataggtygggttttttttttttaggagagaaattttaatttttttygtaaygtttaataaagatattttygyggttttttttaggtttggttgttgaygtagggtttyggagtaygtagtygttttttaagaatygggtttyggatttttgaaattgattagtttygtaaattggagtttattttttygyggtaaaggtagggttttaaagtygggatygt

SEQ ID NO: 6823 - DNA, 1235 bp, Artificial Sequence
  Description of Artificial Sequence: Synthetic polynucleotide
ygaagtttagtygatttttgattgttagtatttyggttataaggtttaaggygaatagttgtygtaygtyggygyggttgtggttgtygaaggagtaaataattttatygttggggtttttatttagattygttgtaaggatttgtattaygygygtgtyggagggtgtattttttaggaygygygttyggtataaggattggttgaagataggygtattgttattygygtttagtattttgatgtgaataggtaggttggyggagagagttggggttttttygtttaaygtygttagtattaattggagattaggttttygttttyggtttagggygygttttaatattagtttygygtatttggtgttgttttttygygtttgtaygygaagygtaaagtatttatttyggtttagtttataggtttgtaaagagttgttttttatatygggatygtgygygttttygagyggaaagygygttttyggagttayggtttygttaatttttaattttattttttgggtagggaaagtaggattgttgtygttgatgttttggattattatttttaygttgaatagttttagygggttttttattattaattttagagttatagtgtaagagggtagtgttttatatagtttttttygatttagayggtygtttataaatattttttyggtttttyggtttattttaaagaattttyggttagttttagatattattyggaatttgygggttgagaggttatygagatttaaattaaggttygygattaygttgtttatagygaaatttttttttttttttttygggattttatagtgaatgatygtggaagttttgtttaaggtattaagtagaagtaaaatttttattattttttyggtgtttattagttygtttttttaggtttttgggattattttatttaaaagtagttttttttagyggggtttagatygtttttgagatttygttgagaaatttttagygggttagygtttgggygttgggygtygagttygatatggttttttggatgtygttgatttgttygtyggttgtttagtttttgttttatttyggggygtagaaaggggaygggtaggggttygatttttagygtttttattggtygatagyggtatatagagttttagttaataattgtaygaagaatgagttagygtygggttttttgagtaggataygygttagygt

SEQ ID NO: 6824 - DNA, 3043 bp, Artificial Sequence
  Description of Artificial Sequence: Synthetic polynucleotide
ygatttaggagagttygataygtyggatagttgyggttagtygtggttattttggtttttygttttygttttttttattttygygtgtagtygggataygggaaaggaaagttttggaagttaagygtyggttaaaagatgatttgttygygtgttttttygtttttttttttagtygtgttatatggyggttttaattaggygggtagtgygtttygtygyggagatttagggtygygtygtttgggtagtgggtgatgaaattttttaggygtattatygtagagggygygggyggggygyggggygggggtgggggatygagagttggtatyggggtttatttgttttttaggaggagggtggggayggggggaggggygagtgygygttaaygtygggtgygtgttttggggygtttgggygyggygttygtgttttygtttttttttagttttgygagtttttygagttgygtygtggggtgaygggatygagagtagtttttgttttyggtttyggygygggggagaygtgagygtgtataygtatatatatagtaggggaagaggygttttaagyggygtttaattttttttttttttttaygggtygggtgagaaagtagtygggggttatttygattyggyggtttttggggagggggtygaataagaaaagggaggagatggagataattttttyggatttagtttttttgtttttgtttttgtttttattatttttatyggatgattggagagtaaaagggaattyggagyggggtggygagtagygttttgagaaaatgtaggagtgtgtttggagaygygtaaagttgttttttaagttttggttttygggtaygygatgtttygyggygggttgatttagggttgttttgggtttttttgttatttttttggaaatgatgtaagttttgattgttatttggatttttgtagtttagtttggaatgygtttggattaggggaaagaygagaaaygatattttaggtgttgtayggtttattaaagygggaagatagggtagttgtttagattaaatattgtatttagtgtttttgtttttatttttaatygtggggttttttttaatgtaaagtgttataaggttaggaatttttatgtgtgtttagttggtttatagtattattgtgtttaggaaattgttttaatttattaagttttttgggttgggaattttattgaattttaaayggyggaaagaggaaatttttttaattygatgtgggtgtgaygygagttaggggttttagggatattgttttagagtatatygtttttttttaatagtaattggagtttggattygtttttatattgtatagttttttygattattgttttggagtattygtataygygtaygtattttyggtygygtttatatatatttatatataygtaygtaaaygygtggtygtygttaggtyggtaattttgttyggygtttttagyggygttyggtttttttttgtagtagttgagygtaggtttygtttttyggtygtgttgttaaaagggtyggggtttyggattggtttagtygtygggataatatttgttygatttttttatttaagtgatattagagtttttagggatatttgaggtattatttttgttattgtygggtattygyggygttgttaayggtttggttatatgtttttyggagagttaygggagggygttgggtaatttttattygagtygyggtygygaggaggagggaaaaggygagtaaaaaggaagagtgggaggaggaggggaagyggygaaggaggaagaggaggaggaggaagaggggagtataaaggatttaggtttttygaygggaggttaatattaagaattatgtgtgtygagyggttgggttagtttatgattttggttttggtgttggttatttttgattyggygygggggatygaygttattaatttattygagggtttttaagataggagtttttagtagaaaggtygtttgtttttgtagaatataggtaagtgtatgtgttttygtagtygggagttattgggagaggatatygtgtatttaygyggygygttttaggygtttygtygggagttaggygtttatttagggttaygtaaatttttgggatggtaygggaygtgtaaagggaagygygaggtaaggygaggttygygtygggtttygagggttyggaatttgtaygtgttagtagggtgatgaaatggttggggtaggatttgttgttgttttttttagggtygaggggaaatgaagtagygtttgaygttgttagygttagttttygttttygaatttygggttyggtgtaaagygygttttatttyggtyggtaygygggaggtttagagggttttyggagttgggttgygttttgygttyggagaatttttttttttggtttgtyggttttagtaagggtgtygygttttttttttttttaaaagatgttygatattttagaattttgtyggygagataaatggtattgygaattttttttttgggggtattgttttyggaagggagygtgagggtagygtaaagygtattttygyggtgttgtygttatttttagtttttggttaggttagtaagttaagaaatggtgataygattygaatygtgygttttttttgttttatyggtttttggtttatyggtaagttgtaaagtagagttaggygtgtagggtayggggttggttttttttttagttyggaaagagaaagaaaatttgtttatagttttttygttttaygatttttttttygattttggggggtygtgtgaaygyggtagyggyggygtgygtgygtttatygtaygagttggaatgtaygagtgtttattagggaygttttaagtgagtgaatggyggttttgtgyggttttgtttyggyggygygtggggttttayggattttgtygtttttatatgttggggtyggtatttttattatttygagattttygt

SEQ ID NO: 6825 - DNA, 864 bp, Artificial Sequence
  Description of Artificial Sequence: Synthetic polynucleotide
ygygatttaatttttaattygygatttaatttttaattygtgatttaatttaaaattttygatttaaattttaattygygatattaagtttgygatttagtttagaattygygatttygtttggtttattttttagtagygatattggyggttttygattttttagatttagtgagtttygtaaagtygttyggttttyggaagtygtaggtgtaggygtygttgggttygygggtttttttggttggttygggttgttttaggattayggayggaaaatygtaggygygyggtttatttygttttaaggggagggttygtttggtygtgtagttygtttygttttttttttygaagagagatttggtgttggtatgggtatttygyggttatyggagtggtttttyggatgagtttggtttyggygttgaygttttggttttgggggttgtttggttggtgttaggtagyggaagaygtttggagagttattygtttttttttttattygtttttatygttgttygtgttaggaygygtagtttgtagttgtagtttaggtattggygygggatggyggagttttttttggatggygttagggttatygagtgtatagtttatttggtttgagggtttgttttttttggatattttttyggattttgatttttggygttgggtaatttataggatgagatttatyggttgttggygaagtygatygtttgattttgttgtttgggyggttggtttygggattygygttgttggggaygygggtttggtttgyggtgtttagttatttgttgygggygygttaygtttaggttggtggttgtagtygtagtttygygtttgygg

SEQ ID NO: 6826 - DNA, 2071 bp, Artificial Sequence
  Description of Artificial Sequence: Synthetic polynucleotide
ygttyggtyggygtygtttttyggaggttgtgtttttggggtggttggyggyggggttttttyggttyggttygyggygtttttttgtygtygtttyggggtgtttttgtttygttgygagttyggtatygyggygayggyggygygaagagggaagygggyggyggyggyggtygygttaagatgygtygggttatygtaggttgaggygttygtygttttygttttttttttygttygtttttttttttttygtttgtttttttygttygttygtttttttttttttttygttttttttttgygttttttygttygttttttygygtttygtttttttygtttygygttttgyggtgttgtagttgygggyggttttagttgtttttagatgtgggttgggyggttygyggggaattttygygtyggttgygagtgyggggtttyggttgtagttyggttgttatggattygtyggygggagtygttygtygtttgttttgtttygtgttgttgttgttgttgttgttgttgtygtygtygtttttgtygtygtygtygtygttygygaaygttaggttygtygtygtygtygattttttaggtaggtgyggttyggtttttatttttygggattttygtyggtttggttttgtttygygtgtttygtygttttttttttaggygtygtttagtttgatttgggtaaatttygygygtttygttyggggttaagttggttaatttyggggtygggttggtygygtagggggygtttygtatygttttygagygttttgggtygggggagtttyggagtattggyggtttttgagtygyggagggtggggayggagggtygggaaaagtttygyggttaagagygtagagttagttttagygggttygaggggggagttagggygaggyggygtyggggttygygttyggggaygtttyggaggagtyggttgtygagygygtagttttgggttttaaggattggttggggygtttygtagggaattttyggagatyggagggattttgttttattttttttagttttygggygttyggggagayggggtyggtagygggttgagygggagttggataggtaggataggtygttygtgttyggggaagtygagatttygtygtttyggaggttggyggtgagggtattygggyggtaggggttygtygaggggtygtggtataygggtaagggggttaattyggaatggttttygagtagttttaygttttgttaaggayggtaggtgtaagggtygggggattttttgayggggtygttttttygggtayggggaggtttttatygagttttaattttgaayggggtagggggtagagtttttggtaggtaaggttttyggaggagggaayggttggggagtggyggagtttyggagtggtggttttgttaaygttttttttyggttgtaggaaagtyggggaggtgtaggttggtttttggggtygtttggyggaatgtttttttttttygtagtggggyggggtttgggggggygtggtttgtyggygggtttttgaggtattggggtttygtggttttygtygatttaaygttttttttygttgtaggygggtttttggggtayggagyggagygtattttggyggtgttygtgygtattgaygtttagggtygtttggtgttttaygtggtgtyggtagttaygtttagagtaggggtaygagttygtagggtygtttyggttyggatttygagttttttyggaggtaaygaggaggagtttggtagttattttttttataatgttayggtttttggtygagatttgtatttgyggttgyggtttaaygttygtttygtggygttyggggttattatggagtggtagggygagaagggtattattygygtggagtttttgttygggagttgtttttaygtyggagaygtggtyggtttagtygaagttttttttgtggygtttagtaattgygatgggttggtgagtaygtatttttttagttttttttttttygttgttttygt

SEQ ID NO: 6827 - DNA, 1170 bp, Artificial Sequence
  Description of Artificial Sequence: Synthetic polynucleotide
ygagttygygttaagagttaygtygagaygygtygtyggtggggttaygygagatgtaatyggagagtttaaaattagtttaggattaattttttagggattygtttaatttttttygtagaagagtttaagtggggtagtggtygttataggttgaggatgattttyggaygygttttaggygygatygtattattygtttttagtttaaagtttgagtgatttggtattatttttttaattgttttttatttttttygtatttttgttgtgtttatygtttttaygtatttgagagtttaaattatgttaagaygatttggagaaaygttygatttgttttttaagttaygtaaggatttatttagaygtaygttygygyggagaygtaygttggtataygygtttatataygygagtatatataygygtatattattyggttygtgygygygggtygttgtttttgttgtattatgtaaaggtggttgggaaagygygttgatttatatttatatagtttattttttttttatagtatgtgattaataygtatttyggggaggagggagygyggttgggggtgttaatyggaagggaatagatagtgagtgttattttgttgggaggttttagaagtaaagygttaaygaygatagtagyggtggttttagttttattagtaattgtygttggtaggagtattataygttttaggagtttttygggtattaagtatgggtttagttygttttagttattttttttttttatggttttattttygttgttagtatttygattttagtttgtaattttgattttgggtttgattataaatgaygaaagatygyggtagtttttaaagtgygggagygagtttygtattggttagygyggyggagggatttttttaggaggttttaagtttttaagtttgtggagagatttggtaatagttggtaaggtttgttttagttattttygttggttttttgtttttgtatttagygtttgagggygttattygttttttttttgygttttaygtaagyggtttaaggaatttattygattyggatttygtttygtatgttttttaagttttygttattttygtaggygttttagaaaggygtgatggttttagtttagtgttygttagttyga

SEQ ID NO: 6828 - DNA, 2168 bp, Artificial Sequence
  Description of Artificial Sequence: Synthetic polynucleotide
ygygttataaayggggatttaatttattgttygatttttgttagaggygatttatttgygtttttgttatygtattttygttygygtttttgygttttaggtttttygttgttttttygttttttgtagygygggagygttgtttygtttggtttgttggttttttttagattttggttatttttttygtggtaggaagggttatatgtattgatagatttttygttggtggtggttgggtggtggygaggygtgttttygggygygtttaaaatttagtagttttttttaagtagtagttttttttatttygtttttaggattgaggatttagttttygatgtttttttattttttttygttttatttygttattattttttaatttttttagtatatttttaagttttataygggygtttgttttttttttgtattttttagttttygggygtttygttyggttgaagtttaygtattttgggatttaattgtttttaattattygygtagtttaagtttygygtttgtttggttttygtttygggagtttgaagttatygggtagtttattgggtgttttyggggaaaaggtttaagttgtagagatgagagaagtggggttgggggaggggagaggttttagaaggaagattaygaataygtgygaagaaataaaagttattaygtgtgtaygygygygggggtttaagggygygagygyggagtaygttttagggggttagggatagtggttttttgtagygggtatagtagggggygygggtatttataygaaagygtggtagatgaaygtttagtygyggggtttttttagtaygttgtataggtagttttgtattygtyggtatttgaygttgygtyggtagttttggttattygtgtaagagagyggtttttttagtaggtttattygggttttttgtttgtttyggyggtttttttttaggttatygtygtygttatygagygtggtygygygggtgtttagtagtagtaggtygtygtttttggyggttgtygagtttagtagtattttgtttyggtyggattttatattttttatgtygttgtttaagygtttttygttygtygtygtygtygttgygtygttttttatttagagttyggyggygtygttttttttttttttygygtggtggyggggtatggtattattaygggtatygygagggggtygttagygtttgyggygggggtagyggttttatgtgygtyggygggttttaaggaggaagtyggyggtygayggggygttygttagttagagatttttgagtygggggyggggaagtaggtagttagtaaatygttygggtttyggggygggaaaggaggggttgtagaggaggtygaggagttttaatttttaatagtttttagtttygaattttaaattyggatttgtttggggygttattttgagagggttttttttgtttttttattttygygattattatttttttttttttaaattgttttyggggatagagtgggggagtgyggggygtttygaggygygtttttaygygygtatatttagttttaggtttttttttttttttttttattttttaygttttgtagygaaayggttttagaagttttttttygaggygygagttyggtttggttttggtaggggttttgtagttgttyggaaggtgaagttagttttgtgttttgaggagaaattggagatgtaggtygttgtgttttttygttgttaygtygttgygtyggattttgttattttttygtaaggggtgagagygggaatagttttgttttgttttttaggtattatttagtttggaggttggagygtaaggtaaygtttygggaagtggtattygggttttygtataygggygagtttttagtagtttagtggatagattygtaggaygyggttgttaagttygygaggtaaggattaggtattttttygygttttattttagtttgyggattgtgattttttattttagtattagataagttygygagtaattgaatattttttttagtttatgggtggggtgtggaaagggygtaaaattttaaagtggttttttygyggtgagygagttgtttyggggttttgtttgattgtagygyga

SEQ ID NO: 6829 - DNA, 2053 bp, Artificial Sequence
  Description of Artificial Sequence: Synthetic polynucleotide
ygggaagatttggaggtyggtaaaayggagyggtgygggatgatgtttgggaatatyggtaaggtgttataaaatgaaygttaaggyggttataagaggayggtygggaatygaatttagygtttagtayggggtttttgtggtygaygtgaygtggtttygttaggtggaaatygtgygattttttttygatttaatttaygagagataaagatgtttaaataattaygatygtygtygtatattttgtagggtttygggggyggaggggaggggagygttttttyggtagaagyggyggtttaggtttgtttggaggttygtaatttattatgataaatgtaaagattaattaaggtttgattygtgtatataggaggtagayggyggttgatagtggaaataattaaygagtatgttttttaatttttgtygyggttgttgagtatatygyggttttttaggygttygtygttgtygttttygagttttagagtttttagttyggttttggagtggggygtttttttttagygaaaaggtgygaggagyggggtttygggtggtyggggagggggygygtygggtygggaggygyggagttagtygtttayggagtttaattgtttgtatyggggatyggygggyggggygygttygagtggtttygtygggaaagggyggygggygttggagaaggygtttggygygaagttgggyggygtttygagggyggaggataggtggtygygygatygtagttaggtagygaayggttygggggttgygtagygyggttttaaagtttagttyggtttygggtttagttygttgtygtttgttaygggagyggttttgygyggagggagggggygygagatygtattttygggttyggygygtttyggtttttgggttttygtttttttttttttttyggtttagttygttgttttagaygtgattttygyggaaggtgttggygatgygygttgttygggagygtgtgattaatggtttygaggtygtgggyggygtatgtattagtttttttttggtttggttagggtgtgagggtattygggagtatagygaggttatggtagygggggttttygggagygyggyggtggaggaggaggaggaagaggagaagtaggtgaygygggtygaagaggtttgttttttttggttttagggttggygtygyggygggtttttygttttaagtaaagtttggggttaygggygttgygtttaggttttttttygygtagttttttyggyggggtttgtgtygtygtygttgttagggtaggataaaggtttattaataygtgatgggatygygttttataaatgggattggagygagagggagttagagatagygygagyggagggagyggtagggattgygygagygggaygaggygaygggygttygggttggyggagaygggyggttttaygtygggttaggyggggttygygggaggatttagtgaagagtttgggaaggggygaggttygtyggyggtyggagtagyggggygttagtttyggtygttgtygygggygggygttggagatygggaygtyggygttyggayggattgatttgttgatygttygtyggaggtatattttattttattttatttygtttygttagtagttyggygtyggygtygtttttygtaygttattttttttgttattttttttttttttatttttttttygttttygtttttttttgtttttygyggygttagygtttttttttggttygggygggggtttyggttttttgtagagtttttygtagttagtgggggatatttygttttagyggataattagtttttgagttgggygagaggtgttaagggagtttttgtttygaggattaggggatgygaagggtaagatttggtagagttgygtttggaaatatttttttygtttttygttttttygggtaygattagtgtggtttttaagtgtttttygtggagtttttatttygtgtgagygaatygtgygtygg

SEQ ID NO: 6830 - DNA, 1679 bp, Artificial Sequence
  Description of Artificial Sequence: Synthetic polynucleotide
ygttttttttygggaagattygttataagtygygtttttygtygtttttaatttyggggtygttttggtygtttgtgaagtagaygtttaygttattgtygtygtttttgggatttttaggtttygggggatagtygggttyggtattygggtygtygttygttttggygagtagattttggttagggtggygggatttgatatgtygttttaggtttyggyggygtataagtattttgtygtagaattygtagyggtagggygtattgttttyggygtgtagtyggatgtgtttgttgagattgttggggtygtygaagggtygtagatagattttgtatttgagtggtttgtagttygtgtgygttygtatgtggattttgagtttatatttgygygagtatagtttgttatagtagaggtataggtggtyggttttgggtttatttgygtygttgttttygttgtygtygttttyggtgtttttygtygtygygayggtyggtggtaaygttttygagtttaggygttygygatttttttyggtagttatttyggatagttgttgattgtgtatggygatttttyggtygatgttggttagygattttagttyggyggggtttagggyggtygttgtaggttygttgaagtaggagatggatttyggatattttagtagttygtygaagtgtaatttgagygggtaataagyggtggtggtyggtgagtygtagagtagtttttygttgtagattgtaaaggtyggtatgayggygggtaggtggttgtatttattattyggataggttttgagatygttygggtygaggggyggtagygygtagygttygaggggtaatttyggygtagggggtagttgygtataaygygtttttggtagygyggyggttgygggyggggygygttttaygtgtttgaaggyggaygtttttttyggggggayggagagtagagggaagtygygtagggttttagagtagggtaggttaggyggyggyggyggyggygggtttttagygagtaggtatttgggatggtggtggtggtgygygtggtggtgatggtggtgattygygtygttygtygtygagtttttttygttttyggggygttygtaygttyggttttygtttagtagtttgtttaaagygaggtyggttttttgtttgttgttgtttttttttyggtaggggtygtygtgagyggtygtygtygttttygttaggtyggygggtttgaaagttgagygtaygtyggggtagaaagttaggttgtygattttygtygaggagtygtttaygatgtygaggaagtgtttttgttttygggyggtttygtttatgtttagggtayggtttagttgttttttgttttttttgggttgtttttatttgtttggggtyggygaggtggtygagggygyggaagaggtttygygtttgatgttttttygygtatygtaggtttgaattggtggygggtttagggggtggggtygtaaagtttttgtttgggaaggygyggygaaatygggygtygggggttttggggagagatygaggttattagtygttgggayggygttttggygagtygygtgttygtggtgtaggaaggygtygtttttatygtygttgaataygtagtggaaaygt

SEQ ID NO: 6831 - DNA, 1474 bp, Artificial Sequence
  Description of Artificial Sequence: Synthetic polynucleotide
ygygtgttagaagtttttttygygyggtttttttttttttttttttygtagtaggaggtttgattttygygttttgtattygtgtggattaaaygtttagtttttttygttataatyggaygggaattygygygtttttygggttattttttgtttgtgttgagttatgggygaattttttaaaaaggagatataygagtgggtygtttaattttgaggggaaaygaggatttttttttttatttttttttttgatttttttttttattyggatygtatttttygaattattttygtaaggaggaaygaygaatgtygtyggttttaygagattgtygttttttatttatgtttaaataaggatagaattttgtagygaggygataagaaaataaataagygggygttttaaatygagttttygggtgtgtagattygtagyggagtygygggagygaggtgggaaattttggtygyggygtygggtttygttygtyggggggygyggggyggygggygtatgygygtgygyggtgyggttttagttttggttgtygtygtttgtygtygtygtygygatgtttattttagttaaagyggttgygggtttggggattyggttygggtagyggagttttyggattygtygattygtygaggagygygygtygggttttygtygagtagttgagttygtgtgtttygygtttygygtttygaagttgtygtttygaattttggtyggygttgtttaggtttttygttagggattagtygggtaaggatgggaggygtagttgtagtyggtttttttttygygtygggttgtgtgyggtttygygtttttttggttaaatygggaagygaaagttggattttagtttttyggggagtaattttgtyggttttggyggtagttgtttgttttaygygttygggtagtygggggygtygttttttgttttttttygttggtygygttttygaggggttttyggtttttggaggtygttttttttttygggtttgggygttgyggttatagagatttttaayggttagyggtygtygtttaggttaggtagttttagygttttygggttttyggttttatygagtgtyggttttygygttttgyggyggtaagttttttggtgagtttygtttttgtttttttygtygagttttyggggttttttttygttttttgtagggtygtttygagtygygtagagtttgygtgtagtygggygygyggtgtygtttatttygttttygttyggagagtagggtgggttayggygtttattttttattttygygtttygagagygtttggtygaggaggatygttgttayggattttttttttttaaggagygaggttagagggtttygggagagygtygatggttggggattygaggttygygttatttattygtaattttttttttygagtttttgggaaygg

SEQ ID NO: 6832 - DNA, 675 bp, Artificial Sequence
  Description of Artificial Sequence: Synthetic polynucleotide
yggtttyggtaattttygtatttyggttgygtyggtygtggtyggaygttygagaygygyggaggtatagtagattttggygtataggttatgtygtygtaaayggggggygygtatttttttttaaagtttttagaggagataygtatttggtggtagggggtgtaggyggttgygaagtagggttgyggaggattatagatttggtatataatatttagatagtttatgatttttygtagyggagayggttaagtgtttttttattaatttttttttttyggagtttaggggtgttgtatgggyggygtttggattygygttttggagttattaggyggagtaaagttagygygtttygyggttyggaatttagttggttygttatttttttatttttgygattttattttygatygygttttagggtagaagygtttgagttttygttagtgggtatttaaagtttatgttyggygggygtgttgaygttattygggggttgyggagygggagggggyggtggggggyggggatyggggggttaatggggagygagggaygtttgttggaggggtagygagtgtgtttttyggggtttatttttgataagtatgyggttaagggtgtyggagattatgyggtttttagyggattygaggtttygtatygyga

SEQ ID NO: 6833 - DNA, 1133 bp, Artificial Sequence
  Description of Artificial Sequence: Synthetic polynucleotide
ygtyggttatygtygagtttttattttatttaattagatygyggggaaggataygtaaatttgtygagggttygggggtttygggttgttgttgttgttagygttttgggaagtgataggtattaggatttgttggtgyggyggyggyggyggyggtagttttagtygygttygttatatatatttttattygttyggtgtataygtygygtygygggtagtgtygtttgyggaggygygttyggggttygtaggggtagtagyggtagtttggtagygtygtygygttttygggtatttggttygygaagtttygtttttgtygtttttygygtygttygttttaygttttttagygyggtygtygttygaygygygttygttttgygttygtygygygtyggtttygggggyggtagaagygygygagggtygttgttygtttttttgygtagttygyggtttttaggtattttgygttgttgggttyggygggygggggtggggyggggagyggggygygggtygagygggggygtttyggtttygyggttttyggyggttgttgtagyggttgttgygygtaatgatgygggttygygtygygttttagtagyggygttgttttttttttygtttagatgtgtgaattttttttttataataaattttttattttgttttttgtygtttttttttagggggttaattttgaggatygtaggggttgtygtttaggyggtygtaggyggyggtgtttaggyggaaaggagyggygygaaagyggyggyggyggggatyggggtttyggggygaggagtttgggyggtatgatygyggtttgttgagttgaagtyggtygtgtttttagagttatttygygggagygaatygagtgtgtgtgtgygygygygttygggggagaagggattaagaggagggttagggaaggaagttggggttatggaataggggtgtaatygaggtatttagagyggtyggaaagttygagtggyggagaggttagaggtggygagaaggggygyggyggtatyggaygtatygtttagtatttggtttttttgggttttygaggatttgaagggtyggagygyggagagttayggagtyga

SEQ ID NO: 6834 - DNA, 1808 bp, Artificial Sequence
  Description of Artificial Sequence: Synthetic polynucleotide
ygggygggggaygttyggtagttttgtaaaygygtagataygygaattttatygtttygygygttttttggtttygttggtgygtgtyggggatgyggtygygtaggygttygttttttggttttttggtygggtagygggygttyggttatyggagtttagtttaagggtttagtygaggttttttygygygaggyggttgygttaggtgagygggtatygyggtygygttttttttgttatttatttagyggttagaggtattttgygtttgggagttttaagtgttttyggttgggtgtttttgttygatttttaaaaggaaagtataaatttygggtgygagtttaatttaggatygaattttttygygaatttgaagttattatggggygggagttattttagygtygygttygttygtttttygtatyggttaggatgttgyggaaggtaggggygtygagaggtaagggtgaaagaygtygtttatatttttaaagttygaatttgtattttttttgygaggygtagggygggaggatygttgtagttgggagtyggtttyggataggtaaagygattygataggtgaaygyggygggagggagtaaaygygtaaaaaattttgtatttattttttygttggygtttttttygggaggygttttggttgtygatgtattttataaagtttaaaatgataaaaagttaagaaattagtygtaagtgtatagtaatttagtaatgtttttttttttttttttttttttttttgattgttaattatatttaatgtttttaaaatatatgtaggtgttaggygtatatagatagtgttygagtagygggatttttttttttatattygataggygtgttgtgatggtaagygaagtggggygggtggatagggaaattaattattgtatttttaaattatttaagtattgaattgyggyggtttygttggggtggttggtatygtygygaatyggggttttaggagtygtyggggyggtygtaggtagtatgttgtgyggtaattgtygtaggygggattygggygggygagyggyggyggyggyggttgtagyggyggttttttgggtttagaagttgyggyggttgyggttgtagyggygggggtttttggagygtaggggagygggygtygtyggtatagyggttatggttaaggggyggyggagagatttygagttgtttttggygtgygygagtaggagaygttttagtgttgggttgggttttygggagtattatataggggaggaggaggaggagggtagggaggggggagggagaggagggtagggagggggagaggaggggggatggttgtggggggygggggggagttygggggyggggaaggaaattgttggagtaataattttgagygattttaataatttttaattttaagagggaaagagggagttggaaaagtataggygttgygttttggtagagggaygggaagaggygtttaaggggtttygggtttatagygtagtatttttggatattgtagtgayggtyggagaattttagttagaagaatggggaaagtagtgygtgygaagagtttttttagaagggtagttttggyggggagatttgggygtattggggttggtaggtagtgttgaggtygaagattttttatttattttagttyggttttttttygyggttttaagttaggygtattyggttgtyggtggtygtgygtttttgygtttttgtgttttagygtttttattttatttttagygtyggygygt

SEQ ID NO: 6835 - DNA, 1323 bp, Artificial Sequence
  Description of Artificial Sequence: Synthetic polynucleotide
yggtttyggttgyggtggtygtttatttatttttttattttygttagtattttttttttttttttatttgttttgagtatygggttttgggggtygggtygtttttttttgtttttagttttggttttattttaggagttgtygggaygtygggygtttttggaggyggaygaagaaggyggtagggtygggggygttagygggaatttyggtygtygygggtagtygyggtttttttttttattttagggttygggyggttatygygggyggatgagttaggygagggggygggtggtaaggggtgtaagyggayggagggtgggggygtttttatgttygygtygggggggtatyggaggtttyggggtaggggatgygtygttgtyggtgtttatagagggtygtygttattygggygtagagtttaggygygtttgttttyggagggtatygggygtagtaagtygggtaggggagagggagtygtygtttaggyggygtygttatygygtttaagaaagataaaagggatygggaaygggaggggaaaagttttttgttyggttttagatggattttagttttaaattttaygttataaagtttygaagaggygggttgggggygggggtyggggyggatttttaggggygtggttgygygtttgygatttyggatygtgttaatttygtygtygttttaaaatttgtgggaaattttagttttgttatttattttttttggaggaygtagataggatttgttttgtaggagtttaggtyggtygattygygtttyggttataaagttgtatttygagagtttaaattattygtagataaaatttatttttgggaataaagtattygtttgtaggygtttttttygggttggaaggttggygtgyggaaayggatatatttattygtggggttygtttttagttatygygggattatyggttatygagttagggattyggtttttttagtttttyggagyggttggggagttttagtygattygtagtattttyggagtaggtatygtaggattttggttttaygtttttyggaygttttttttttagatgtygttyggygggtyggggtttttttggygggttgygygggygttgygygagttaaattaaatttggtyggaaaagaygyggttaaggttygttyggtttaygtttttygtyggttyggtaaggggtttyggagaayggtttgggggggygagaattatgggygggggaaatggaagatagagggaattgaagtaygggggttttygatgagtagtgyggatgttyga

SEQ ID NO: 6836 - DNA, 1501 bp, Artificial Sequence
  Description of Artificial Sequence: Synthetic polynucleotide
ygttattygagttaatgaaygygattgttttgataaggygtttttaattttatygattttggtaaattgtaggagatatttagtttaygttatataaaaattattaaagtgggatygtygtagttgaaaagttygattagtgtttggagattagaaygygagtttttaaagtatataygtattyggtatygggaaagtttaggygtttgtgatttttygaaggattttgggttagtattttygygtttggattatttagggggttattagaaagtaatataygttataagaaagatgtgggggagatttygatgttygygtttttgttaggtggaggyggggtgtaggtagaagtygygygttggattgttggatgaatttygttaygygtaggtttygygtygatttyggaagggataggtaggttyggaagggatttttggggtttggggaygttttttagggtagagagtatygttgyggttygagyggttygggtttttaggygtggggtattyggtttttaagygtttttyggggaygtaggygtttaygtatygtttagttgygygtttttagtatttagygttyggygttttyggyggagtttygygtattttttyggaaagtttgggggtttttttaatttaggttttttygggagttttggggygggggttggaagaaggggttatttatttygtygttyggttygtttygggttttygaagtgtttgttttagtygyggtttagtgygttygtaattaagtatttattttygttttttttagtgtygaagtttttttttygygttgtgtttttggtgaaaataggatatttttttyggttattttataataaatagygtatataagygggggagaagyggggyggagggagaagtyggtttygagggggaggaggaaaggagaggagttaaaatttyggattgygataggggggaaaggagaagaaaagaaaatgagagagygygtttagtygtygtagtygttatttttyggtttttttygtagttttttttttttttttaaggtagygataattttaygtggataggatggaagttttgygyggaagtygggaayggtyggagygtgygtygygttgtyggtagtttygtatttgygtagggaggtggggygggggygaygtygttatyggttattgygggttygtgaggtygtygggggtttygggggaggtygttagggaygyggggggyggyggygygygggggatttatttygtttttatttgatttygggtgattgtttattgttatggtttgygatttygygtggggatygtttagggtttyggggttttggatgtttygggtggygtygtygtaattttygtgtttttygygtygtttttatttygtttttattygggtygattygagyggttgtagtttttaggttgaggggagggattygygatygygtttttttttttgggtyggagagttattgtyga

SEQ ID NO: 6837 - DNA, 1744 bp, Artificial Sequence
  Description of Artificial Sequence: Synthetic polynucleotide
ygttttygyggttgttttttttttagggtygtyggtggtttaggatttggttatyggggaggggygtggttttgtygaagtygatgagttataygtyggygygatggtagtgatygtgtataaagaggagygagttgtygattatttgygagtttygtatygttaggtygyggttttgtttagagaygtttttgtygggttttygttttagttttygyggttygggtattygggtagtygtygtttatttygtgttttttgaagaattyggatatttttagggtgtttyggatttgttgtaggyggtttagatatygtttttgtagagggtggggtgggagaggagggtaaattaattaaaygttaaatgagtttttgttaaygatgaggagtygggatttaygttgtgtttggtaaatgtygttaggaggaggatttagggtttygtttagygtggtttagaagggaaggagygtagagtagttgygagttagygyggtgagggttatggtggggatatagtygagggtattgggttagatgataggggtagttttyggttttaggttttttaatattttagggtttgggatttygtttttattagtatttttttatttttttgtataaattttttaaagaygygaagtatttgttttyggtttygygtagttttgaagtyggtgttgtaggagtygttygttttttggatgtgggataggagtgttaggggtttygggttygttagtggggaagaggatagygtagagtagyggtattttttagttgtaggggayggygaggyggtgggagagggyggaggggtaggyggggygggagygggggatygggaaagatagygygtagtggggttgyggyggtgttagygaagygygtttgttttattttgatgttttygatgyggaagtygagggtggtgttggagttgatgttttttygttattgtatgtagygyggtttggtgayggygygttgygygtgtttttttttygtgggagttttaggatttatygttagtatttttttgtatatgttttttygtagtttgggtygtttaygggttttggttagttttttttttaggtaagttttgtgggggygtaggtagyggttagggtatgagggggygtatayggagattttttygagtattygtttygggttttttttaagtagttgtttyggtttyggatttttatttgatttttttaatygatttggtagggtaygtatatttgaygtttattttgtagtygagtatataaggttygtygaagttatygagtaggttttgtagttgtaggtagttttygtygtygygttttattaygtygtggaaggtaggtaygtagtygygtagygygttagttattagtygygttaggtagtagygtttyggtttygagtagygttttaggattagttygttggtgttygtygttttaaaattttttgaggatyggtattygttagygtygtttagttttttttygtygygggtattygtttattygttttattgtttattagtgtgttttgttagttgtatttaggygtagygttttttgaaagggtttatgatyggtagattgattatggttyggattttttgttagtggtttttttgaaagygatagggttaaggtttgataatyggygtttyggtaatgtataagttttttttttattgaaatagggtttygttaygttttygatttatygg

SEQ ID NO: 6838 - DNA, 1801 bp, Artificial Sequence
  Description of Artificial Sequence: Synthetic polynucleotide
ygygtagtttaggatagtagygygygggttaygggygagtggagttgtaggggttygggyggagagtygttgttatttagggaagttttygggatttygggtttttygygaagtttyggaygggygttatygaagtygagagtttyggtygagttttttygtayggtgggygtygygtttaggygagygygygaggtygggyggggtygggggtygttyggggagggggyggggtygggattttygyggtygygygtaggggttgggaagttgttttttyggtygygtygggygaggggttgygtyggttygygaggygtatgygygttgtygagyggttttygtttttttttygtttatygttttttttttttttttttttttttttgtattttygtygtttttttttttttttygtttgttgggtgttgaagttgggyggatggtagtaaatyggtttygttagaggatygagtygtttagtttygttttttyggatttatyggygygttgtttatatttttaggygatygggtaagaygttgtttttaaaataagyggtgttaagtaaatgatattaaaatgtttgttttgtattaatggatggattttttttaaggtaggggggaggtgaaggaaggagggggyggagagygygatygtttatgtttyggygggggyggttgygyggygttggggttttagttgtggtygyggygttttgagygggagygggggtygygtygygggttygggaagttgaatttygygtygttgtttggaygyggttygttygtygtttttagttgttgtagggaatygggygagtgttttgttygtyggggaaygttyggttaggttttagagttttygyggagagyggggygtttgttgggggyggtygggagggtygggttaggggygygggagatttygyggggaygygaggtgttgygggttttgtgyggttggttgggaaygaggagaatgtgttattaatagtgtttaatygattgattattttgggtgttgtgtttttttttttatttttttttatttttgggaaaatgtattgtttaggtggggaaggtgttygaagaagaggttgygaaaatgaattttttgattagtagtaaaatatyggaggggtgtgtgtgtgtgtgtgtgtgtgtgtatgtgtatgtatgtatagggggtggggggttttttttgtttttttttttttttttagttaaaggaaagggagttttggygtgtgyggygyggggtggattttatagttatygagggggygaggaygaggaaygtttattaatygygagtygttgttygggtgggygtatyggagttttttttgttgtaggtgatggtggttttttygtgatygatggaattatagtttaatttttgttttttygttagtttttttgttgttttttatygagtgttgyggtagaggttgggtgtagatayggtygttttttttttttttttttgtttttttgtttttttgaataaatgtyggaggattaggggatggyggagggatagagttggattyggaagtygygggtgggagttgtttttygygagttygaggttgttggtattttgtygygggtagttygygttagtttygggagtttttgggtttygggagagygagtyggggtygtttggttataaagatgttygygygttygttttgygtaygggattygttttgygttttgagttttgygtttygttyggagttygggaygtyggtttaygtgggagaatttttgtygttyggggayga

SEQ ID NO: 6839 - DNA, 1801 bp, Artificial Sequence; identical to SEQ ID NO: 6838
  Description of Artificial Sequence: Synthetic polynucleotide

SEQ ID NO: 6840 - DNA, 1684 bp, Artificial Sequence
  Description of Artificial Sequence: Synthetic polynucleotide
ygtttttttygggygygygggttttttgtygtttggagtygagttggtattggagygttttttttttggagygtagaggtattygaygttttgyggtagttygtagttttttttttaygattttttagaatagttttgttttgttttttttyggtttttygagtgygttygttattttgtttygygagaggtgaaygyggagaaagtaggatgattatttaygttttygagaaattttgggtaaagaaaggtattattttagttygtaygttgaaagtygtttttttttttttttttttttygttgtgtttgaatttttygggatatttagayggttggagtttttygattttaaggygggygayggtaaagttaaaygttagygygttgyggttttygggtatygaggygttttygttttygttatttatatagggygttaagtgtttygattygygagtgaygaggaygtataggttagtgataygattygtagttagtattgagygggaygayggggttygagygtaggagggtgygyggggagttgaggagygtygggggttygggygyggygygtatttgaggtygtygtygaggaggygayggggagtagygyggttaagagtagtagygtygtttaggatagtyggygyggygygygtagggtygtttyggtttygggggttatygagagttyggggtgggtyggggttgggtgtttgyggttggtaggggggygttggtyggagtttggggagtgtygaggygtygtygtygggttttygtygtygttygtttgttttgygygttttgygyggtgttygtygygtttttgtttygyggygatygttttyggtygtatatyggtagtygygtttygttattgaggtygtygatttttygtygagttttttagttgygttygggygttttttgtyggtgtgyggggtyggggttagggtyggygggggygattygggygataggggygaygggggyggyggggttygggttggaggygggyggggygygggaygaaggggtyggagygtttyggattgatttagyggttttgaatttggggyggtygttgtgtygggttaagtggttgaggaagttttttttttygtttaatttttttattttttggttggggaagtygtttatygygtygaggagtgttttttgtttttttatagaaatatttttgygttttaagtggggattygggtygggattttttattyggttygtagygttgtagtttttgtggttagtttagtttttttaygtttttattygtattyggygygtttaygttaggggtttttagygtttttagattttgtttygtttggttgttatttttagggygygtaygatgygggtygaaaaggaatttagtttttagtgtgttttgttgtttaggttaaggatttagyggatttygttttttttttttttgtaattgtaatattgttttaggtttttttatttttttttttttttatttttttttttagtttggaagtttygyggttttttagatggattyggagygtttttggaggttatagtgatttaagttttaggaaggtygggttttggaygtygygtgttgttgttygtygtygatyggtgttttygtagagataatttggttgaatttatygtttagygt

SEQ ID NO: 6841 - DNA, 6657 bp, Artificial Sequence
  Description of Artificial Sequence: Synthetic polynucleotide
ygtgygtgattggayggttttygygyggagygaggaggttygtagygtyggggggagggyggtttagtagggagggygatgygagtttggggaggggttagygattyggttaggaggtgaggatagttttttaattttygggaagggaagggtagggggtygygtttggggggygtygggtagggtgyggayggygaagggggayggaagggagagaggygttggggaagggatttttyggaggtayggggtagygtgygggttgyggtagygatttygattygggttttygggttttgtygggttgagtttgygttygtttygtygtygttaagtttttttaattttgttygttgygttyggatygygygttaggtttgggggygtagtaggggttgggggygtaygttgygtattyggggaygttyggggttygaggtggyggggggtttggtygygtygtttttygggggtggttygggttttaagttttttaggtttagygttyggtygygttygtygtttatttgttygttyggtttyggtttyggggttgygttygtagtygtygtygttttttaagttttaatttygttttygggattgaaatttttttttagtttygtttatygatttgygygygyggtttygtttttygtygygyggtygggggggaatttaagttygttttgttttttttygttttttttttttttttttttttttttttttttttttttttygtttttttgttygtttgygygtttttttttatttttttttttttygtygygagttyggttyggagtttttggttttttttttttttttttggtttttygagttttttgtttttttyggtttttygyggtaattygttttttttttttttyggygaygygtaggggttggggaaggaggggaggttttagaaagygtagggggygttttygyggttygttttyggtttttttygtttatatttaaaaggtggagggggtgggtgggtgggtggggggagtgggggygatagttgttggttgaataagttattygygatttttattattttaagtaaagttaaggygtttttaggttttttygtyggttygttttttattygggagggtagggatttaggggyggagaaygtagggygtaggtygggttttttttgtttagttttggtttygttttttttttttatttattttaatttttgtgaggattttagggggttttggagtatttttyggtttagttttattttgataatttgtttgtgyggaagttttygttygtatgttataggaagggaaattgagttaagagaggtttagaatttggttttatatagygygtygaaggtagagttttaggggtagtttggattttyggtaggagtttygggattttaygtttgggtygggtaggtttyggyggtgtttggataagttygygttygtagaayggtyggygtttggggattttttttagttttygygtagttygygygttttygtyggygtttttttttygttttttgtttttygttygtttttggttttyggttttagtattttyggtaygtttttygttygtygttagtagttgggtaatttaaygagtatataaaagagttgatttaatttaaaggtagtaaattaagataaattttatagtgtgtggggatyggagagggaatgtgaatgaaygtttaygaygtygtttagttttgtatggatyggtttagttyggttgtagggtttgataygttygggttttagggttttttaggagttagaatyggagagtgggttttgagttgttttggtttttaggtttttagtattggttygaatttagtaatttagagtttgtggtttttttyggttggttgggtggggttttygtgataggggtgtagagttttgaaggggagtgttaggaygaaagttagtgygtttttaygattttatgtaaatattggggggtaggggttttggaaatttagtatagttttaggggtyggtaggaagggtatyggtggtttggaatatttaagttgtggtttttttttttttgtttygatttggattayggttagagttaggtygtaggttaagagtaggtttttgtttatttattagatagatattgtaagtttgggatgtgttaggtttgggtttgtggaaygaggtyggyggtgagyggggtatttttttttttttgtttgtttgtgaggtttttttagttgtagttttattagggagaagttggtyggtttttagagtttttttggttaygtttggaaggttttagtaagttattttttagtttttggtttggttagttttgtgtagaagatgattatygggtttygggttttagtttatttatttygtttgttaaatataaattttaagagaggtattggatttttatttttagtaggtttttttaggtttgtgttggttaagtgtagtygaagttttggaatgagttttttttgttttygtaggtgtttttygtgtgttttgygttgtgttgggygtttgttyggaggagtygygttaggaygttttgttattttttaggagtaggtatgatgagtttattttttyggggtgtaaattgaggtygagggtttttttagagygtttttgatyggtattgtttgattttagaggttagttttgyggttattyggggtttgagatttayggagaattttagaggttaatttgaggggygggtaggggtaygygygyggggtygtgggaggygagatttygtaatttgaggagttaggattttagtagagagygaaatttggagttgggggaggggayggtagaggattggaggtygggttgtayggtaggggtygagttttygyggtygttttttttttttatttygagyggaggttgygtygttyggttgygatygagttttyggagtttyggtygggtygtttttttttygtggtygygtygattggyggtttgttgttattyggaygtyggygtygtygtygygaggatatttgttyggggtttaaygtygygttttaygttttttgttttttttttagatttagaatyggggagaggaygyggyggtgaagttgggaggttggaatttggagggyggyggagtttyggagttaayggggyggggggyggggtyggygttggttttggggataaagatttttaygttgtttgagggttgggttttgtagatatygaggtaggaagaaggatttygtatttttygttttttagatttttaaatttatttaggtttagatttgagtgtttaggtggggtgggggagatygaatttttttgggttttygaggygygygaaggygaygttgaaggggggaygtygggaygttgttttttttttgtataygtygttygagttgtatttttaaaygttttaggagtttygygggttttttttgttttttataattttygaagttgtttttagygattttttttygtttttagatggggtygtaggggygggygaatgtgttgygttygtygtgggttgggaggaagggygyggattgtaggaagtttttgtttttttttgggtagtttggtttyggggattygygtttagttygyggyggaggattyggtygggaatggtgttgagattgygygggtayggtttagggtygtgatygggtggttatygtgtagtttgggaagagaaaaagttygggggggggtygatatttygagatygaagagggaaaatgggaggaaagtaggyggtagggagggaagagyggyggaagagggattaggagagttgggggttygttttgggtttyggggtttygttttattyggtagtttagtttagtttagtttygttgygttagtttttyggatygggagaggttagggttatygaygtttattaatagtygygagygggtttttttygggagtttygtagyggtyggtagagtttagttatyggttggggtgggggygggggtttygtaatatttttttyggaggtttaagyggygyggggyggggygttgygtttttttaygtyggttttgygaagtygaggtatttatagtttattttttttttattttygatttygagattaggttttagatgaagaggggttygtttgtggtttaatttggggygtygyggttattttagygtattygaaggygygtttagttttttttttttttttttgtttagtyggttttttgtttttagygygtttyggaaagtttyggggttttygyggygtttttttagttttaggggttyggagttttggtttttttagtygyggygtyggggagggaagtttgttyggtttaggttyggyggtygttaatttygggtgygttygttttygaatttgggtgggtggatggggaygttygggagtygygggtttygagygtygtatttagagtttygygggyggggagattyggttttggygyggaygtygaggttagggtattagggatggggtggttygggttgygagagtygttggggattttgygttgtttttygtygttttttttagagagtatttttttttttgttttttttaggggyggggatttttygatttygtagyggygatagaggggtttttyggtttyggatagttttttgttttttaggtttttttttatttgggtyggggtgygggtttygggttggaggtattgtygygggygagtagagygygygtatttyggtttttygagtgyggyggyggyggyggyggtttttttttttttttttttttttttttttttygggttygttggttttagatagtttttttttttttttygttttgtyggtttttttyggagttygttyggttggattyggtttgygattyggagtttagyggagtyggygggagttaggttgyggygtttattgygttaagygyggggygagygyggggyggyggyggyggggatygygygttyggagttyggggttggtygggtaggygggggagyggyggtttyggtttygattygggttygggygygggygtagtggtggyggtygyggtagygtygaggttgtagtatattttttttgagygtgatggaaggttttatgtgggagagygygyggggagggatggggagggggygggggtygyggygggggygatyggaggggyggggggyggggtygttgttygtaygtyggtgggttggggggtggtyggaggggggtttyggaggggaagttggagttagtygygggggyggygtgggaagtygagtggyggtttygttttttttttttggttygtttygttygttttttgttttygttttaggttatttagaggtttttaggtttyggtttggaagagaagygttygaaggtttgggggtygggattttggtggygttgggaggtgggtttttgggtggggatayggttgtgtttataggygttyggtaatttygtggaagttgattttaagttagattttttgtgagygygygygttygygagggttaaagtatagttygtaggaygygygtttgyggggyggggggagagyggggtatttgggggyggggaggtggagygagagggtygtygggtttttggyggtttygygtttttagagattygtttttttttaaggtygtygatttttttttttttttttttttygttgygygtygtttttygtttttyggtygggaggagggggaggygtgggagyggttyggygtttttygattttyggaaggttyggtttagyggatttttttttttttttatgtgttttyggaattttagyggattygaaatygygttttygggttttgagtygaggggtttttygtygttttttggtggtttygagttttygtygagyggttttayggttttttagggygtttttygtttttattygttttttttttagtttgyggttttygtgtgggttaaaaattttaaattaggtttaagagygttttygttyggttaagttttygygygtygttttataaatyggtygygtgyggagttgyggagttygggatttttagygygygttgggygygatattttggatttygttgttagygtygygttttttyggtyggggagttttatatygttaagagggtagggagaggggaggggaggggattattggaggggagggggttgtttttygggtgtttttttyggaggaggtttygggataggggtgggggtggygygggaggtygtagatagygygtttygaggatggtygggtyggggatgggygygyggggtttttgttyggaygtgggtttaayggttttttygtagtttagaaatttygtttagttygygggayggtygttygtttttygatttygagtttttattatatttgtttttgtaggayggggttggggggattgagatygtgattgaggtyggggtatggaggaagtgtygtygtttgttttygggattgttggataygaagggtggaggttaaggayggagtttttgtttgyggttgtttagtttttagtttttgygygggggygtttagatttttagggaatagggagatagagygggtygagttygg

SEQ ID NO: 6842 - DNA, 546 bp, Artificial Sequence
  Description of Artificial Sequence: Synthetic polynucleotide
yggaggyggyggggtygygggagggagggggtygggtttaggygattggtagygygagttygggagttttttygtgttttygttygtttygttttygttattatttgttygggatttggygtyggyggtttygggygtttttagtttyggttygggtttyggtttyggtttygggygtygattaggtttttttggttttygtygygygttttttaatttgttgttgtygtygtygygttttttaggttttgttagttattygygttttgagttyggggttagatttttatggaagygtygygatgttygtttttyggttgttggatttttagaagaygaaataygygaggtgagyggyggtygyggaggttygyggggagggagggaggggygygyggyggygggggtygyggaggttattttggttttygggtttygtygttyggagygttagaggggatyggyggatttttgattttygttygagaaaattaggatttaggtagtttygttttttygttgggatggagtaatyggggygttygc

SEQ ID NO: 6843 - DNA, 288 bp, Artificial Sequence
  Description of Artificial Sequence: Synthetic polynucleotide
ygygyggygtattgygggtygggaaygtgttgygygttgatatygggttagttttttgtgatgggattttttttttaaaaaygtaggygttttttygggtygtagtygtagtygggagattgagggttagggygyggtygyggggttttttgggtyggggygyggtttaygttttaggtttttgyggttttgattagaagtygttgygtttttggtygttttttattygtttygttttygtaattttaggtttagggttatagyggtttagttttttttttttygyga

SEQ ID NO: 6844 - DNA, 947 bp, Artificial Sequence
  Description of Artificial Sequence: Synthetic polynucleotide
ygtgaggtygyggtgttagtttatattttattgtgggtggygggttyggtttygygaggaggygtygtttttaaattttayggtttygygtagygaagaggygaggyggtygyggaaggtaggygtagtttatttttttygagaggtttygatatttttygggtgagtttygaaaagygygyggggatttyggttgagygttgggtygttagtaattyggtttttagagagttataygaaggaggggaagyggttttttttggggtttttgggaggtttggttygggtttttttygtagttttyggyggttagtttygyggttttggggygttyggatygagtaaaggtttyggygggygggtttttttttygttttttttaagygttygtttttygtyggtttagygtaggttttttygatttygttagygtagggggygyggttgtyggggatttagtagygggygygygggtaagtgygyggygggygygggttgygggattygtttygggttttatttyggattttttttggtttgtttgggtgtttygggtygggggtagtygaggtygygyggygttttttttttgggttatttttttttygtttttttttaggggagaygaatygattggttgttyggtygtyggaayggtaggtttygtygtttttttygtttttygtattttyggttyggtttttttttattatygygtttygttttaattygtagttagtattttttttttatttttttttygttttygttgttatttttttttttggatgttggaagygtagttggtattttygtttttttaattttttaaattttttttttttattygtttattttttgtgtttyggttttttttttgggtgttgyggaggttttttyggttygggggygtgtgtgtagggaggyggatygyggaatagataygg

SEQ ID NO: 6845 - DNA, 1313 bp, Artificial Sequence
  Description of Artificial Sequence: Synthetic polynucleotide
ygagaatttgtygtagggggagatttygtygttaggttttgggaattgtttgggygtygttaaagttygagtyggagttgttatttggggtagyggtygggaagaggtaaygatgttagtaagaaagtagyggaggtaggaggyggtyggaggagtggattggagyggayggagtttygtygttttttagttyggagygtttggagygaaagttaagygtttttygagggygatttttttttttygggygygygtttattygttgtagtyggtagttyggygggagaggtggtagttgtagtttygtatyggggagagygagttttttgygygygygtttattygttttttaggtgattyggygttttygtygygttygttggaagtttgtaaatttttttygggggtttygtygttaygttgggaagttggggaygyggggggaggtttttggttygtygttttygttgtygtttgatygtatttttggagggtttygtattttgttaggtttttggaggtaaatatatattttygatttataattggttttygygttaggggattygygygtttttatataygtaygtaygtygggyggattyggygtyggttttaygttagtatttttttaggygygyggygyggyggttatygagygtttyggtatttaygyggygyggggtttttagggtggttttaggatatagtygaattttatagtttattagtattyggggtyggatttttttttggttygttaaaatgtttataaatatagattattttttagaaaaaaatgtatygtattttttttattttttgttttgtgatttgtttattggattaagtaatttygyggttgttgtygagaattaatttttgtaaataagtatattttygagatggtttttgyggtaagtgtaataaaagtggttaaatgtaaaagttttagaagtggtygagtygtatttttaggaatttattaaataagtgtggagaaggtaagagyggagttygggtgaagggattaygttggattgagtaaagattataatatattttatttagagtgtattatattattttttyggtgaygttaygtgggatttttgaatttttaaattattgyggttygttggggagggayggagygaggggyggggtyggygygtygagggggtaggtttygtttyggtttygtttygatttygtttygtttgygyggattttggtgtattygttygggagyggtagyggygggggygattgygtaagtaatagtttgtagagtttagygtygtgtgataygg

SEQ ID NO: 6846 - DNA, 848 bp, Artificial Sequence
  Description of Artificial Sequence: Synthetic polynucleotide
ygygaagtttygyggtttttgygtgttttggtttygggaggataaggatttttttttttttttatttgygygyggagtygagtttttgttgaggtgagggtttyggaagtttaygtagtttygtaggtyggtggtggtygyggttgttttgygggggtgagtgtgttyggtyggggtyggagtttagygtgtgttyggtagayggyggtgttygygygttttttttttygygttygyggtgatagtttagatattagttygggygttgatagaygattttttttatttgttagttttttygtttgttagtagagttgttggtaagtgagagaaaatagaggggygygaaggtaggygyggttagggagtgagyggggygttgggygyggggyggagtygggtgygyggygttygggttaggttttatygttygygtyggttttygttttgtttagtygtygtttttttttttttttttatttttttttttttttatttagtttttttttttatttttaaattttttagttgygygttgatygtttttgtggttttgtttgggggtagggggagaataygaatagattygaggtgtttttttttggagttggagtttaattttaatttttatttttatttttatttttgtgtttatttttgggtattagttygggattatggttggttttygtagttgttttyggagygtatttggggttatggtttgtygygatyggagttygttttaagtyggagtttgggggygtagaagggggagygygtygagaaagtgtygggtaaaygygygtygygtttggttgggtatygygagttgggygaggagaygg

SEQ ID NO: 6847 - DNA, 2406 bp, Artificial Sequence
  Description of Artificial Sequence: Synthetic polynucleotide
ygggggaggggtataygtagttttygtgyggaaagatggtgttttttttttatagggttgygygggtatttattttygttgtaaagygttygggttaggygyggtttgtttygggtyggggygagttygttgttttttgyggtagatagygatgygygtttttygttttagttttyggttygttyggyggttygygygttttttyggtgtagtatgygggygttgtgaygttttyggataaatgtygtgtaattgtgtaggygaatgagagttaaaaataagaayggaaaatttattattaaggtattattgygttagygtagttatttgaaggtttttatggttttyggygtttgygtttgaagttygtttttaggttttggggggtatttgtagaaaatttttagtagyggttygttaattagattttagggtgtayggggggtggygtyggtaattatggtaatttttaaaataaaataatataaaataaagtaattaaygtttattaattattattttattttattttttgtattgtttttaggtagttggggaagtygtygggagtgtagtyggatgttggaatttaatgtgattyggttgattatgtaaagattaggattggaygtttttgtagttttatttygttatttatttttttttttttatttygtattagaaataaagtggggggggggggygagtttttggaggagaaaatgataattggtatttaattttaggtttatagtgygtygyggtggggygtaaagaygtaaattttygggatggygagttttyggggttttattgggttaaaygaaaattgatttgatttgttttttaatattygagggagagaaggggagatgaggggagggagggtagggtttgagtgtgtgygtgtgygtgtgygtgtgtgtgtgtttggggagggggaggaggtattaagttgtagtttgygygyggttttgygtttyggyggggttgygtgygtgtgtttttgttygygttgttgaaaygggtttttygagggatyggygttatatgatttygtttgtttttygttagygygtagatygttagttttttagtttgttyggtatyggaggagggtygggyggtatttttygggtattggggttttgyggagyggagaagaggttttagyggggaatggtatatttggatttaagaagtygyggttyggygttagattttggagtgtagatatttggggggaggggagagttagagggagygagygagygagygttagagagaggtagygygtagygygtayggayggggggttgttgygyggagaagatgtaagygygtggggtttygttggtttttgagtattatgtagaaggggattyggttgaatgatggttaygtygygtttttgggattgttggygygtaaggayggtaygygtaaaggttatttgagtaagyggagttyggataatataaaatggtaaattaagtggttygygttgttgtagaatttgtttttttatttygagagygattygagttygyggttttyggggttttatttgttggagggttgygtttgygatygygygtttttttttaagtyggygttgtyggttaaggagtygttggagaaataggtgaggygagygtygygttttgatttttttgygtttyggtygyggttttgggggtttagggttttyggttggttgatggygtttgaattttggtttttttatttttggygttttaggygttttttgtatttttagygagaggggaggtttgtttttagttaggygagtgattgyggygggtagagggggtagggattgagggyggggagtagatgtgggttgyggttgtttttygtyggaygagtttygtgggaggygggtatagaggggtygatatttggagatgtagaggaagatggggttttaaggattagagaygatgagtttggatataygtttagttaaaaatggtgtttttaatttttatttttatygtttagttttaatagtttygatygtttgttttatatygggaaygtgtaatttttygygtttaggtatgggaagggtaagayggaggygttygagygttgttagtttttgtttygtygtagttgagggyggagagyggtttgygttagtttttyggagttgggttggggttatggggttataygggtyggttyggtattatygagyggtggtgggtttttagttggyggtygtyggagtaataagtttaaagatttttaaggatygttttgatgygtyggggttagggttagggttgttgyggaggtagygggaygaagtgggygttttttttttttttygttttttgygtygtygtygtygtygtagtygyggttatagygttgygt

SEQ ID NO: 6848 - DNA, 1218 bp, Artificial Sequence
  Description of Artificial Sequence: Synthetic polynucleotide
yggatttaygtyggttttgttaygtgttgttygtagttttygttygtttttttygygttggtaaygggtattgattgttygatattttagygatygtagagatttttttaatgtygggygtattatyggygggttagyggtttygttggtttttttgatatattttttatagttattttttttagttgagatttttttttttaatatttygttaattaaygtgtaattttttggttaaaatgttagagttaagattaaatttgaagaaaagaatgaaattataggaagttttttagatttagtygttagtaaggttatggttygaagyggtgtaggggyggygygtygggaagttattggtagagttgtgygtattggggggtgttgtaagygttggggagagtgtggagaggttgygtggagttgygygttyggggtgggagttgtatttttaatgaagygygtgaagggtaagyggtgatgggttttgygttagtggggttgggagygtgttgggggttgtaygtggggttgygygtaaggtgagaattgygtatgtgggtttggggattgygygtatygaaggttgtaggygttggggagggtgttgggggttgtgygtggggttgtttttatyggaagttgtaygttyggggaagygtagaggyggggtgttgygygygttggggagtaygtggggggataygtagggggataygtagggattgttygygygaatggtttygaaygtatgygttttattttatattttatagtygttatgaygatygggaggttygttygttaayggttagttaayggttgyggggataagttygttgaggttgttaggygagttaggtttttttggatttygtttgattyggatgggttgtgtttgaaattgatttagttttattagggattatgaagaaataaggagtaaatttaaagtygttgtaattttttygttttagttygtttaagyggtygtayggggtttttttygttygggagttggaggtggaaaagtyggttttaggyggygggaaattgttagggggygttaggaggtttttttyggggaggattttaaatttgaaaaagygaaaaggtttggagttaaaggtggtggttaagatttttttygattttttttagttygttygtaattttttggygtagtttygggaagaggtgtaygaattgtaggygygg

SEQ ID NO: 6849 - DNA, 1848 bp, Artificial Sequence
  Description of Artificial Sequence: Synthetic polynucleotide
ygtagtaygagtgttagggygygtatttggggggtgttttggyggtgtggagagagaagagagagggygygggtgatattaygttygggttttttttttttygtygggtgggtggggtttyggygygtygggagggygyggggttaagtagggggaagaggaggagtaggtatgaatgtgtttgtgtgaagatyggggaggggtggaggaggaggaggaggaggagaaggaggaggaggaggaggaggyggyggyggyggyggyggyggyggyggagggyggggagggagygygygygtggttygyggygttygggtttttttttagttttygatttyggttygygaygygtygttttttagtygtygtygttygtttygtagttgggatttatttygggtttggggattyggygggygggagaagygggggttttyggygyggtttggaaggagygagaaagtaaaagtaaggygagtagtattttaagtttttttaatttygttttttgyggyggtaggygttttgttgtttagygygtttttttygagttygagagtggttgaaagaaaagggattgggygggggtyggggyggaggaagagagagtgygagggagygaggagagttyggtaatatttgttaaaatttgggggaggaggagygyggggaggaggaggaagaggaggagagaagggaaggagggagygygygggaggggagygyggagtygagggataatttttttatttygtgagtagtgtaggyggtgttaggtyggggyggggggtttttttatttagtayggggtattaggtygggatgggatttttttttagaaagtygattggatgttaggagaggygtayggttgggggttttttttttttttttttttttttttttygyggttgaattaaattagaattgttatttagggtttgtgagttagaagggatyggattataygattttygaaattgatgtyggagttgtaygagygggagggagygggtaggggtagygttatyggygygttygtatattygtattygygtatattygtygtttttatttattygygtygttttttygtttttttygygygtttygyggtygttygygtygtattatgttygyggygggygtatttygygtttagttyggtygttygtggtagtygtagtygttygyggtygygyggagyggggagtygttagtttgygtttygttygygggtttatgggaagttyggggatttgatagtygttgtygtygtaggtaygtttygttygaagttttttgtttygyggatttygtagttygtttttgyggtygygttygygttttyggggttagaggtggtttttagygtggggaygggatggagtgaaaatggttgttaaaaggygtttagatttagagagtygtyggtgaggygttygagtaaggtttgtattygttttttttttttggaaggtttttttygaagagttygattygyggatyggtyggagayggattggagaattttatttttyggaggggggaygaagtttgtygtagtggtggyggygtttttygttttygtttttatttaaagggtttagaagaatttygygagtttygtaygygtttggtttttttttttgygyggtggygttttayggttygggtttygggygygtayggygttygggatgggyggaaggaggygggaggtatggtgggtgygygyggggattttygtygygggggtygtygtygttggggtttttttagttygggttatgtttyggagggygggggtgtggtgtgagyggatggagagaggygygttttygtygt

SEQ ID NO: 6850 - DNA, 2119 bp, Artificial Sequence
  Description of Artificial Sequence: Synthetic polynucleotide
ygygggaggtagatagygttttygtttttgtaattatttygttygttygattgggaagatagtgataaagttygggygtagaaaaggtagggttagggtaatygtygagtggtagyggtagggattagattgtgtttgattttggtaaattttattttttttgggtyggaggtatgtttatagaagggtggttagtaaggttggaagagtygaagtttttttttattatttatatattattttygggttygtagggttgggaggygagtttagtaygygttttaggtgygtaggggaagagtttagygttgygygtagagtyggttttggagtttgttttgggggtttgtttttttygtttatttttagtttttttgtggggatgggtgyggtaaaagatyggyggatttttttggtygtygtttggtygtttattagttttttgattttggttaaatttttttttttttatatttgttttttttttttatattttaygttaggggygtttygtggattgtaattttgaagagagttttggtyggagggtgttagtttygattgygtttttaattygtaggagtgattttgaatatatttttattyggagttttagtgtttttattygtygtataggaaaaagygygttygatttygggtatttttagtatygttttagtaagtgtgttygagattagatgaggggtgygyggttgtatttatygttttttagagaygtgggygtttggyggggattaaggtggttgtgattagtaagtgygaygtagttattaygagtttaaagtttatggttagtaggttgygtaygggtagtaaggtataggataygaaggtgattaaaaggagttgttaaattttttgttyggyggtygttggttttttagyggtttyggyggaatttygggyggggtygtttagygygaaaggatagtagagtagygygaaggtgaggttgaagagtagygttagttggtygatttgttgtagttggggtatttgtagggatyggaygttggttattaygagtagygttaggaagaggaygtagtgtatygggtgtgagtttttggttaggtygggygygggtttyggygygtttagtagttyggttagygttagygygttygttagtaggttgagaayggttagygtttttagygtggtygtttgttttagtygtagygtgtagtygyggaatagygtttttagttttgggtaagygaatttttygtygtaygttyggagttygygtyggyggtttgtttyggtygttygttyggygttttygggttygttygygtygttttygtygtygttttygtygygyggygttttygttattttagygttatgtagyggtygyggtygygggygygtttttygtyggttyggggygtyggggygygggyggyggygtyggggygggygggyggygggyggygaggygtyggggygyggggygyggggygggyggagttggggygtyggttgtttygygygygygttyggagygygttttttttygttygtygygtttgygtattggagttygttygygtttygatygtggttttyggyggygatygygttgygatagtygagtttygggagtygygaatttgggygygtatagttygygttttaatttygygttttgygttttygttygtyggaggagtygygtgatttygagtattttttttgtttttttygagttttagtttttttatygtgtatagtggaatttatttttttggygttatttggggagtygaaaatattgaaattttgygaaattttttgttgyggggtagttaattttggaaaatatgtgtttttttttatttaataaaattaggttattagatttgagaggggttygygtttgattgygaatttagggttttygtttttaygagayggagaatygaygtttaagaattttyggggttaggaggaaggtggaggtttggggygtaygttttttttatgygtatgagggatttttygtttttyggtaatttttttttaagttttagggtygyggagattttgtgggygggtgygggttgygggagttgtgttggggaggyggygg

SEQ ID NO: 6851 - DNA, 562 bp, Artificial Sequence
  Description of Artificial Sequence: Synthetic polynucleotide
ygggtygttaggagggggagggggaygygygtygtygggttygttattttgtattyggggtygttggtyggtyggggtatttttaygttygtttygttggygagattggagggattygggatatygtaaagtattttttttagtgtttgggagygttygttgtaygtttagttttaygtttttggaattggggttttttggttttygggtttaggtttyggttttaggatgygagtgtttattygagggggtgggaaaagttgatttttygtaagggaggggaaggtgtaatttatttttttagataattaatggaatatttttygtttttttttttttttatttgtttayggtagaagttaggatggygttttttatgttggtttgggtgtatatataagtgygtgyggaagggtggttgtaggyggaggtgatagygaagtaatttygtagttygttygayggttttttgygttttagatttttttttggygtgtaagatatygtgtgttttygtaaaaygggaatgttatatttgatagygtattttttygttttaygg

SEQ ID NO: 6852 - DNA, 1404 bp, Artificial Sequence
  Description of Artificial Sequence: Synthetic polynucleotide
ygtttgttttagygyggttttygggggaggtagtagygttttttgtttttyggtttggtttttgyggtygtagtttttyggttttgttagggttgtyggyggtttygtttgtttagttagggttgyggtttagaggaaygygygtyggtgtttygggttgtygygtygttggattttagtttgtatttygtttttttttttttgaaaaggtattaggaaaagagagagggagagaagagtttatagtaggtaagtttggtttgggttatttgttattttagtgggagggtgtgttggagatygyggtgttaagyggggatagtygggatttgggggtggttgtgggttygaagtggaggaygagtatggtttgggagataaggaatygttttgagatagagaaggttttygggagyggatagagagtgggygaaatyggtgygtagtaatygyggygttagttttagygyggtttttggggygtagttttatttygttttagtagttgyggagttttttgaygagttttygtttggtagtattgtataaagttttttttttgagaygygtttaggaattttgttttttttttggttttttggtttttttattattttttttggtttgggtagtagagagygtttatgaatgtgttttyggttttygtaggttgtaggtttatttggagaygttttagtygggaatattyggggagtatttgattaaagggtatttgygttttygttygtttttttttttgttggtttgggagaagggaaaggggtaaggaagaaggaagggaagygtggtggtttttgttgtagygttttggaagaggaatgggygaygttttttttttygtyggggaatygygaygtttygtttgatggaagtgtgtatttttttagatttagagggaaagttggagttaaatagtagttataaagttggttgtttgaaatgtggttaaggtaaaatattygggggatttttttgtagtagtgggtttggttygttttggaaaggtyggatttgattygtgttgggtatttaattaggagtgyggtttttagggtgttttttttyggtttttgtttaaygagtttggagttaatgygttaatgggttattttggtagygtaygggtygttttyggtattgtttttttttttttgatgattygagtttaattttttgggttgagttgttttgttttygttatagtgtaaggagggaagttgataggaggaggagaygtygygttgtggtagggagttttgggatttaggggattggaagagagtygygygttagtagttggggtygttggtgttygggatttygagttatggggataggagttaaatagtygaatttttagygatttygtttygagygaagygg

SEQ ID NO: 6853 - DNA, 819 bp, Artificial Sequence
  Description of Artificial Sequence: Synthetic polynucleotide
ygygggggyggyggggtgatagttttygtgtatgaattagttattttttaggtttygtttyggygggggtyggtyggaygttygtttygtataaagygggtattygggtygtttggagtagaaagtygygtattttttttygttaggygttttttyggaygttttgtttagygggtygttygattttttgtattatggatttygttygttttttggggttgtygattttgttgttttttttgayggaggttgtattgggygatgttgtttaggagttaataggtatttggtygttttaggagtttttttttttaatyggyggagagggygtagygggttatggggtttygtgtaggygttttttaagtttygttttttttaggtttttgtygygygtttygttggtaggggggattygtttttaagtttgtattttttttgtagaggttttttygttyggaaggggatagaatttttygggatgttttttttttttaggagttaygtttgattatttttttttttttttgttttttttttgttttttttttaggaaataaygyggagatttgttttttgtttttagattayggattttgtygggttttattttttygttattattaygataggtataygtagagttgtygttagtttttgtaygggggttgygagggtaaygttaataatttttatatttgggaggtttgygaygatgtttgttggaggatagaaagtaagtgttttgygygtatttaggattttygygttttttgygtyggyggttggtagtagtttygttagttttttaygtttygt

SEQ ID NO: 6854 - DNA, 1128 bp, Artificial Sequence
  Description of Artificial Sequence: Synthetic polynucleotide
ygygagggtttttagyggttygyggtttygggyggatttttagaaygagtgygggtygttyggattggtagattgygagtttygaggggygygggaygtagtyggtttagataaagaaatyggygttagyggtygtttttgtygttttttttttttttttaygtatttttttaggaaaaatagggtatattgayggttaaaggggttggtttttttttttagatagttggaygggaggtgttttttgyggggttttgaygtttttygtagaagagtygygggtttagyggttttygatagygttttygtttygtttttyggygggygtttttttttgttttttygggtgygaatygggygttggtyggggatttyggggaygygtgygtttttygtygygygaggtgtygtygagttagttygagagggyggggggygggyggggyggygygygggggygggggagyggtygggataygtgtggyggyggygggggggaygyggygttyggggttttaagaaggtgtggagyggggygggygtttttttaggtttggtygaggggygtygygtagaggyggyggyggygtayggaggyggtagaygaygygttttyggygttygtagtttyggtttygygttttygyggtttaaagtaattttgggagtygtygtttttygyggaatttttyggygggggttygtttttaggttygttttygagttygtttygttttygttygtttttttttygtttttttttygygtggttttttygtttyggygtttttaaaattgaatgagygagyggygygtagggygygyggyggyggyggyggyggyggyggtatggagygtagtggttgggttyggtagattttttttttagygttgttgttgggggygaygttgagggygygygyggyggttggttattattttygtttttygttttttttttttttgtgtatttattayggggagttggaaggggatggggagtagggygaggtgtttatttttttgtatattgygggtaattttatttattaygtttygggataagaatattatggtaggtatygtagtattttygygttygtygtygtygggtgygttygttagygt

SEQ ID NO: 6855 - DNA, 1128 bp, Artificial Sequence; identical to SEQ ID NO: 6854
  Description of Artificial Sequence: Synthetic polynucleotide

SEQ ID NO: 6856 - DNA, 1128 bp, Artificial Sequence; identical to SEQ ID NO: 6854
  Description of Artificial Sequence: Synthetic polynucleotide

SEQ ID NO: 6857 - DNA, 1921 bp, Artificial Sequence
  Description of Artificial Sequence: Synthetic polynucleotide
ygggygttgttttttgyggtttttttygtygaggtttgtgygtggyggggtttttaggagyggtagttygtgyggtttgggggyggtttttttttygtatygtagyggggygtgtaaagygtttgyggttgtagtgtgggygtttattttaygtgttyggyggygtgygaggagtagtaatattttttgtgggygatgaaggtggataggttgttgaatttgatgttgtaaagayggtagtatyggtggttgtygttgggtagyggygtyggygtgtttttgttgggagtttggaygtttttgttygagtaggaggggggygtyggygggggyggtayggtttygggygyggyggtyggggaygggggygggtygggyggyggtttttggggtttygggtygaggtygtttygggggttaygggattygggttgyggggaggyggygggggygggagygggygaggggtygyggtyggtyggygttygggtttygattttygggtyggttaggggygygtygagtagtaggtygtgygttaggyggaaatgttttagtaggttttygygtatygggtygttyggggggtagtaggggtaggyggyggygggtaggtygagygygtygggyggtggygtagyggggtaygagtattttttgtgygttaggtaggtttygaggttgtggaagtttaygyggtaggtygtgtattygtggtagtyggttagygtyggtgtyggggtttyggggagygggygtygyggttttttgtttaggtygatggggtygtyggtygyggggtygggygagygygtaggggygaggtyggggtygttttygttttygttttygggtygyggygattygggygygggggygtggtygggyggyggggggggyggggygtyggtygygtgtagttygtagagtttgyggygtttgygygtgygtataggygyggygggagagggggtygggggygyggtyggtttagggggtttygggggygyggtyggtyggygyggyggygggtygtggygygaggygtagtagtatygtttgtgtayggtgtaggtttygtggyggttgaagyggatgttgtaggtttygtatagygtgyggttggggtygtttttygygtygtttayggagttattygggttttggttgttttygttgtttyggtygttygygtygttttygggygtggtygygtttttagtttttttttygygygtttyggggttyggggaygagygyggygygtygggttyggygggttggtyggggggygygygggtygggtyggggggygttttgggtttgygygyggtaggygygttttygggygtayggyggtttgaatagtagaggygtttgtgtaygtagtagttgttgaygttgttgaaggtgatttygtattygaagtaygtagygtttttgggggtttyggggaagagttyggtttgygygtygtyggygttygygttygygttttgttgtagtyggttgtgtattagttyggatattttggttaggattttygaggyggggggygtygygtygggttygaataygtattgyggaaggaatagggtttyggttaggtttagttygtygggtatygggttggagttyggygtggggttggatagttyggttttgattttggtyggggyggggttgygyggygayggygttygygayggggtttggggtttaggtttttyggggtttaggatgggggtygttttyggtttttttatygtttttattttgatgtttttgggggtygtygggggttygttgttgtttttattttgggttagaggtttygttttggttttttygttggtggtttyggttagggtttttttgtttagttttggygatggggtgggygttaggtttaggttygygg

SEQ ID NO: 6858 - DNA, 2872 bp, Artificial Sequence
  Description of Artificial Sequence: Synthetic polynucleotide
ygggtgttagggygygttgyggtttygygggtgggtagaggygygtagaaaaygygygggtggygygygyggttatttagtgggtttygttygygtygtyggygtygtygtygtygtygtaygtgygtygtygtgagygygaagggygttyggattygygttttgttygttygtttgttygtyggggttattgtggatttttaggtaatagttaagtgagaagttttttttattatygaaaggtgtttgygttttttttaygtttttttattaagtgtygygaggtgygattttattttaaatttatttataaatagttaggygatttttttaaagyggaataaaagtaaaattaggttagatatygggggaagtyggtygtgttaaygygtggatagggaaaggaaygygattaaggtagtagttatttttgtgtayggttatttygaagygttagtagggtttaggagttttttgattttagaaataggagtgttttttttttattttttttttttttggagaagtatttttgagatgaaygttgaagtgtttaatttagaygygagaagygtgtatttgtttaattgagtaaataaaggttagtagttggattaataaagtgtgtgtttttaatygttagatgtttttattgttgttttttttttygaggttgggggtgggggtgyggggaggaaggggaaaagataataaataattaaaaagaagagagtaaataaatatatatttggtgtttygatatatatttttttttagtygaggttttttyggaygaagtaatattttgtattatttaaattaaaaattattygtgagttaatagtaaattttttttttttattttttttttttttattataaagtaaaatgaaagagaataataagtggtgatgttgggttyggaatgygattttaaygtygagtttaaatttgatatatgttatattygtttyggtaagtagggygttgtttttggggygaaattttgtygttatygygggaggagygyggagtagagtaaagtygtagttyggtttagygtggaggtggttgggatagggtggggtgyggaggtgtagygygttagagtgagggttaagaaatttatygygatyggggaygtygtgggtagygtttygggaggtggtattygyggyggygaggtagaagtttttaaataatatatttaygygygagttygggtagttgttgtygygagtggggggygygttyggggagggggggggtygaggaagtygtagttagyggaygyggtygtygtataaataatyggggygggygttygygggygggttgygggtggygyggggttagagttagggygaagyggyggtygyggagttgtaygygtyggygtgtttygygttttttyggaggttygygttgtttygygtagtygttttttttattyggatttgtgtgtgtgtgtgtgtgtgtgtgtgtgtttgtgtgtttgtgtgtgtgaatgtgygttggtaggygygygtattyggtygygygygygtgttgttggtaatgygaattgtatatatattgttygyggggttgttttttttyggaggggyggggtgggggataggaygtygtagaggattttgaagtatygtyggattatttgtttgttttgttttattttgtgttgttattgtygttgttgttgttgataggtttggaattagttggttaggatgtttttttttttygtttatttattttttttygttttttaatttttttaaggagggggaaaygyggggaagaatattgttyggatttgtagyggagttttttggttgaygttaggtttatttgttatgtaaataattygttggagaatttgtttgtgttaygttagatttttttttatttttatttttttttttattttttgtttygttttttttagttygttttagayggygagttagggaagggggtggggagggaggygagaataaaatygtatgttgtattggtaaagtygagttgtgtttgttgttttttggtagtttttaaagtaygtttttttagtagayggagttgttggtaaatgaaataggggattttatttgaagtgtagaaagtttygaagggatttaaagttttyggtggtagggagttaaaagtatatggtagtyggaaagggagattygagygtgygttaaagygttgattggtttttttttttayggtgtgygtttttgyggtttggggtggagagaggtygagtgtttttttttttattgttgttttggtttttgttttatttgggttaaggagttttygggttttttygtggtygygtagtttaggttatyggggygyggtttggaaggaaggggtygttaagttgggatttagagagtttgaggttttygggaagggttttattagtgattgaggggagtaaaagtaatyggaaagaaaggaaagaagaaayggttagagtttgtttygygygtattttaaagtygaggygttygygtgggggatgtaygggtttagtygttagttttgggtttyggtttttatttatygggtgtgattyggttgggyggtttgtttgggatttagggyggtgataggggaaaggtygagggaggagagagygggtttyggaggggaygtaygatyggaattttggygaggggtttttttyggagttttagtttagaggggggttagygtttttttttygtygttttttttyggttttttttttgttygygggtygggygatttttygtyggtygtttttttygygygtygtagattgagttygttgttttgttygtaagttagtygtaaagygtggygtttygagaggygt

SEQ ID NO: 6859 - DNA, 2906 bp, Artificial Sequence
  Description of Artificial Sequence: Synthetic polynucleotide
ygygtttygttttttttggttygttygggtttagggygtygtttgtagttgygygyggtygtttttagatggaatttttttattaaygtaaggttyggtyggagtagttattygggagttgggyggygaggggttatttttttttatttyggygggtgtaggatyggggggtttgggtagtaattagtggggaggagygttggattgtgtaygtygagttyggtaggttttygtatgyggtatgygaagggaatttygaggtttttttgtagaattygagtayggttttttyggagttttttgtttygygtttgyggttttttgaattattttaataaaatgatygtttyggtagttatttatgtttttttttgygtagtgttygtagyggatygygttgtgtggtatttygagttttggggattttgttgtaygygttttttagattttygggggyggggagtggggagataatygttagagtygyggggygggataaatggyggaatygtygygyggygttaggtaaattttgtaagggaatygygyggtttgtyggttttattttaagtattttygaaaagaaagtatgtggygggatatttgttatttattatgtgttattttyggtgaygttttttggagttgtgtttatyggggattygggttygygggtgttgttygttgtgttygggygggygtygygttttttygygtyggtttygggttygttaggtagtyggagtygttgggtttttttataattatatttttttttttatygttttygtttttttttatttttttattttgtagttgggttttttttttttttttgggggyggggaaggggggatgatttttaaaaattagaattattgatatttttggttttttygtygttttaggttgaagagyggagggggattygygggtygagggtttttttttttgttygygttagggtygttgggtgatatygaaatttagaggttttygtttttygggggttttttttttygtttttygaggtgattggttggygygaagygattggygatttygggygygattttggtygyggtttttygygtygygtygggtgaatggtygygggyggaggatygggaggygtygggygtagattaatygyggtygtyggtgggagtatttgttatttatatggaagagatttggygtttgttaggttagtttagtttttttagtttagagattagttataagtgyggtygttgtgttygttttatgyggyggyggyggyggyggyggyggygttgatatggagttgygggttttyggygggtttttttatygygttttttgyggggagtagggtaagattygtygttyggtagtagaaagyggtttygaggaaagtaagtgtygaattaygggataaaaagtttttggtttttaaatttttttaaaaygttttgtttgttggaaaaggagaattttttygttttattttttttttygtttttttttttaaaattttttagyggatagttaggtgtattatttttttttatattattttagtgatttgttttttttgagtataagtagatggttttgtatgttygtagtttgtgagagaaatagygggyggaggtgaygggaatggggggagaaggagagtgggtattagggggygaggggttggtygggtattggagtttgattgggtgtttgttgattttaygttgtaaagaataaggtagttattttttttgtttgtttatgattatattatagtaaagaggtttagaaaagagggagattttattyggaatttttaaggtttggagatgtgattttttaaaagtttagtyggygaatgggagattgaagggtgaygggaagggggtaggygygttyggygttttgattgggygtgyggyggtaggattttaaagygttttgtttyggatygtttgttttgggtgatttttyggatttgttttggtggaattyggatttgtttygtygagatgaygaggtattttygtttygygaatttaataggagggatttttgaagttagyggttttygggatgagtyggggtaattttygttttttgagygtgggttggatggatgtttaattaggatttagggaggatgggggtygygggggaagtygggygtttyggggttttygatatttatattttygtayggygtaygttttgtttygagtttgygtttttygagttagtayggygagtttgggattttygtgttttttttttgtggttttygagaaaygtyggagtttygtgttttgttgggggttggggggatggagaaaaggtttyggggattttgtttaaaaagtaaaggtaaaygtattttaatagtttttyggtagttttygyggttggygyggttttagtttygggyggtttygygyggggygtgggygygggygttygggyggttaggtgyggygggggyggaggttgtatttttagygygtyggaatgtttyggggygygggaaaggtaaaagtagtttggygttttttttayggttttagtttttatttatttagaattyggttttaatagtttaaggaattgagaagaaaaaggaatttgygttgggaaataggggtttttggygggttgagtggtygttgttatggtagagatagaaayggagaggtagagatggatygtttagttatgttaagygygaagtttattygtttagttagaaagttyggatattttttgagtttygtatagttggtgaaaaaataatagaattattaaaaaagaaaaaaaaatttttttygtttgataygygtttttttggtgtaaatgaaatgyggagggataygygagttatttagttgygtaaaatygtattttygygg

SEQ ID NO: 6860 - DNA, 2906 bp, Artificial Sequence; identical to SEQ ID NO: 6859
  Description of Artificial Sequence: Synthetic polynucleotide

SEQ ID NO: 6861 - DNA, 1696 bp, Artificial Sequence
  Description of Artificial Sequence: Synthetic polynucleotide
ygaaggaggggttggyggtagtgtagtagygaagttygggttttyggttttgggagtttygtggtttyggtygtygtttttygagtttttattaygtagtttygaatttygaaygygagttygygtttygttagtagttagygggggtgaggatgaygygggtygggygagaggtaggttaaatgtagtagtttygtygygggtygtygggtttttgagtttygttttttagagttagggggtttygggtgygggtyggagggygggggtyggygygggttttttygtygtagtttygygtygttttagtttattagyggttatttaattgtttttttygatyggtttaaaatagttgygaaygtttgygatttgygygyggttttttatttgaygtttatttyggttygttygttygttygttttggtttygtttygttygtttagagggggyggggaggaagyggttyggggaggggggaggggggagggggagagaggaagagaggaggaaggaaggaggaaagaggaagaygggyggtyggaggygyggggttgygyggygtyggtyggygyggygttggaaggygtyggygttaatttygygaggtaggygayggagggggagyggygttaatatataagagtattgtattaygttaatttttttttagaatagtatgygttagtagtatatttaygttttgattgaaggataaaaggatgagagagtagtttgygtggttgtygtttgtaatatygygagttyggygygaggaggagayggtgggygtygygygtaggggtttygttgttgttgttgtygtygttagttagyggggattatgtttttgggtttyggagygtttttygtagtygygattttygttgtttaygtygttgtagtagttygttggyggygyggttattgagggygtygggagtygaagtygygaattygtttttttygtataaagtyggagtyggyggygygtygggggtygggtagyggygggyggygaygggyggttgygygtygtygggggttgyggtygtygtygtygtyggattygygttygttttyggattttttgaaggggtttgyggtgygggygygatygygggygtygygygttttttyggtyggyggatygggttygagygtagtygttaygtygttggttttygggggtyggayggagygtygtttygygtgtyggtagtyggyggattggagaattgatttttygtttttgttttttttatttttygagaagaggygaggagaaagggggtgtgtgtttggggagggygaaggygtygygaatatttttttttaattttygtygtttygygagtttaygatygtaattagttgtygtyggttyggagyggtygaygtygggagagggagygtagtatttagygagtgyggtttgggyggtttyggggygttttygtatttttttyggyggyggttygtagagygggtyggggtygtyggagygtattttggygatgaagygttttttttygyggttggagygagtyggtgttagggtttaaggataaagtygggaagygttggtggygtygttttttgggyggaggggggggtatgtatttgtatagttygtygggttttggtttttttaggygygttttaatttygyggtttygtyggtttyggtttygg

SEQ ID NO: 6862 - DNA, 2054 bp, Artificial Sequence
  Description of Artificial Sequence: Synthetic polynucleotide
ygayggttagygtttagagttgtaaatttygaggyggttgagygtttttttttgagygygygtygtgygtttyggttatttatgtatgttttttttttygttttatatygttatygttagggtagtttygtgygggtygaggggatttaggggggtgtyggtaaaygttggtgyggaggagagtyggtaagtygggyggyggygggtgggagtatgtagggaggygttttttgttttttttgtyggtygttttttttygttttagatgttagtygygagtttygagttagygagagygagttagagagggagyggyggygggyggygggyggtagggaggagaggaggygaggygagggagggaggaagggaagtagggagggygggagggaggagaggaggatttagagagygttaggtagttggagtttttgtagygtttggtygggttttaatgtatagtagtagygagtygyggyggtagtaggtagttygggagtttyggyggyggtygagttagyggyggtttygttttttgttttttgtaaattttgygagtagttygttyggggggtygggggygygttygggaggttyggttyggttygyggtygagtttttygtygtygtagygttagtygtygtagttattatygtygtagtttygtgttttttyggggagtagtyggyggttttygyggttttttagtttyggttttagggtattgttyggygagtgtttyggtaagggtgggggttgtygyggygyggtyggtygygggttgtyggggggyggtygtygttatttagagaggygygtagaggygtygagagygtttttyggygggtttttygygtattygtygygttygggtagyggttygatygggygagtatgggyggygyggagtgaygtygttgtgttygtttggtattaaggatatttagttygygggggtggggaygaaggggggtagttyggygtygttatygtagttttygagagtygtygtygttgttygggtttyggggttgggtggaggaaaggggtgttyggaatygatttttatttttygatttttttgttggatattaygtttattttggaygtygtaagagaagttgttaagtttygtaggttttgattyggygtttttygygtttttyggttgttttyggtttttttgtgtttyggtggagtatttgygttyggggttggggttggaggaggtagttataygygygtataygtataygtttagaggagggygagaggtagyggtataggttttatttgtagtgttaatgyggygttttygttgaaggagggaaaygyggygygtttaggtaaggagtyggttygtyggggagtggggtygggygggyggygagggtagtaaggtyggatagatttgggtygattygggagtttttagtgtttyggagttagttygyggtataygtataygtatataygtaggtatatatatagatttatatyggtatatayggygttygygtatttgtttaygttttatttggaygttygyggaggtgtagyggtyggagtagggatttttygggtgtgttttttttttaygtttttggatttagatttttttttttygggattttyggggtgggattttgtgtattttyggttttgttttttattyggggaggttgagggagtaattttttagtttttagtttttttygtttttagttgggttttaaaatgggagaagttttgagaggttttyggagatttatttagtgttatygyggtttygtggtttttggatattttgggattttaaygggagatagatttatagatattyggaygtatatttggagagagtggtggtttagygttyggggaggaggttagataggyggttggggttgtagttttgtagggyggygtatatgaaatagatattgygtttttttagtaagaggtagtataaaygtttttttgaagygtggtattgttttttygggaatgygtygagattttaggtagaaagyggtttaaagtatygtygygt

SEQ ID NO: 6863 - DNA, 1258 bp, Artificial Sequence
  Description of Artificial Sequence: Synthetic polynucleotide
ygaataaygtagyggygttaggygttagggtttttatttttgttttttggatttttttygtttttttgttttatygagggttttgtgattygattttatygaattaatygttgtttatygagggtttgttgygtttaaggaaggtatygggygaygagtaaggyggggaygtagtttggggaygtaggggttygggttttagtttagagataggaggtyggygtttygatttggtattygtygaygaatttattttaaggtttttattggyggagtttttgttatttttttttttttttaaatgtagttttygttattttttygygtttaggggttgttgtttgagtttagttttgtttattggagggyggyggtggagagggtgttggtttagygtyggtagttgggtttaggattaaggtgggygttygtyggttttggtttttttagttttayggtgtaggatttagggygyggttattygagtttttyggaygtttttttttttgatgttygttgtttttgttttggygtttttagttyggggtygtagtttgttttttttttttttttttttygtygtagttygtygttttygggtagagtttatgtttagtttgggttttygttygggatttaggaagaggttggyggggttggagggtgygggtyggygygggagggygygggaggyggggagyggyggtttttgattggtyggggygggggagtgagyggagttttttataatgtttyggtgyggtgtagtygyggatggatgttgygggaaggggttgttatttgttgtttttgttagyggygygyggatttgttygygtttttgtagtygtygtygtygtygtygttagttygttyggtttttgtagyggygtygtttgygtttttttygyggtygtyggagygggygttatgaattttagtttttyggygggagaggagaaaggggygaygggyggtagtagtagtagyggaagyggygtygggagttgttgtttgggygtygagggyggygyggattygyggggygtagggttagtygyggyggygggggtygttgttttggaygagttygyggtygtyggttagaaggagaaggaygaagygttggaggagaagttgaggaatttaatttttyggaagtaggtttygtataggtaggtgyggggagtyggtagtygagataggtgygtygyggygggagatttatttttttatttagtaaggggygttttygygg

SEQ ID NO: 6864 - DNA, 628 bp, Artificial Sequence
  Description of Artificial Sequence: Synthetic polynucleotide
ygyggtggttttyggtttttttttattttattttaygaatyggygtttggtygttttgaaatgaatgatttygtygygtttyggygtygygtttttagygttttttttygggatagyggttaaggtgattttgatygttttygggtygygggtygggtttgggtaggggtttttgggttaggagagggaggtygtttygygtttattttttaaggtygttttttagttggtgttgttttygtagttygattyggatygtygtagtagtttttyggggtygygggttttagtttttgygggygaaygyggtttgggggyggygggggygggygyggggygygyggygaggggyggyggyggtygggttygygaggggggttttygggtyggttttatgyggggygtttygtygygtygygttygygtttttgtatyggggtgyggggtttagttygaygygtattyggygtttygygygttttgygggttttttaggtyggtttygggtgggttaggatygyggygttggtaggtyggggttgagttyggtttttygygttggagtttttgygtygggtgtygtygyggtgygtttagygtttgtttygtygagtygtagtttttaygt

SEQ ID NO: 6865 - DNA, 1075 bp, Artificial Sequence
  Description of Artificial Sequence: Synthetic polynucleotide
yggaggttygttttygttaggggtttygggggtgygtgattatgaattttagagggttgggttttgatttgagtgtygattygttaatgaggaygggaggataaggttgtygaygtagyggaaggtaggggggaagygattygaggatttgaygattatttttaggtaggggttttttaagtaggtayggaaattaattttattaaatygyggagtggggattgggttygggyggtgtttagtagggtaggggtagggttagttggygygtaggtatttgtagggtggagtagaataatygtggggattygtttttttggaggggtattgtttattttttatatgagttttaggatattttygtggggyggagtttyggagaygttttaggttaygttttygtygttttatttttgtttgyggggggtygagtagggagggaggtttagygygygttgtgtgttygtagtgtttaygggtagyggggaygtttgygttygggttttygaygygtagtttggagagttgyggagggtgtttyggggttatatatttattattaattgtatttaggtaggtttttttgtttttttyggggtygtygttygtgggagggaaggtgtttygtttygatttatttaygygggtagyggtgtttttttygtttatygygttatyggtgaygttygtttttgygttygtaggtgtayggttaggtgttttatatygtttygtaygayggygttttgygtttttgggaygtgygygggtttygaggtgtttygyggtttttttygtttatgygtagtttttygyggttttttagtaataaggtgggttgygtygtygygtttttgtagtyggtttgatttygyggggtttttgtagaygttagtttagatatttagyggtttttagagygtttygttttgttattygyggtggtggygttygatggtyggygaggggygaggagygaggaagttygggygggaggagagttygtygtaggygtttggtttttttttggtggttaggaggygttgggagygggagtgttygttttggggatygt

SEQ ID NO: 6866 - DNA, 5566 bp, Artificial Sequence
  Description of Artificial Sequence: Synthetic polynucleotide
ygaattagttttgtygttggatttttggtygttgttygggtyggygttagttttatataatgtygygtgagtttttgtgygtgtgygygggggaggttygagatgtttttttttyggtaagttttygygttagtatygttttttagtttygygggttttttygyggygagtygggaygygtggttttygygggtttatttgaagaaggtyggttygagtagygygtatagtagatttaygtyggttagagtatgggttgygygtttaggttggygtyggtttgygagttgttygagttygagtttatygataggtygtygtygtttaagtygygggttttgagygattygtttagggggtygtyggggtygtygttttttttggygttatygtgtagygagagygttttggagtygtttttttygttattyggagagtygttgtyggyggttgggagyggttygttygygtygggygtatatggygggttttgtyggggttttygggagttygagtttaagagttgtttygagtygttygygtygtygttttttttygtatygttygygtygttttygtygtyggtttygtygttttttttttttttygygttygtatagtaggttttygygttttttygtyggtygaattygggtygtaggatgttgtygatgaagaagttggtgatgyggtgygggtgttggtggttgtygggygtttgtaggatygygggtagtattagagttygtyggygttyggtgttygtttygttygggttgttatygtygtygtygttygagtygtygtyggggttggatttyggttgtygttgtttttttatygtygtygttgtttygttaggtttggggttatttttttttatgttgtttatagtaaattttatattggtttttyggggaygtttttttaaattagttttyggttttttygyggygtatayggagattttygygtttttatttygtygagtttttygagggygtgygyggyggtygyggttagggttgaggttttataagtygtyggtygygttyggygyggagttatttttgaatttaygaattgggttagaaatattaygagtygtttygttygtttagaygatgagagatttaatagagttaagttttygatttygtygygtagtyggggtttagatagtygtagtggttyggyggggaygygggtygtttttygggtttttygttttttttygygttyggtygtttygggtttyggygtygtygtttgggtygttyggggygagagttgygygtatgtaggtagygygtttttyggygtttaygttygttygggtyggtttyggtygtygtygtygttyggtygttttygttygtaygttttagtyggttttygagggtgtygggygttygyggttagygygttygttatygttygtaygtatatggaggtttttttttygyggtygtygtttygttgygggtyggggygttttatyggygtgyggtygygttttygtygagtttygtagagtttygyggttygagtygtatgggtgagagaygygaggttagggttyggtygggtygggttgggtygttygygtttttyggtygttygtygttttygtygtttyggttttygygygggttyggaaatttttaggttattyggygtaatttgagatatttttattttggatttttgtttttatttttaatagagttttttygagtgaygtygtaggtyggttttttggataygtgtttygggttaatggtygyggygtygygygtttaygtgaygtttyggtygtygttgggtgataggagtagttygtygttttttttttttttaaagyggtygygtttttygtttygggtgygggagtttaggaattyggagagattttygatygygttttttgygttygttygygttttttttgtygtttygyggtttaggggtgtgagttattyggygatagtttygttaggttatttyggggygygtaggtggataygtataggaagatygttatttttaagatttttatattgtttatygtggggygaaattttataattttttgtataaaatgtataaataatattaaatgagttgtygagatataaagggatttttgtggttygttttttttgttgatggagaggaatagtgttatttttatttgattyggtaattyggtagttttttgttttaaaygtagagttggygygtaggatattttttttgtagatatttattgtaagtgtgygtgtgtgtgygtgtgtagggaggygygtgtatayggtygtattttattyggggatagygatttttatgaaatatgtttagygattygaaagagygggggaatgtagtatgyggttttatttgygaagggagaaatttaggagtttyggaggttttaaaggaattttttttgttaaggagaggaggggtgattgtttagttaagattttaaaattaagtygttygtttttttttaatttttttattttgattgaggagtttttagatyggttatttygttttttttgttttaaaattttttaaattaattttgtyggagagtagggtttatttgaaaygagaattaggaatttaayggtaagggtgggagttttagttggtttttttttttttttttttttattttttttagattttttttttagttgttgttagaatgtttaattggaagttttgtttttttttttttttttttttttttttygggtttttttttatttgtttttgtttatttattaaatattygttgttattttaggttygtttgtttattatttaaaatgtatttttatggaaatgtgtgaatttttggaaatattygatagggtagttttgggggtgygggagtatttgtaygttatgagtatttttagtgygggggaggyggggaggtygtagtttggtayggatattttagggttgattggttttgggtagttgtatygtgtttagtaatttagattttygtagaggtagttagtaggttgttgttaggttttgagtgaatttggggagtttggtaagtattttygaggtagygtggtttgttaggttatttggggtttgaaggttgtattttggttttgygaagttttttttttagtgtttattttaygtgttgttttttttttgtaggttttagagtgttggttgggttgggatgagaaaygatagtttttatagttgtttttaggaaaattatttttttatttaggaygggaatggtgggggaggaggtgttgggttggttttttggttattggaygtggttttggttagagtgtgttttttgttyggtgtgtttagggtagggtggggaagttttttttygttggggttggatttttttattttttttttattggaggagtttttattaaatgttttggttaggtatatatttgttaggggtttttttygagttttaaaaaattaaattttatagtttatttgtttttygggaaaatagggttggtgagagtttgtgggaagttttattgaygtttatttggttttttggggggagaattttttgtaattttggaaattttgatgattattagttaggaaagggagggtttaaygattttgggttttttgaatatgatattggggggaggaggggttttgagttttttggtttttgtaaaattattttaggttaatggttttatttgttttatgaaagttaattaggyggttttttgagaagtattttttgaatttttgggattttttgtttttgattgttttagtataaatggttttaagaygttgggttttagttttgtgtttttttgygatttagattttaattygtggttgtaatagagattttgggaagtagagygttatttttagggygtttggygggtyggtgggtagagatttgttttygtagggtttgygggttgggttttggggttggttggaggaagaggaattygtgggtygtttttttggaaaggaggaaggtgagaggtggagggaggaataggagaaagagaaataaatgaagagagagataattagagggtatygggttttttagagtggatttaaataygaaataattttgggaaagyggtaagaggggttatygtttaaagggtyggggaagttgggatggggttgtagaaagttgagttgtttaggggttgggyggtgttgagttttatatatayggaatttygtaaggtgttttaggaagtttygagaagygygtatgaggatyggtttyggtygtttgttttagttgggayggygtttygygttttttggggatgyggggtagtggygtgttttttttttgygatgttagtttyggttgtygygttttygygagtttagagttttygttttttttttygaaygatygtygtttttaaggtyggtttttttgtgyggattagaygagtttttttyggatattagtttttttygggatggaaagtggggtattgattygggaatttygttttttttttagttttatttaggaatyggagagygttygygattattygtttgyggaggayggttttttatattttttaggttygttgtataaagaggggtttyggagagggygagtaggaaagtagtttttagaygtygtgygttttaggatayggaygttagttttgtaaataaaattttagtgaagygtttyggagatatygggygttyggatgtygagttaggttttygtttttatttgaaaaygaggttagagaagggtgattttttyggtttttttgygttttttttattygtttygtttttttagtttgaygtggtgatatttggaaaaatggatttaatgaaagtygttygttygyggyggtttygttattygyggggtagagaygtttaataatttttgagagygagatttttattttagttaaagtaggtttggttagttttgygttttyggttgggagtygagtttygtagttaagttttaggygtygggyggggaattggggtygataggagagtaatatttttttyggggygagtagagagttatygtyggtttttggggttgaygtttygattyggtttgtagataaaggtygaaaygaaggggygyggggagtaggggtggggygggyggggttaaygggyggatattgygtgtttgygtttttttttgggygaaggaggatyggtttataggtttatygggygagttyggggayggggtttgggaggttgggtttagggtttgagatttttttagaataattttyggaaggagggggttaaatgyggtagyggygggtttgaaaagggttaggagygtygtaggaattggggtgtataggttttygygtgtttagygtttygttttttttygttttaggtttgttaggggygygygtggygygggtagagtttggtgggtgggttggygyggatagaagttttgtyggggagyggggaggggggggtagtygtattgtaygttttggttttgtttygatygttggagaagygt

SEQ ID NO: 6867 - DNA, 5566 bp, Artificial Sequence; identical to SEQ ID NO: 6866
  Description of Artificial Sequence: Synthetic polynucleotide

SEQ ID NO: 6868 - DNA, 1164 bp, Artificial Sequence
  Description of Artificial Sequence: Synthetic polynucleotide
ygaaygtttggattttagygagygggyggttttttggyggyggtgattatygttgtgttygttgtttttaygyggygttygttaattttaygtgttygtagtygygyggyggggtygggygttyggagttgattttagtttttaggatagaaagggtggttaaaygtagatttggtaatttttygagtyggygattatagattgttggtggttgygttayggtttygggagggttagtttttygttgggtttttagggtattaagaaaagaggggtatgygagtttggaagttggagagagttyggggttttttagagygggtgggaygtygygtttttaggatttygygttaygygtattttttttatttygatatttattgttatttttatagyggagygaggggtttygtygagggygagygtatttygtgyggttgagatgttyggaaygttttttygygtttyggtttttttagaaggggttatagtyggttygygagttttygggygggggttgagtygtagtgttaattaaggygaggttattttggttygygygttttttattttagggttttttyggtagagaggtgattgtaggttatygttagtygggtttttatttttygttttygtygtttyggtttttatatttyggaattttttyggyggagtttgygagttygggaaygyggttttagttagagtggaagggatagygygggaattyggtagagagaaaaagygggaattgggygtygtygttttaygatygggaggagattttttttyggttttttttggattttatttyggggatygtttyggggttagagtttaggttgggagagtttttgggygtatttatygttttttttaatttttttttttttatttttagttygggtggtagtggttattygtygggtttgtaggtggaggggagtttgygygtaaaatttayggtyggyggyggttattttttygygggaggyggttagattttggagttatayggttagagttagtaygagtagggttttgttttttatttyggggygygtttttttggaggagttgtaaggygyggatygattgatgagtyggttgagtyggaggttggagagggttggagtygyggtttggygttgagtaagtygt

SEQ ID NO: 6869 - DNA, 1495 bp, Artificial Sequence
  Description of Artificial Sequence: Synthetic polynucleotide
yggygygtattttatatygtttgttttgtgttttaaaaygtygaagttaattttttaygyggttttttgttygattatttatttttgygttgttaggtatatygaggggatyggttttttttttaggyggtttattttagygtttttygttagagggtatayggttttygtgtaaagygtttatggygyggggtaygygygtaygtagtttygatttttatagtttaggttttattttygggttgggtttagtygttaaggygttggggaggggtygtgttagggagygaagygttttygggattttgggagggtgyggtygggattgttgttttttgttttgagttttgggygtaggygttyggtaggattyggygtttaggtgagyggyggtttttaggaggggaagtatygygygatttaaygggygtttagagygtagggygaagaggatgggygagggagagggggagggagaggttayggtatttgaggaggaggaggagtaggaggagtaggaggaggatygtggggttygggtygygttgygtatttatttgggttttggttgttygtygyggatttyggttttttgtyggagtttygttttttttttttgtttttttttttgtttttgttttttttgygttyggatatttygtyggagayggagygttttaygyggayggttttyggygtaggygagtttggtttaagggttyggatygggtttgggaaaagtttgtttttygagggggagagygagyggtygygttgaggygttygygttgygygggggygtttttygttgtttgtagggagygyggygyggaygyggygggyggttyggttatttggaaygggygttygttttggttttyggggttgtttttgtygtttygggaagtygtygatgggttttatygttggyggttygygttttggtttttgttyggygttttygtaattygatyggggagaggttattatygttttgtttaygtttttatygttyggtagtygtygtygtttagtttttggttttygygygagttyggagttttaataagtttyggggaatttttygtyggtttttttttaattgtttygtagttatttatttttygttygtaggttggaggtaggygtttttttygtatttttttttggtttygtttttttttttttttttattatatttttattttgaggygyggataygttatygggaggagtttgggttyggygttttygggygtagtttttttttttttygygttggtygggyggggggtggyggygyggttgtygggaattttygataggggtygttggaygttgygyggagatygaggttagygtttyggagattygggaatttaggyggagattygaggttttygttgttygttttttttygtagttaggtagygtttgggagggttgtttygttttattttaygyggaaaaggayggygtagagaaaagtttgyga

SEQ ID NO: 6870 - DNA, 352 bp, Artificial Sequence
  Description of Artificial Sequence: Synthetic polynucleotide
ygtygtygttggtgggtggyggyggttygggtgttttttggattgygtagtaaagaggtattttgggagatggggttaaggttttagggggtgttattygygaayggtttattygttagattaggggggttttttggttgtgygtttggttagaattggttttgaygatggaagtttttggaattaaagygttgtttttttttttttgtgttatagttggagttgygggagygtttgttttgttyggagttygyggttttttttyggttgtttygyggtggygttaygygtttttttyggagtaagttyggtgygtagggtygggggygtgggyggttgttgttagaggygt

SEQ ID NO: 6871 - DNA, 1141 bp, Artificial Sequence
  Description of Artificial Sequence: Synthetic polynucleotide
yggggattaggyggtgtgtygttygggtagttagtgggtygggygagtttgyggggttggaggggaygyggggttgggaggttggggagttgggggttgatttygggygggyggggyggggtagggatttgtyggtttggggygggygtattagaygagtttttygttygtaggtttttagygtttagtygygtttyggttgygtttygtyggtttygtttygtttygtttygtagagtygtygttagtagtgggagaygtgygttgagaggygggggttgygttyggyggaatagtagttttygggyggagagyggggtyggggttygagagtaggtgatgttaagagttgagygggattygtgagygygyggtttagtatttattagggygtttygtaaaaaatttygttttygtttgtttttgggaattataggtaagttttgggttttygaggtgtagttttaggtagagtttygtgttgggaggtgggaagggggtttgattttggggatttaggtagtttggggatagttttattaggggtyggtgtttagaattggtgagggaggtattttaggggttgggggagaaggagygagygtttttygtttttttttggtatttagyggygygtttgttggtyggaaaggtagygagaagttygttttttttgttttgttttyggygatttgyggttygggtgggagttygtaggtttygggtttttagygtygttggttagggygygggtaaagtttgttttttygygtttagtyggttttttygttttygtagygtygtaggtgtygtttgttttygtttttttgttgtaatygttttattatggatttttygatttagatttttygyggggagtygggttttatttgygtttygagygtttgtttgttttttaatagtagygtttggtttttyggttgggtygagttygatagtaayggtagygtyggttyggaggaygygtagttggagttygygtatattttttyggttatttyggttattattayggyggtttatttygtagtgttygtygtgggtttggtgggtaattygttggttatgttygtgattattyggtgagygyggggatagygtagygttgggggttgggygg

SEQ ID NO: 6872 - DNA, 3297 bp, Artificial Sequence
  Description of Artificial Sequence: Synthetic polynucleotide
ygagayggataggaatygaggagatttttttgtagygttttttatttttyggatagaaattttgtagattaygtttatttttttatttygtgtatygttygtggttygtgggtagtagttgtttttttgggatttttttygtttgttygygagttttygtayggtygygtttttgttgttggggtygttygttggttttggttgttygttaggatttttttttgatgttgttaagttygggaagtttaygatgtattttagtgttygygygtygttttttttaaagttttttttttatttatttttttataagygtggagggagatggggtaggtygyggygtttatagattttttttyggygtttatttttttttttttatttttttagtagyggtagggtygtagygtaygtaaatttttttttaaaaygtttattttatttttagttagtygttttttttagggttttttygttygagttgggtgtggggatygtygygtatatagagaygggaaagttatttyggtttyggagygtygtttttttagaggtttttggttygttygtttttttagygttggaggatagtygygtatatagatttttttttttaaygtttatygyggtttttagttgtagtttgtatttttatttttygtttttagtttttygtttttygttttttgttttttagttttygtagttygggygtttagatttgtttygattttttagggtagtttygagggtgyggaagattaagtgttygggtttgttttaggaaaatttyggyggygtttgtaygttaattgttttggygtaggygaagggtggagggtatttttttgtttattyggtttttaagagygtgaatagaggtttygagtgaaygtttatatttagtyggttttttagggtttaygygtggggygtttatttttttattttgtttttyggtgtttttgttttggttgtattttttttaaaaggaggygttaygattttaggaggttttgtttttttattttttttagyggygtttaaattattagtttygggygtttaattttttttttgttttttttttatttygtgagaaagtygaygtttttattygtttggttttttygaaataygtttygggtggttaatgygatttttagggtttaaagattagattttygygttttttattaagatatygaygygaagtygtagaggtggaatygyggaygttttggtaggttygggatatattgattttggtggygygatgttttttttygtaygyggaygtattygtagttttatttttttaaattygtattgygggaaggaattttygattygtatyggttttygtttygtagtaayggygatattttgaggttyggaygagyggygygttttttttagtttyggttattttttagtaygaagttttagggygagttygagaygaagaaagagagttygaggaattgggatatttaygagtttatygtttattttgtyggtyggggaggaagtttyggtyggttygttttygttygtygtgygtatgygtttygygggtgtttttttaatattgtagygyggagggttgttttttttaygtyggygattgtttatygygtttttygttttttttyggttttyggtttttgttttagtttttttttttyggtttttttttttttttgttttgtttttttttygtttttttattttttttattyggtygggtaattttaygtttygtttttttttagyggyggygtattttatygtygygggtgttaggggtattttygaggttttaygyggggygygatttttatttyggtygtagttttattgttttagtttygtattagtaagttttaagagtgtggatgygaagttaggygygygtagagggygttygygaagttttttgtgttatygttttttttyggygygyggggtygagygagattagagtgtgttggattgygtgttyggatttygtgaatgaagggagygggaggaaggagygggggtgggyggtaggtatggagggggygtttggtttttagagtttygygtttgtggattgygygtttttggagggtagttttttatttttttttyggttyggggygtttttttgagttttgttttygttttatttyggygtagtttaggttttyggttttttygttttggaaagyggttttygtttttttttagttagttagagygyggaggttttatttagtaatygagygggggataagggggggaattaatttttgattttagatttygttgagattttyggtagtygtttttygygtttttttttttagggatttyggagttyggggaaaggagtagattagggggtagygggagggggaatttagtygtttagtttttyggattygtagtatygygtgttttygtagttygtagygttttttygggagtgggattyggtggggtygyggggttagttttttggagttyggagggttaagttgaagttggaaattgatttgatataaaaataatattaygttatttttttttttgtttgtygagagggtaggggagtgggagagygagygttgggagtaggyggaggygygtttgggggaggttyggagtaggyggaggagagygataygttgagagtttgaaaggtagtttyggggaagagygagggttttttttygtttttttggattatggaaaggaaatggtttaggaaaaagtagtttggagtgttttttygyggggaggggyggtgtttygggagtygttaatgtttygttttaggatttgtttagttaygtttyggttttttygattttgttattttttttattgttagttttagyggagygggttagttggggttaggaagaatygggagaggttggtgttttggggaggttgggtgtggggygtagtggagattayggtatttatyggtataggygagttttgtttagyggtggygtttttttttttgggtttggttatyggatgggggggttttagyggaygatttttygagggtyggtygggtagtgttagygtygtttygagtaggagygagaggyggttyggtagtttttygtgttttttygagagtygggyggtyggtagggygggaagtaggggggagaagtttaggygttttyggggagtttygggagggggtygtyggagaaggtgagagaagaattttgygaggttggaaagygggttagaaaggaggtygaatagtttyggggyggygggyga

SEQ ID NO: 6873 - DNA, 2213 bp, Artificial Sequence
  Description of Artificial Sequence: Synthetic polynucleotide
ygaaggygaygggtttaggatttgtagaaatygttgyggtttggggyggtyggggatttayggttttttggggyggttttgaataggttttggggygtagygttygttttttaaagaagtttgggatygggttttgtttygttgtaagttaygtttttygtgagtttataagtgtaaaattagaaaagaatgtttygtttaaataattaaagagyggtggttttygygggggtagyggaggyggttagtagggttttygttttyggggagaagtgtttaygatttaagggttgtttgttttaggaattttttaaagaattatagatattgagagtattyggggtttggtaggaagtgtagtgtattttttagttttagggtaattaggatagtatgaattttttattttgtggtagaataaayggttagygtttygatgtggygygttygatttttttttatagagtttaaaagttaygtttaattaaattgtagygttttygttttagttgggtatyggtttggaagyggtttggaattagattggattygaggaggtaagatttyggtagygygaggttaattataggttttattygyggtttttagttyggttttatygtagtyggyggtagatattttaaattttttataygtygtttttagygaggygtttyggggaaagtagygtgaggtagtgagtygaggggyggggttaggaggaygtttygttttygagttygtttygtyggagggtttgattaatgattttttaagtygttttagttttyggygtagttttttyggtgggttaggtttttygttygatttgttttagtyggtyggagtatataygtttggtygyggggygttygtataaaagttatagttagyggaggttggaaatagtygtygatttgggtatyggtyggaygaggatggagtgattagygyggttttggttatataggttttgttttaygtttttygttygtttttaygayggagyggagttttatttagtygttttaggaaaggtgaggggttygttagaygygtattgygtagttttygggttyggaayggtggygggtgtygtatttygaggtgaggttaagggtttttygtttttygggtagaaattttttttggygtgaaaggtygagggyggttggtgagtygtggtttttygyggygtyggygagaaggagtygygttatttttygtgygtgtygggttggataaagttatttaagygygaaygagtgttgattttgagttgtgttttygagattttttttttygggtagagtagattttttgtttaatttgtttttgaaaagtaaagtyggtattgygtttttttttatttttttaggaagtttaagaatttyggagtttygtaattttttttagaygttyggaagtaaatygygttttaggtaaaaygagttygtttgagagygtttttagtttygttgggttgttggtgggygtayggggagaattagggggttgygtttttygggttaagttygatygtttttyggttttatygtattttyggttttttgtagygygygyggygygggaagttgttatggatygyggtygtttagygggtagtttttttagygttagygtygagttygygtttttggtygtygttattygygattygygtttygggyggatygggtyggggtyggygggttttgggggyggttygygtttygggagygggyggtyggyggyggygaatgyggygygggagygtagtygggtgtagattttgyggtaygtttttttggagttgtagygtaygttgtygttygtgtygttygatattaagttgtttaagttggaygtgttgttgttggttattatttatatygygtattttattygtagtttgtaggaygaygtygaggygtyggyggaygtygggttgggygttttgygyggygatggttatttgtattyggttaaggtaagygggyggggygtatygyggggttggggtygagattaggatattttgatttgttttgttagttatygttttgggtagatgttttaattttttttygggtgaggygggaagtygatygggagaaygatttyggttygygagggtattggtggtaaggttttygtygygaaagtyggttttttygyggtttataggtggttggagaggygtttaaagtygg

SEQ ID NO: 6874 - DNA, 363 bp, Artificial Sequence
  Description of Artificial Sequence: Synthetic polynucleotide
ygygggggttatygygttygygaaygtagagtttataygtggattttygygtttgtgatgtttygattygtttygggttttygtatagataatgtygygygtttttttygtagttatttygggattygygtttygygtygttyggaygtttttttgygtttgtyggggatatttatygatattaggaattttagygtgtttatatagtttygttyggttttttggagttygttgagtaygtataygygtaggygaagttgtttttttaggtttttggygttttyggygyggttgttttygyggttgttttygtttatggtyggyggyggtgygtagygyggygttgttygtygtgttgagygt

SEQ ID NO: 6875 - DNA, 960 bp, Artificial Sequence
  Description of Artificial Sequence: Synthetic polynucleotide
ygtagaaaaygttgtaggggttaggygttygagatatttygyggggtagtgggtattaggtttaggtttyggttgtagagyggaggggygtygggtttaggaaaggggttgtgggtgggggtaygggggagattygaggggtgttgggaagagggtttttttttttagygttagttttggtgtygttgtgtattyggagtygygygaagggygtttttygattyggaggtataggagygtttagagaggaaagaaagaaaaagttatygttggttygaatttttggaagtyggagtygggttttttgttttaaatatygaggtagaattttttttagygttgtttyggtttttttgttatttattttyggtttgtttttggaagaatyggttttttagtttttygtygtygtagttgtgatataagtaagtgtagtygygttgttyggggttygttagggtttttygygttygttttttatygtggttygyggyggtygygttttygtttygtttygttyggtygtttygtyggtttttgtttttagttgggttgtygtgaygaggagaygttgttgtgaaattaaatttgattttgagtttttaggyggyggtygagagttygyggttgttgatgtttttgggttttatttyggggtaggagggyggygatyggygttygggaagyggttgaggggygtygygatttttagygagygtygttygagttttagttygttygggtagttttygaggtttagggygtygtygttaggtaygygaaagttatttggaagggagttgggtgygygtaataatggggttttgagtygtggtyggtaggggagaggtgtagtygtttaaggttygtggygtygggygttgtaygtggagggatgtgttaagggtyggtttgttttttttyggggaggtggtaattgattgggaygtygggggaygg

SEQ ID NO: 6876 - DNA, 1404 bp, Artificial Sequence
  Description of Artificial Sequence: Synthetic polynucleotide
ygttygttttttttaggttyggtgggattagattygaagttaattttygttaggygttaggtgtagattttaggttaggttagagtagtttttgggttttyggatygggatgttygttttgtttttttttttggtttygttyggtttgttatagggggaggtttyggtttygtatttygggtagygaatttygtyggtygaggttagtttygtgygggggtttttygygggatygatygttaagyggtattgttygtttygggygttygttyggttttagaygtaggttttgyggtygtttygtgataagtatattgaygggttattgttttttgaygagtgttaaaaagttygtttgttttgaaygttaatttttaagtgatttttaygaggttttttttttyggttttttygttgttgtttygttygtattyggtttttagtaggtgtttaagaaaygtttagtaaayggtagygtaggygagtttgttttgygygttggygygttttattgtttayggatggygggygattttaygggattttyggttygtaggattttygttttygaggttgtttttgggtygggaggggttattttagaggggygtttattttygayggygggggtyggggygtygygggtaggggagggygtagtttttaagtagttttagtttggtttagatttygygtttagygagtyggtyggttaggtttatattttttatttgtygttygttttaggggaagggttttttygaygaygttygagtttttttttttttyggagggtyggaggtyggygtttattggtyggttttgggygaygtttygttttttygaygttaygggttaatgagygygygttgttagtttattagtygggttggttgggyggttygggagttygagyggtggyggagyggygagtagygagtagygtttgygggagyggtyggtyggtygggttttygygtttygtaygttygtaygtttagyggggttygtattgagtatgggygyggyggtygtgygttggtatttgtgygtgttgttggttttgggtataygygggyggttggtygggggtagygggtttttaggtaagttttygatygaggtggggggyggygggygyggggggttygggyggtygaggygyggtttyggagggtttttttttygyggatttygagttygtttygygyggtttygygttttttgtttttttgtaaagtaatttttagggtyggttyggggygtttttttttygtagttygggyggtyggggtttttgagttyggyggggtygtattaggggtgggtgggtyggggtttygggaggggaagygygagygygggagygaggaagaaaggyggyggttttyggggatttygygt

SEQ ID NO: 6877 - DNA, 1247 bp, Artificial Sequence
  Description of Artificial Sequence: Synthetic polynucleotide
yggggggtaggtygygagagggagaggatttygggagtagaygaagaagtggagtagttaaagtttgygttagaagaggttggggattgygagaggagaggttggggtttgtaggggagygtagtagtttttagtatygatttaaattttaaagattygtggtttttgtttgatttygagggtygggaatagaygtttgtttttgtggagagygatatttaatygagaaaatggggttgtttygagttgggttttgygtttggtttagggygaggtttttttggtttygggttggtttttgaggggygtaaayggtaggtttggyggttggggtygaggagggagggtattatygtttygaggtagtaygtagtttgtagtagaggygtttgttttaagttgttttttgggggygtygtygtygtttttttttttyggggtygttygtttttaggaaagtggaggyggttggygaggatygagagtyggggtygygttgyggagggattatattttygggagttygagggggattttggygyggygggttagtttttgtttttyggttaygggtyggtagygttygttttttttyggttagygtttgyggttygygtygygygtatygttyggtaatttygygygygtttygygggggygttgygtttttttgttatatyggygtatygyggttttttttttttatattttyggttygtattattyggttttttttttattttttttattttttttttgttttttttttttatttttttttttttggygaggggygggagggggygtggyggggtyggggtttgtgtggttgggattyggtttttygtatttygagttygttygaggagtygggtttyggtygttgtttagtygtttygtgtttygygygttttgygtygtygttatygttttttggggagaygtagttatttgttygttatggatatttttagggttttgttttyggtygttttttttattagttttttgtgggatttgttyggtttttagtaggtttttattttatttttttygtygttygtygagttgggttttattaagggtatgygaagtygtaaggaaggtaagatgtagygggygtygygygatagtgaygygggtygggagggttaggaattatagtygyggttttaggaygaatttygggtttagtagtttygggygtaggagtygttaggtaggggttygygygtggtgttttayga

SEQ ID NO: 6878 - DNA, 1861 bp, Artificial Sequence
  Description of Artificial Sequence: Synthetic polynucleotide
ygtttattgggygaygtggggaaataagttttagttttygaagygygattaaaaggagaaattaagtttttatygttagggygggggagggaagttgggtgtyggtaggygtttygtyggagaygagatttttttyggttttagaagygtttygttagggttagagagggygagygtggygggagggaagtttttgttttttagyggttaggygattygaagtygagygtygtgttataygtatttygtttygttttgtttgyggtattttygtgtaatttttatgaaaatgttttttygtttttgaygtttygyggtgtaatttttattttttaaygaggagggggtygtygtaggattgggaatttagtggtyggygttttagtattttyggaygygtttygtgttttttttagtatttttttgagggatygtttattgygattttaygtagtgtyggttatttygttttagtygtagggagtattaaataaaagaatttttgtaaatttttttttttggatattygygggttttttaaatttggtttttatttttttagaatttgtatgtagttaaataggaaagttggygygggggggatggtgtgyggaggaagggatttygaagtttttaggttatttttggtttygaggagygygyggagtggagtygttttttygygggttygatttaggttttttttttttgttattttttttttttygttttttttagattaygtagtaagattygtygagggygaagaagttgggagtgattttaggggtttttgyggttagattaaatygtaattttyggtgtttttattttygyggatygyggggtaaygttagygagtagygtttttttgaggaagggaagagggggaaagggtgatyggaygagygtatttgttttagyggattttyggtgtatatttggggattgggggttttttaggtggygtttttttattttttgygggtttttttygtagttttaaatattttaaayggygygygtatttttygtttggtttatttatygatttygtygataygtaggttattaagtttaaggtgagtaggatttaygygygtygtatattttttagggatyggttgtttttagtygttgtttgtaattagggtaaaaygaagttttttgtttagygttyggygtagttygygtataygaattyggagtagagtatygtagygattgyggtttaggttyggggattygggttyggggttygggggygttygttttttttttttgygtttgttttygtygttygtagttgygtttygggaaygyggygtttttttatttgttggtttttgtattttygatayggagttggtgtttygggaaggttgttttttgaagttttttttgttttgttgtggttttgttttttygyggatttttttttygtgtygaggtttagtttttggttttaaggaataaattygttggtttgaaagggagttayggtagaagtttaggggtagagyggygggagygygygattygygyggttggagtttygggggtatttggagagtagygygtttaagyggggttattggtttygyggttgygtttttttttttttygygtygygttttttttttygggttttttttttttttttttttttttttttttttggtttttttttttttgagtttgtttttttgggtttttttgggygattggggagaggaggyggtagtgtgatttttagataaattygggagaaatttttataggattataygtygattggtagtttygaggattagtgggygtygyggtttygygttgtggttgygtyggttttgtttatygg

SEQ ID NO: 6879 - DNA, 3044 bp, Artificial Sequence
  Description of Artificial Sequence: Synthetic polynucleotide
ygtygagggggaggggttggaagatggyggyggaygtatatttattygatygygatagagtttaggtttttagttygygtygtygttygttgttygtagttattgtgggtagttttgttttgtttygygttgttggtagagtygtttygyggaggygtgggattagggtggygttygtattttttgttagygygttttygttygggttygtttagggagtatttgtgtayggttatattggattttgtgttttagttattgttttagygyggygggaaaggagagggtaygtatagagtttgggtttagttttagtttygttggggtttyggagttaagatgattagygaggaaattyggaaaggygttaaggaaaattatatygtttaaggttygttatttttattttagtyggttttggygtttttttttttygatatatatttttgtttttagatatttttaaaatagttygggyggtyggygttggtygtagttttygtggtttgggygtygttagygggagggagggyggygaattggggygygtaggyggtygtagggtagtgggygagggggyggagggtagggagagaggygggaatatggagttaggtttttatttgagtayggattgtttttttttttttttttttttttgtttatttatgayggttaggatgattttttttttttttttygtgaggtggttgaggttaggtatttygggttgtagaggyggttgagaggtygtygggatgggagttaggyggtttyggggttygataggagtygatatgtttggtggagtygaattattttagggaagyggggaggtaattttattggtagyggyggtatyggygyggyggttggggtagtttttagygttgggataaatatatataaattaatggtttttaatttaaggygatagttttttttttttaagaaaagtagggggaggggagggygagygygtggggaaggagggttgaggagtgygtttygggaaatgtttttttttttygggggygaagggttgtgaagtgagyggtttaagggaaaggggaattggaggtygggaygyggagtgygyggagaggygggggagggtggtggagtaaggtggyggggatagttaagggtggggtgattggagggagtaggygggagggygataggyggatyggggygygagtgtgttyggtygyggttagggtygggagygygygygtygtttyggaggggaaggggtgtttgygaataagttttyggggaattygtttygagygttyggaggyggagtattgtyggttygaggggtatttaggygggagtygagagggtygtgaggaagygaggayggtttttyggagaagtaatttattygtttygtyggttgaygtattatagggttttygygygttatagagggagaatttttttaggtatattygggagygggtygyggggtyggaaattttygyggagattttaattttatttattttattttyggttagagtggagaagygaaagyggagaagatatgaygggggttagyggyggagagtttyggggttagggtttttyggttgttaaygttyggatttaggygagtttygaygtgtagyggggtttggygtyggtttttttttattaygygttyggtttagggtygtttagtygtygttatygtygtygttttttgggtygatggagtyggygyggaaggttygygygttttgygtygtygtygtttagtgtygtygttagtatttttttygttttttygtttttygggtttatttygygggggyggygttattttttygttgtttaggttygggtatygygggygtttygygggyggtagtygtttttttygagygygatttttaggttgggttyggggtygggyggggagggaggagagattgagygtgaagggagagggygttygagttttyggggayggaagtgtggagaataggagygtgtgagggggygttygaggtgtygggggygggggaagagtatgagtaggggtgggggtaggggtgttaggtgtagtaggtagggaggtagaggyggygagtgggggygttygagggatyggggyggggyggggagygtaagggtggtaaggygttygagagttagggttggagttgaaggtgggtgatagggagggggygtttaggtgttaggatttgaggagaaagagtgygygtagygggagggtttygaagtgtyggggygggattttggaaggagggagaaygtgaggagggaggaagggtttttggggtgttagggatgggggttaggaaaggggtagagagttggaggtttataagtggggatagygggggagggaggttggagygagtggggaaygtaggtggtgtygagggyggggatagggygaggggagyggggygtgaggaagttgtgggaaatygygttggaygttgagaatgtgyggaaggattttgaggggaggaygygagatagygygaggagagaygaggagagttagggttggtygggagggtgygaagatgaagygattattggaggttgtgagggtgaaaggagtaagaatygtttagagaygggttgggtyggtgttggggttaaaggtttttgtttgttaggttttttttggygtttattttagaaagaagaggyggagaygygaagagatygggttagagttagattttygaagtayggagatgggtttaatgaaaggaygaggaaagaygagaaattagyggtyggagaayggaggtggtygtygtygttttttgttttgttyggggttgggygtygttyggagagttttttyggagggggyggggyggggtygggtgaatagagttgggygggttygttagtttttttaggygttttgggtaagtaatgtgggtgattgagttygggtgtgtgtgtttgtgtgtgtgtgtgtgtgtgtgtgtgtgtaygtatataagtgagygtgtgtgygtattttatttagttttttataygygygt

SEQ ID NO: 6880 - DNA, 1603 bp, Artificial Sequence
  Description of Artificial Sequence: Synthetic polynucleotide
ygatttgatttttgygagygtgtttgtttyggaaggtgttttttgattygtygtgttttttaagtattatygggattttygggtattygggggtttagggttatgtatttttttgygygtttatygttttgaatttatagttttygygttgggaagtgattggyggttttttttagggaggatttygygygttattagggttagatattattygaattttygttyggttgagygttttggyggygtgagtyggattygttygaagttttaggataygatttgttagttattagttygygttygtagggtagagaygtayggtygttygtygtagaggygygaatttttatatttattttttgtttygtttygggtttggtgtggttttggtatygtttaggatygggattttgaygttttgattttttatygygtggggaagttatttttttygtttygaggtttygatygtttagtttttttgagaagtttttattttggttattaaaagtggtttttaagagtagttttaygttaatygtataaagtaatgataataataataataagygtttaaaggagygggattgttttttyggttggaygatagygtyggggattygtagygtgygygggtyggaattaaaaaagtagttygggagygygagggttgagyggggtaagtatgggttgtttttygtagttttttttttgttygaggttygggttggtygtttgtttgtttatgattgtttagttgttttttygattgtttaggtaaagtttgagatatttaggggatygggagyggattttttttagtttygttatttatttatygttttttygtttygygtatttygtttttgggtaataattttattaattttyggtttygygygtaaatttaygtttgatttgtyggggtttgttttgttttygtygggatatttyggyggyggttgttgtygttggggttttygyggtgttygyggtygyggttgtygttttttyggttttygtygtygtygtygtygtygtygtygttggttaggttyggttygtygtyggtyggattttaggtgtttygggygttgggttttttygggagtygyggatttaygttyggagatgagtaagtaaatgagagaagagagaygggggtatagagagtgtgatagtgaggaggggagggggagaggagagygayggggggagaatgggaatgtataagygaayggttagggagagagaaaaggggaaagagaagagaaaaataatayggaaagaaggaagagaaggagggagggaygggagagygagtagygaggagagggggagygygggggygtagggygygggaggaggagygygttygttygtttttygtttyggygtgygggayggatatttyggygtygtygtygtygtttygggtygygtagtttttgttttgyggygggaggyggygaggygygygagggaggggygygtyggggttgtggggaggggagattattttattagttaaaggaggattggttgtatttaaatttagttyggatgtaaattayggtttyggttttggtygggygaagtgygg

SEQ ID NO: 6881 - DNA, 1365 bp, Artificial Sequence
  Description of Artificial Sequence: Synthetic polynucleotide
yggtttgtatttttatyggaaagtgygtttgttatattttttyggattatttygttttttygagagygttttgttttttatagttyggaaagaaagaaattttagttgtgaagtgatygtggagaaagygtaggaagygatataattggttagggaggtagagagtgtgagygggygtattttttgtttggggatygygttygygggyggggayggagtattttagtggttgtattygtygtttygygtttttgtttggygtygttaatttygyggyggtygttggaattttagagttgttaggygtttttagtyggtttyggtaaatttttttttagtttaygtgttaattaagyggttygtttttygagttygggatggagtatygygtttagggaggtygygtygttygagaygtgygtayggtaggtaatttatattaaggtagtygtagttgyggygtttgggtatatygtygtggattttaaatggtttaagagygtttttttagttttgygtttttagtgtttttagagttttttttttttttyggagygtyggtataaygtattatgtygttgggtyggagtttagggttyggtagaggttgttaatttattgattataattatttttttttttaattygttygtagttgttygttttggattaagtygtttygyggttygtgttaggtagtgggttygtttttttttttttttttttttttaaattgggaygtgygaaggygtagttgttttttyggggttttttttattttttatatattttgttttygttttttgttttttaggttygtggyggagagatgttgatygygttgaattgatyggtgyggttygggggtgagtggygagtttttttttgagttttttttagtagygyggtyggygtyggttttttgggygaattttttagtttttagattttgagaggygtttttttttygttygatygtttagatgtagtttygtttttttttttttgtttttattattttgaattgtatggattatagttattgttaaggtaatygatggagaygtagtaagygaggtgggtttttttttgttaaaggtgygtggtgggttttaggggtggygtgtggaggygtttatttaygttttggtttygggggtttagatggttagggttgtgttttttattttagtttttgygggtttttagtttttatttttaggattttggagttttataaaatattttgttttttgtattttggaggygyggggagtyggagygagaygygttgggagttyggygagtygggygttaatygggygtttagggttaagtygtgyggttygtatttatgttygtygt

SEQ ID NO: 6882 - DNA, 419 bp, Artificial Sequence
  Description of Artificial Sequence: Synthetic polynucleotide
ygtggygggygttgtttattyggyggagtygagyggygtgtagaggttataagtgtygtagttggtgattgggggatttttttygggaatygtgtygggagagygygyggtgttggagtygtatygggtggtygaagtagaaggtgagtggyggggagtgggatggggtggaggttttgaatgtaagggtgagagttttggagtttagtagagttggagygtatattttygttttttttttttygttttygagtattaggyggatatattygtatttygaatgttttagtgggygtagagtttattagaaatggatagtyggatttttyggygtttgttgggggtatygttgttaggtgtttggggttygttttttyggttttgttygtatagggygtatttagaggtygttttttyga

SEQ ID NO: 6883 - DNA, 3675 bp, Artificial Sequence
  Description of Artificial Sequence: Synthetic polynucleotide
ygtagygaggtyggttgygyggtygtygygtgggtyggagtttagtgttttttggtggygtygaggygggtaggyggttttyggatygygyggaggttygayggttgtgatttaggggtggygtygttgttagggyggygggaggtttgattggggtttygtygtgggttgagttayggygtaattaattattagttgttgggaatttttgtygttygttygyggtgatttattyggtagttaggtttatttgtygagygygggggttttggtttttaaaatgaatttggggagagtgtttgttyggggtagggtttttygttttttygttttagggygttygtagatttagygaggatttgayggtttagaygtagtttatagygygggttttttttttttggtgggtattygtgatttttgaaagtggggtgtagagygttttagttgggaggtttyggtgaattattggggttttagattttttgggttyggggtttttgaggttagggagttygagtatygttttagggggygatttatagaagggattggttttttggagttygygagttgttygagggttaggtttgattttttagttattttttggttagttgttagtttgtygttaggtaatttttttttatttttattttttttttggttggggttaggagaggaagaggagtttaggggtttttgaggtttgggtttgtttttttggagttttagggttttaggygggatttaggaagtygaaggttaaggaaaagtttttygatagtttaaagggagagggyggggagggggaggaggtaaaggaggttaaaatgggaaggagataaagtttggagagggtttatttggaagtagggaataggtgygttttagttygagtttygtgtttttattttaggtggtttygagggggttatygygtggtttagggttgtatttayggygtattttgygtttagttgtggggaattaaagagtgattatatatattaaagagtgattatatatatatatatatatatatatatgtgtgtgtgtgtgtgtgtgtgtgtgtgtgtgtgtgtgtgtgtgtatttttttttttttttttagtaaagtaatagagaggttattgggtygggggattgygatgttttttttygttgttttgattttaaaagtggyggtttatgttgtttttagygttttttagggaaaygattygggtttgtaggtgttggtttaagygggttgtgtygttgggaggygagggggtygaggtagttttygggattttattattttaygaggttatgtttttggttaatgataygttttygygtygggtggttaggtggggggtggggggtggggaagatttygtgaatygttgttgtygtttttttgtgtgtttatggttttttttttttttgttttttattttttgtttaatttgtttgaagttgttagtttgttatttttggttgaatttygttttttttttttaatttygagttttttaaattttttattygttagggttgtttgygtttttggggagyggggttagaaggatttaagaagtygygtttatttttttatttttygttaaaattygtyggyggtttygttttygttttttttttggyggtttaggtygtttttttygggtttttttygygtgygttttgygtygygttgggtttgtagygggagttgttatagtagtttygttagttggttggggattaggygggaggtggygygttttggaggttgtgggagggagggagggagggaggttyggtttyggygtagttyggttttygtttttygaggttttttygtyggagyggggttgttaagygtatatatatatatatatatataygtatatatataygygtatatatatattygggtttttaayggygygtaygtaygtagygttyggggtagattagygyggyggtygtttttygggaygttyggaygtyggagggtttygattttygygyggtttatgygttygygttygtttygttgtttygygaggttygygggatttttttygtygtygtygtygygttygtygttttyggaggagygggttggtygatygttatygygtygtttttyggtygttttygaagtygttttatygyggtttttgtygttttggggtygygtttygttttygygttttgggggttgagtygagtaaatttygygtatyggtygaygttyggyggggatttygttgygtattygygygttygggtgggygttgggygygyggatttttggggagygggttgtttttttygttgtatttgttyggtttttttttygtttgtaggggattttagagatatygttatttygtaaattttttttttttattatygagagggggygaggaggggtaaaaggggaagtaggtttygttgggygygyggatttgtaggttttttgttgggtatygttattygygagttggatttataggggtatygggtttygyggtygtttttyggtygttttttggtttyggttttygtttttgygtttttygygggagyggggggyggggtgyggagggtagtaaggttygygyggtatttagyggggtygttttgtatggttttgygtagtggggygggttgtttyggtygggtttggygtagggtgtyggggttttyggaygtttggtttyggygttygagtagttttttgtgtttgttygttttttyggttgagttygggttygygtygtttttgtttygttagtygtttygyggtggyggtggttgtggyggttttagyggagggggttttttttagttttttygtttttygtttttttgttgttgttgttgttgttgtygtygtygtttataatttggaggyggyggyggyggyggyggaggaggaggyggyggyggtygtygggygttgtagtgggaygygygyggttgtgagtttgygggatatgtttttygygtyggttttttgttggyggttatgaagaggtagaaygtgyggattttgttttttatygtttgtatttttatttatttgttggtgggygtygtygtgttygaygttttygagtyggattaygagatgygygaggaggagaaatttaaagtygaggagattyggattaaggggaagtataatattagtagygaggattatyggtagttggagttggtgattttgtagtyggaatygtatygygtyggygtttagtggaaattygtyggttttttttattttgygattayggttattattattataggtaagggttgggygygtygttgggttttygygtttygggaggagttyggggaggyggttgagygygtygygtygggttgggtgtagggygtygagggttaaaygtagttttttttgggggttttttygtagygtttttttttttttagggagtttttttttygyggygttttygagttttatttttyggggattttattyggtgttttttatygygttggtgtttgggtygggygtgygagtttygagygagtgtgtttgagtygggagggyggaggygttatttttgygaagagagtggagygttaagaataattttatagtagatatttatttatttatygtttyggygygggttgggttgygygg

SEQ ID NO: 6884 - DNA, 3675 bp, Artificial Sequence; identical to SEQ ID NO: 6883
  Description of Artificial Sequence: Synthetic polynucleotide

SEQ ID NO: 6885 - DNA, 3378 bp, Artificial Sequence
  Description of Artificial Sequence: Synthetic polynucleotide
ygggtygggtyggygaggggggtttyggtygagaygygaggygygttaygggattyggyggygggagyggatggygagygagygagygagygggygggygggygggygggagggaggtggyggtyggggttgtttaagatggggtyggagtygygggttaggygyggaggagayggaaggggygggtagggtygygygggygyggtgygggygttttttttyggtagttagyggtagygygtyggtttttygtttttygttattgyggtttygygtyggtygtttgggtttggagtttygyggygttttyggaggaygggtttygygttttaygatttattttyggaggyggggtygggtygatygggggyggaggaygtygtaggaggttgttyggatttygggygtttgttaggttttttttggggttttttatgttaggtttygyggttgtgttygtaagygtagatggtttygggattygggttattttgaygtygtagatttagtaygttgyggatygggtaygttggatttygggataagtgyggagggtygggggttggaagggattygagagtagagttygygtttttattttayggaygyggttatygaggttygagaggggtyggagtttgygggagagggaagggttttygagggttttataatttggttgygttttttttttagttygggattyggatgagtgttgtttgaggtygaggygaygaatygttttttattygtttttgygygggatttyggtaggaataagygttygtttttgggatyggaggyggtaaattttaggttygagttttttagygtagygtttattygyggagtygygygtttttttggygtatttttgggtttygyggttyggtttttagtygtygggtttttygggttagttttttgttttttagatygaggygtaataagtttgaaagtagygttaaggagtagttagygagtygaagggagggygtggggygtygggygtttygggattttygaaygygygtaaygttygttttyggggatygggygygggyggtaggygagygggattgattyggygggttgygtatatttttttttaaggtttygattgtgygyggaygggggygygtttaggaattttygttttttttttygtttgtttgattttgttgggtatttaaagtyggattyggyggtatttyggygtgygggygtagagtttygttgtygtttaygggagggagyggttygatttttttygttgttttttyggtagtyggggtygtagaygagtggaaggtatgagggttttaggagaygtgatagtygtttttttagattttatatatygtatattattttttttttagatagaaaagggatttagtttttttttttttygttttygttygygyggtttttgttgttttttygyggyggttttygtttygagggggygtgtgtttgtgtttgtggggagagtatygagggttttygtgggtttttaggatggagygggagagtagattttttagttttttttttaatataaaygataagyggtttttttggggygggagtgtaggttttttattygtttataygtttttttgttttttaattatttyggagttgtagtttaggaatttgygttttagattyggaggaagaayggggaggtygyggyggggaygggtgttgaaagagggttggtttagggtttttygggttttagtttaggygtttgygttttaagaaatttagaagtttaaaataaaagtggaaaggggtaaggtgtttagyggtttggggttggggtgttagattaggygttttttttaggttgtyggggagtggttaagtaggagtygtygyggttaggaggagggaygygggttyggagtygtagttttygttaagttttttyggtygtatygtttygyggtgatttttagtttygtygttttttttygaggtyggaggagttttttatttygtttagggggtygyggggatttagggagagggtttttggtygggtttagagtttttagtttttttaggagggggygggggtygtgttygtttttygaggtagtttygygyggttttaagttagygyggygayggtggagggtyggyggtttttgtttatyggygaygyggattygggagtgttyggygttygggagtgttyggygtttggagyggagayggtatagggtyggtttaaagttgagagyggtttattygygyggtttgttygatttagtggaaaggtagataaggagggaagagttaggygttygygtgggggtggggggygtaaaaatagtttttygttygaagtgggggagagtatttttagggagtttttattgttaatgttaggtttataggygagggtttttaygagygagggtttygagaaggagtttggggtttttttttgtttgtttygagttttgtgygtggggggaggaygtttygggtttttataatgtttgtagggggttttggaygtgattagtaggagggggataygttygggggtttttyggagtttgttgygtttatgtgtggttgttgggggttatggggggtttttttagattttygttagygtttgtgtgtgttgggggtatagygggaaygttttttttagtttgttttgtgtatgtgatgaagaggggtgttaggttgtggtgtgtggatggggaggaggyggyggygtygaggagttttttttgygtttagggtygttttttttttagtttgtttaatgygggttygyggggatttgttatattttatygttatygttggagaaggtagggggttgagggggtagggggtgggggtttaaatttttgagttttgagygtaaaatttyggagttgygaagttttaaayggygaagttaggaagtttgggygttygtttttttttygatttttttttattttygttgygtttttattygtygygtttttagtttttygttggagttttttttattttttttagtagtagyggtttygtyggygaggattygattyggygagttgtaaattttygygagygtttygygtygtyggyggttgagtygggygttygatyggaggtggggggggtttttttagtygtygtygttttyggttygttttgggtttygtygggaygttttttggagagtattygtyggygtaygtaggttttttttygttttttygygtttgttggagtttttygggygttyggagggttyggatgttygygttgyggaygatgttggygygygggttygggtygggttaggaygyggygyggtygtttgtgttttyggtttttyggtttygygttygt

SEQ ID NO: 6886 - DNA, 1108 bp, Artificial Sequence
  Description of Artificial Sequence: Synthetic polynucleotide
ygggggtttygattttttttaggttygtttttaattttatattgttattygttyggygtttatttattttttttagaggygtatggatttygtyggtygggttaggttayggyggttgygggttatagygattttttygggataggaygggtgygggttttttttattygtaggttygtyggtagttttygttygygtttttgttyggygtttttttygtyggttyggtyggggttttatygygtyggygttgagttgggttaagatggygaaggtggagagtyggttatagaggtagygygttyggagggygtygaggggtatygtgyggtagtygygttaygattagggttygagttgygggggggyggaggaggagggtttgggggygggygggataygggagggagataggyggagygttagyggyggyggggaygygggygtttyggttttygagyggyggtttygygtttyggtttyggtttyggttygtygtttygtatttgygttygtagtygygygttygttygttygtygtygttaggtttygyggttygggygtttatgtygygttttgygttygtygtygtygtygttgagagtygyggagygtagttygagggagygtygggygggggagtygagygatygggggyggggyggggggygagagttggttyggggttyggtagtygttygtttygygttttygtygtttttagttttttyggggttygygttttyggttygygygggaaggagggggaggttyggaggggygygtgggygtaygtggagyggggagggtgygagtygggtgtggtttgggggygyggggygggttyggagygyggygagggttygtttyggagtttttyggtttygyggtttagggygtyggttggagttgaygattttgggatygttttattttttatatttatttttttygggttttattatttttggtgtttgyggtttattttttgggatagatatagtttttttygyggggaggtttgtygttggaaatttttttttgyggtttgatttagtygttygttgtttaygggtygygattgtttygttttttatttgagtaygt

SEQ ID NO: 6887 - DNA, 1700 bp, Artificial Sequence
  Description of Artificial Sequence: Synthetic polynucleotide
ygaatatttataygtatatatatattygggagygtayggaygagttgttttttttaaggttatttaaaygttttaattattttygggygygtaagtttaagygygggagttaggatttatygttaagaygttttgggygaggaattttayggttattgtttttagtagtagttatttgtatgggaaagggaggaagagagaygtgaaygtgygggttyggtttgttagttttygagagttatatygaagggtttatgygygygtgatttayggggattaggtagaaagtygtttatygtygtagggtagggtyggttatygygygttggtttttttttatgttggyggttygtttattttgggtttyggttagttttatttagtttagaggygatagataaagygagtttagygtaggatgagggaggtagtttatttttatygtyggtttyggttygygagaygyggggatagygyggtgygyggttygtatgtaggggtgatyggagggtygttttttttaygattyggaaagaaggagagtttttygttaggtttttgtgggtgttttttggtygaggagttyggttttygtttttttattttttttttttttatttttaagtaggagagygtgtagttttagtttgtataaggygttttaagtyggtgttttygggttagggtttgggygtygttygggggtygtttttatttygggttyggttttaggggttgttgttygaaygtattggtttttttagaagtattygtyggyggtatatyggtagggyggtyggttttgttgggttttttgggygtyggtttygggggttygggyggtttttttyggttttyggtttggattygygaaygygygggygygaggggttgggaygygggagttttttgagtgyggagygyggagttttggtgtttyggygtattgtagttatattttygggtygygygttttygtygttttttattygygtygtagggtttttttttttgaggygtygttygygtatygtygggggggagggggtagygttaataaattggggagttyggttygtygygtttaggttttygtttggagtygtygtattygggayggtgygtagygttggaagttyggtttttygagagttagttgttygtygyggttttygtaygtygggtagtygtttttygtygtttygggygygttattatggggtttyggtttagygtttggttgttgttgttgttygtygtttttttgttttaygaggagtatagtygggtygttgygaaggtgagttttyggttagtttygttttyggygtttygtttygagtttgggygtttygagaggtttttttgttygygtttggattygttygtttgtttttygggggtygygygtggtayggttaggtgtattttttgggtyggggttygttgggggtttttgtaggttaygatygygtattggtggatygagttttttttgttatggtatgggtattggagagttaaggaattttttyggggaagggaggagaaatagttygygttgtggyggggtgagggtgtttgggagtyggygggatttgaattygygtygygggtatgttyggtagttgggygtttttattygtttygggtgygygagggagttgggggttggagggtygggagygtttatttygygt

SEQ ID NO: 6888 - DNA, 692 bp, Artificial Sequence
  Description of Artificial Sequence: Synthetic polynucleotide
ygattygygatygtatattttgtagagattyggtttygtttttgtatttttygtagatttygttttgtgattatatttttygttttttataggtattggttygyggtygtgtaygtttygtttttattggtttygtttygtgattaygttttygtaattttgatagattttattttygaggattttttttaggagtatagtgatttygtttttatagggttygtttygttatattgattttttygtgtygttygygggattttatttttgttygtttgtttyggtgtttatggggaagtttggtgttaggggttattagttagtttaatttatygttygattggtgggataaggataggttagygggttataggtyggaagtgagattygttyggtygttttgggaygygggaagatygaggtttyggtggtttttttttttttygtttggtttttttaggagaaggagyggttaaggtaggattygatatygyggtygtattygtttttttttttgttttagagtatagtttgggatttttaggggggagattgaatgagtgttgtygaggatyggygagagtttggaaygttygygttttygtaggagaaygaggaggtgayggatagggaayggggagyggtygttgggtgggaygtttgagattttygggaaatggtygggtygtyga

SEQ ID NO: 6889 - DNA, 1924 bp, Artificial Sequence
  Description of Artificial Sequence: Synthetic polynucleotide
yggyggagtaaattgaaygttatttttygattaaataggagtttygggtttatttgtttggaagtttttaggyggtttggaggggttyggttttygggygygattygtaggggttgttttgttyggttygyggaayggaygtttattygtygtagttaygaatttattaaygatattaagtattggtygggtagattaggygtygtggaggygttttagttttttagtttttygtaaygaygygttttaggggtgygtagtgtttggygyggtgatyggattyggtygttttttygatygygtagagygagaggttatattttggattttaggtygggtttttgyggttttgggagggaggtttyggaygttttttagatttygggtttttgtaatttygaggtygggttttaaaattayggttttttygagttatayggagagttygtggttaagggttaagggyggttttygattttygggatygtttttttgagaaatggttgagagttaagtttagagttgygtagggaagggagttaaagagttggygtygagygygaagggtygggaggygyggggaggttttttattygttttattgttttgttygttaatgaygtygatgatagygatagygtyggtygagtgttttttttgtttygggtygtttaggtatygggtttttttttagtattygtagtaygtattgaagaagaygttayggaagttttygttttttagattygggggaattaggaaaygygttyggygattttygggtagtagtatygggttaggtttgttttyggaatygttgaygttattygtygtttttttygtttgggtttttygygggtygtaggggtggaagttygatttgggttagggttyggatttttttttttyggtttttgygtygtygttttyggtgttaggaygygttttgttttygtygagatttagaygygtygaaagtttygygygggtagtttttygttttaygtttygggttgygygttttttygygaagtttttgtygagtgygygygayggygtygtyggattttttyggatygygttttygygtaygtttgatyggagtatttygttttaygggggygttttgygygtttttttttttyggtgygattttygtttttttttttttygyggtttttaggagtttaggtatttttygaygtygttgtyggyggaatygggaatttttttyggggttttttgygggttygaagtygttttttygaggyggyggagttgggtagtttygggtttygygtygtttygygtygtttygyggagtyggagttttttttyggagtttggatatagtttttygtttygtygtygygtattggatttyggtagygtggagtttgttygggaagttgggttgygtyggtttggggygaaggtttaaggggygygggggtygggaygyggggttgtggygaygatyggttttttgygaaygtttaggtyggygggttyggggttataggttgggagtggagttggyggttattggggagtagagaggaygtttaggaataggtgtattagggtttyggyggttgggtygagggtygtaagtagaggggatyggyggttgttagtaagttttaagtagatgttttyggyggggtagtygtattttatagygtttatttygygtatatygagtatttaaaaygagtaaaatyggtttataygttggaatgtagtttatgattttaaaattttatttttaggttgtttagattatayggtttygttttatttatttttattgaataayggtygttggataatttagagaagtagtagaaattaygagaaaaatagtggagttaaayggyggtaaggatygataaggttggyggggatattgagtaaayggygg

SEQ ID NO: 6890 - DNA, 1991 bp, Artificial Sequence
  Description of Artificial Sequence: Synthetic polynucleotide
ygtttagtttttatttayggagggygaagataaaaagygttttaggygygtagggaaatygygtaaygttgtgtttattgtagygatttttttagaaaaataaataaggtttttygataggttattygygtaagtagtagtyggtygagtttttttttttygttaatttagtagttagygttgtygttttttaagattttttttaatttaagtgtaatttagtaaggagggagagttagagattttggggaygttygaggaaatygaatttygaaattttttgtttttaaggygyggtyggagatttttgggattttaaagyggagagaattttttaattttttgttagaagagyggggttagagatttttgggatttttttggagtygaatttttttttttagttttatttyggagggygggagygaagattttgaagatttttttagygtaataaatttttttaattttgttggaaygygggttttgggatygyggggaagtttagaggggygaatttyggaattttttgttttgagagygggattagggattttagggattygggagtagagggaattttygtaatttygtygaaatatagggtgagagatygtggggaatttygagtygagygaagttygtaattttgttyggygggygggattagaygygttttyggygtttttagatyggygatgtagygtggtygggagtttaggattttaagygtygtygttgtyggtaagtatygtygtatttttttataatttaggattygtatggtaayggttatgttggggggattttatttaagaaattygggttttgtygggagyggtggtttaygtttgtaattttagtattttgggaggtygaggygggtggattatttgaggttaggagttygagatyggtttgattaatatggtgaaattttygtttttattaaaaatataaaaattagtygggtatggtggtgtgygtttgtagttttagttatttgggaggttgaggtaggagaattgtttgaattygggaagyggaggttgtagtgagttaagatygygttattatattgtagtttgggtaatygagygagattttatttaaaaaaaaaaaaaaaaaaaaaaattaaggttgaattygggttttygtaygttygtatttatttgygyggttattaygygttgtttttyggygattaggttgtattttttgtattggtagtygygttatatgtagaagygtttgtggtttttgagyggygaggygtagtygtggtttttgtagygtgygtatttgggtagtygyggggattttttgttttyggtatttaggttygaygtttyggagtyggagtygttttttttgttgttgttttyggygttygagtygttggtygtttttattagygttttagaygttttgttaaagttttyggttttgttttgyggyggtatttygggggygtgaggggttttygayggtgtagagggtttgttgaatgtttygtygttgggtatggtgtttttaggagaagtgygagtattttggttttttttttygtttggagattgttgygagggatgaattygayggatagygaygtttyggaggaggaggygtaggagaygtgtgygttgtagtyggaggygtagttggagtggygaggtttgggtaygttaygttyggagtggtggggggttgtgtttttttttttggygygygygygatttagaattttyggatattttttagaatattttygggattgtttgggagggagygtggttaygtttatygtttttygattttagttatygttttttagttgtttgtaaatttgtatyggttgtaagtatttagggttttgttgtagggtttttgtaagygtatygagagatatagagyggtttgggaatygygtggtatttttygtttygttttyggaggygttaagattyggttgttaaagtayggtgtatyga

SEQ ID NO: 6891 - DNA, 1667 bp, Artificial Sequence
  Description of Artificial Sequence: Synthetic polynucleotide
ygattttatygtagtgagtgtgygtaygtgggttttaattttgttttgttttaatttygttgtttttttgtttaatttgataygtttygaattttttaatttgggaaggtatttggygatattgaygtatagtttygtygtttggttgttyggaggygttttttttgygggygygagtgttattygygttgggtttagatttagtyggtttttttygggagaggaagtttyggtttggyggagagtaggaaggaaagtttygataggtttaygttttaaaattttgtttttagtttttttaagtggagttgtagttggtatttygaagttgttttygygttyggttaaattttygtattttagaygtttttatttggtttggygagttgygtttgtagagtttygggttgyggttyggtagtttaaygtagtgyggyggtygyggttaattyggtagtagggygyggyggttgyggttgygayggttgagaggttggyggyggttgyggggyggygayggygtttttyggyggygggggttttggtagagygygtagygagtyggggatgaggttttttaagttttygttggtttgttgtyggygtagygttatttgygtagttatgattygttgtygttygatgatgaggatgtatttttygtaggtgtagtttttgaagyggtagtaaygtttgtggtttttgagttaggataggaygttatggttgyggtagygygygtatttgggygtgygttgtaggggygttygtggyggttgygatatygggtygtttatgtataggtagggggagtygtagtygtttatgtttygggttttygaatgagttggtagtttggttgygggagagggttagggagygttggayggyggggttgygaggttygtttaggggyggttttygggygaygyggtttttggtttygtagtttyggtggtygtgtgtgtttyggggyggtyggaggtgtygtagtygtttttttagtttttttygygtttatagttyggttttttagtttaygtttagttaaygtygaygygggtttttgttttgggygygtagtygggtyggtaygttttttttygyggaggygttgyggyggttgtaaggagtyggygatagttttgattaaggtttgagttagtttttttgtagttttttygtgagtyggtyggatttaatattttygtygtttttttttaatttttttttttttttatygttattttygtttttggggtttttgtttttttgtatttttygttttaygtttttttttttttttgygtttttygggtgtttgtattttattttttttgttatttgtagttaggttattttygygggggygttygyggtttttttttttaagtttttttygttattttagttygyggttggagattgyggygttttagaaygyggyggtgttygyggggyggagaaggggaggattagygggagtgagggtgggggtgtttgtaagygagtgaggtggtygtttygtttttttttttttttttttttttagtttagatttggtygygttttttygagtttaaggtygtttttatttygatatttggtygtagaagtttagtttygggagaattygaatttaygggagtgttgyggttgtatttygg

SEQ ID NO: 6892 - DNA, 433 bp, Artificial Sequence
  Description of Artificial Sequence: Synthetic polynucleotide
yggttttttgtagtttygggygttttattttgttgaggtygttttyggttttttttgatttaggttgggygggaaaggtygggtygttttygtttggtttagatygttggtttattyggygggygygygtagttgtatttagygtagygttattggttttagtttgtagattgygtttttttttttagtattgttygtttaggtttyggagttttaygttttttgattggtyggttgttaggyggtgtgaatattgattggtygaggtaygttggtagggagtttttygtttttygyggtttatatttttttttttgaagygtttygttagagttygtttatygggttttyggtgtagtyggttygtttgtttagaatttaaattygaggtatgayggtgtttgtaagagagaagttattatttatttygygg

SEQ ID NO: 6893 - DNA, 896 bp, Artificial Sequence
  Description of Artificial Sequence: Synthetic polynucleotide
yggttttatattttggygggyggygtayggagygtttyggttttyggtattagttagygtyggagtgggtaggattggagatggtagttttyggtttaggggaagygggattttayggaagggttgggaagagggtaggaagagggggygggggygggaattgtttygttttttttttttttgtttatttttattggttaagggttttttggttttaatttatttttygtttttagggygtygtttaaagtgtgyggagtaggtgttttgggtggagttataattttgygygagtgttttggttgagygtagygtttatttattgttygygagygtttatttatttgttyggtygattgtttagygaaaggggttttaggtygggygtagtygttattygggggatygaggttaggagaggggttaagagygyggttgatttttgygggtyggggtaggggayggtggtygyggttatgtagttttgtgttagggygtgggggttgygtttgggtygyggggtygggggyggtygtygtttggttgggggatyggggtygtgttgggygtygyggagtygggatagtagtagtggyggyggggatagygtygyggttggggtttygygttttttggagygttttttgtttagataygaygatttygttyggaggtatatyggttttggggataaagattagagagagatgttgtagattttggggttggyggtaaggatttttattyggtttttygyggtttttttttygttttgttygggttttgtttgygyggtttttyggtttttattttgagttttgttgygtttygygtggttttygtattttgggtttygggtygtggygtggaagtaaattygtgtttttggttttygt

SEQ ID NO: 6894 - DNA, 1494 bp, Artificial Sequence
  Description of Artificial Sequence: Synthetic polynucleotide
ygagyggtttaggagygagtttaaaatttygtataggtttgttyggtygygttttttgattggttaaggygygttygtygtttygtyggtygtaggygttayggtagttttagtagtttgggtttygttatygttttygyggtagtttyggtyggygtaagtgyggygygygttgggggagggggygyggyggagygttaggttggygtygggttatygygggattaagttttttagttaygygtgagtgtttgtgygttttgattygaagtttttygtygggtygttattttagaagagaagatagtgagygtgggygaggygaggtatttagaggtttyggygatttttgttttttagtttttygttttttygygtygyggttttgggygggygtygygagtygggtaagyggygtttgagtttyggtttagaggtygaggygygttttygygttttgygygygygtyggyggggaaggtgygygggygttttgggttyggygtttgggggtgggggtgggggyggggatgggggtgggggtgggggtgggggtaggggtggyggygggtygtggggyggtggggyggtgygtttgttttatttygygyggttyggygtttygyggaagtygttgttgtggtttttttaaaaggatggggtttagaagttttttttgttattygtaagtttttattttttttagtttygyggtggataattttagattttttagtattttygttattttttttttttgttttygttgattaagaggtttaaaagtttttttttttttttgatttagaggggtatagttttggtgtyggggggttgggggtggggtgttagtttgggggttyggagygtagattaggtttttagggygygggagtttgttgtttttttttgtaggggtygttttyggaygttttattygtygttaygtggtttygggatgtgygggttgyggtagagagtgggtagtaatgtttttggttttgygttttygttttagtygyggggatttygaggygagtygttaattggtatyggtgtttygttttttatttttggtatyggygtttttttaatygtygttttygttggtgggagtaygttggttttgttttttttttagtttttttatttttygygttgatgggygtttttgtttgygatttggtagttttaggatgtyggatgttattagggaagygatgtttgggagaygttttgtgttttgyggagttgygygtttgttgggtggtgatggtgtatatttttgtttgygttttttgtagaggtataaaggttgggttatttttgtttgtagttatatggaaattaagyggagattgygggggaggagaagtggttaggygtyggygggaggtagaggtygtttygtagttattgggggygagtgggggtttttggagatttttattgygyggtgyggtttttgaggtgtttygtttgggaagatttygg

SEQ ID NO: 6895 - DNA, 828 bp, Artificial Sequence
  Description of Artificial Sequence: Synthetic polynucleotide
yggaggttaygagttattagttyggayggtgaaatttattttttttttgygttttaygttyggatgggagaattttagttttttayggygtatyggggaataattttagagtagtaygygagtagagtttttagygtttttaygtttaygtttaygattttttttttaatygygyggtataaggaggtatttaygyggagttaatttgatagttttygtyggggtggaaattygyggttttttygtatyggtatttyggatataggtttygygtaggygygtagtttyggatttygtttttgtttttgtttttgtttttattttttttgggtattatyggatagtgttttgattygtagtttaatygtyggggtgtygattygyggggatttatttttttgttttttttttygyggyggyggyggygttagttygttttygattygagygtggygttttygygttggtygttyggttygggaaattgttaaattggtygttattatttaygygtttgtyggggaagggttygtyggygtygygttttygaggtttttgyggygaatygygttaygygygatttttggtygggggygggaggyggyggyggyggtaggagaagtttaaggttygagyggttygtagtttttaygtttgtatttttttattttygttagttygatggttygtttygyggygtgtattggagtaagtaggtttygtttygagygygygygttttgggaagtgttgtaagtttggagatttggagtgagtttygggygttgttggttygattgttygyggtgttttttyggtgaggtygygg

SEQ ID NO: 6896 - DNA, 2705 bp, Artificial Sequence
  Description of Artificial Sequence: Synthetic polynucleotide
yggggttgttygtttatttaaatatttttygttttagtaaaggttgagattygttagttttgttyggtttgattagggygtttttttttygtygggtggtttgggyggtttygggttyggygttttttatttygttggtttttttaygttygtygggttttttaggagtgtattagtatygagtgtaaggagtygtttttgttttyggtygaggtaggggttgtgggttttagtagagaggtaaygggygaggtygyggtygyggagtatayggtggatggygtyggaggttgttgygaagtygyggggatagtgagtttyggttgtagygyggataygggyggtagygtaggygtgggtttgatgggtatyggtatggtaggtaggttttggtttgtygagtggtatagggatttgatygggatttygaaggttttatatttygggtttatagggatttyggttgyggttgyggyggtygyggyggyggttatygaatttatgaygttaaygtgyggttatayggagttgaygaygttgttaagttggtygggtayggggtagtttaggtggtgtatgayggaygttaagggtagttttttagtttgtagtaygtttttgtagtttyggttaataatgtttttaatggtaaaggggtgtttgaagtttgaygtggaygttgyggtygyggyggtagyggyggyggtygagtttagttygtagggtgggaattgagataggygttttaygttgtttatygyggttgtygyggtygtygtygtygtygtygttayggtygtygttttttgtattttgtyggggtgagayggttgttgaggttgygattgttggggyggttgttgygggggttgtgaygggaggtgyggaggyggttgyggagtagtaggyggttgttgatggaaatagtgtattatgtgyggyggyggygggggyggyggyggyggyggttggggtgggtggtggtgatggtggtggtgtgyggtagygtggtgatgatggtggtggtgggggtggtggtggtgatgggggtgaaggtgttttttyggatyggygttyggygygtttttggtgtttttygygtgtaagtgagtatggtyggygygtagtattttgaagygtttgygaygtygtaggaagttgtygttttygaatatgttttygtagtyggggtgtagygtttagaagttatttttgttaggttggtygggttttygyggaattttgatgaagtagtygttgaaggagaggttgtggygtaggttgttttgttagygttgtgtgtgttygyggtagtaggggaagygttttatgatgaatttgtagatgtygtttagyggtagtattttttyggtygagtgttggattgttatggyggttagygagatgtaagagtagggyggtttttggtygttgtaygagttttttttyggtygyggtatygttttyggtttttttatygtttttyggttygtattggattatagaattttttygtatttygtttttggggtttggttgtttttattaatttttattyggtttttttagtttygttattttgttttttygttttttaggttttttttgttttttttttttgtttttttygaattgtttggtgttttygattttggtttttygggtttatttagttttyggaagttggtaatttttggtttygayggttgtygattggygygtatagtygygggyggagtgtattaggtttatygtygttttttttgygttttttttygggtggttaaagattgagtgttggagttggttgtagaggagagtggtaaggggtygtgttttttttyggtttttttgttttttttaggttygagggaaatttagattaagatggttgggaggaaggtttgggtagtagagattttggttttttaaatttgagtttgygtttgttgttttggaggttagtgatagtaggatttttagtgttttggaygtaggtttttggttaggtatttagttagatygygttggagtttttttttttttggagtgaaaaattagggtaaggagagagaagattggtttttagggygtttttttttttttygaggttygtagygtygtyggggttagaagagaygygtagttttaggttgtygttgaggagaaaaaattttggtggtttttgaagyggtagygttygtaggttttgttgaggagtgtggggygtaggattttgggagygagyggygggttggagagggygtttgygaatgttgggtgagtgttggtyggggaggtttagtygttygygtygtagttgtygtttttttttygggtttgttttgaggaggagaggygayggtagtggtagygaygygtttttttggttgygttttgtaatggttttygagaygtygagattttygtagttagygtttygagattattatatgatygaggttgagggatttagtygtygtygtygygtttgtagttgaagaaggggtaagaaggygtygtgtttygttttygtttttttttttatttygtttygggygttttttatttatygygtttattattygttyggtagtttttagttatttttyggtgyggygggtggygtaggttgttygtygggagggggtatagtttygggtgtatttttygtagttgygttttattygggttattaagtaygg

SEQ ID NO: 6897 - DNA, 704 bp, Artificial Sequence
  Description of Artificial Sequence: Synthetic polynucleotide
yggtaggggtygtggaagggtagygttagttaggygttatgtagttygygtatgaagtttagtattttttgggagttgtygtyggttgataygaagattatttygaagggygygggtygtygygtttyggttattagygtygtatagaagtygtagagtagyggygtgaagtygyggttyggygygtatygggtygtygygaagtatagtgttattattttgttttgtagygtygtttyggtttttatygtygygtttttataggttattaggtgtygttygtttagaatgttaattatggygtagataygtagttatttgagattygaggatatttgtaggaggatgattatttgyggggaggyggyggygagygtygyggtgtttygtttttgttygtattatygggygttggattttttaagatttgttttagatgygtttatattttggttaggtttygtttgtggttggagtaattgtgttygygtygataatgagatatttagatattagagattttagatatttgggygatagygyggtattygtttttgggagyggggttagttaggtaattttaagtttttaggtttttgtatttttttttaattgygtttygtttatatttttgygtttttttattattgygtttygtttatatttttygtaagttttttaattgygtttygtttatatttygt

SEQ ID NO: 6898 - DNA, 950 bp, Artificial Sequence
  Description of Artificial Sequence: Synthetic polynucleotide
ygtgtaattttaagtagyggtttttygggtyggggttgygyggtygtygttgtgttggtttttaayggtgggagggtattatttttttgttttgttttygttttttagaaggttgtttyggggtttttatttttygtttygtttyggggatagtggttygtttgttatgygyggtagttygygtyggggtyggtattagtagygttygggyggatgtagygagtttayggaggggtatgtttttaygtattaagtataatygttttaggaatgattyggtgatatyggtygatgattttttttatagtttgtyggtgagyggyggyggaggtaaggtttyggyggygygygygatttyggyggyggttttttatttggtgttyggygaggygttgygtaaggygttygaygatgggttyggtagtttgggttatttgttttataaggtgttttatttgaaattttttagttygggttttygyggtttgtygtyggtygttygggagygggygggygygyggttttygggtagttgtagygygtttagtttggtygtttyggayggtagtgygttttyggygtttygygtttyggttatgagygtygttaggaagggtyggttyggygaygagtygttgtttaggttttttyggggggygtygtaygttagygattaggtgttggggttyggagttatttaygtggttaaggtgggtgygggygygggtygttttgggggttgggggttttggggttagttyggggtagatttttttattttttgaagttyggggtgyggggygttttygygattgttaygttagaggtaagtaaatgygtattttttagtaattagttygtttgatagyggtgaggagggaattataaatgygtttttttygtatttattgggaaaaggtttattattygggtggttygtttygtttygg

SEQ ID NO: 6899 - DNA, 4861 bp, Artificial Sequence
  Description of Artificial Sequence: Synthetic polynucleotide
ygyggtttttgtttttttttttttygattttttyggggttatttaaaagtygattaagtygtyggttttttagttgtttttatttttttatygttttttttttttgtttygtttgtttttgtgtttttygttaygttatagttygttggtttttaygttttttttggtttttttgygtatatttyggtggygtttttggtgtttttatattattgtttggaattttgtttggtttaygtygtttgtttttgtttttttttttatttgtgtygtttgattttttygattttygtttttgggggttttgtttttygaatttttyggttttttttttttagggygtgygtttygtttagtttttttyggtttyggtyggtyggttttttttaygtggtttttttttttttggtttttttttygttttttttttttttgggttttttttttyggtttagtttaggggttgggggtggyggygyggggyggggyggggyggggyggtgaygyggggttggtygggtaagaggygyggyggygtggggagggggygtagtttygggttygatyggtygagtttygygygtttygttygygttttgygttttygttyggtyggtyggygggggagggggtatgagtyggygttygygygtygtttygagttgygggtyggtttagagtttygygygggtttygygtyggagttaagtygtygtygtygtygtygttaaatygygggygtagtagtgggygtygygatgtagyggtygggggagtygggygtygygygtttyggttygttygagggttgygyggattatyggtygtatygttatygtagttttatgattgaggagatttttayggagttattygggtttaagggygtygygttygtagtygtygttgtygyggygggygagttgttgaagttyggygtgtaggygttgttggyggygyggtttttttatagttatttgggtaygtgtggyggtygyggggtygygggtygggtttggygggagatagygagttgaatygygggggygtttygagtttttttyggtatygaagtagtttygggaagttgttttgggagygtaggttttgggatygtttttyggagttttttaggygggaggyggagggtgtaagttttaggttttatagaaattaggtttygtgttygygggtygttyggggagggtgttygtttttttttttattgttttttttyggtttttagttyggggatttygagtgagtatttttagtgtaggygtattgttaggttayggattttygtgggtggaagygattttaggttaygggygtttgggtttygtygtagagggatggtygggagtggtygyggttgtttaatttagggaagtyggatttttggggaggaggtttgygttttygagggttgggtgttgaygygggtttaagtyggttyggagttttygggagttttagygggygaggaaygyggttttggtygtagtgyggatttgtttyggttttgttttggggttagaggtttgattgtgagtagttgtttggttgttttttttggttttaggtyggttgggtttttgtagggtttgaayggtttgygtagatttttttagtttttgtttttttttttaatttggyggggtttgttttgttttgatggtgttgtttttatygtattttattttygttttgtttttttttatttygttttttaatygtttgtyggtyggtttttttygttttttttattggggtyggtttgttttttattttttattttttttttaygggttttttgttttatatttatttgygttttgttttgtttttttygattttagttaggttaggattygtattttagtgataggtttgtyggggaagggaggtttttaygttgtagtygggattttagttttttaagtygttttttttgtatttttttattttttagtyggtgttttttagtttggagayggtagggttagygygttttttttaagtttagttgggattyggttattyggttatttttygtttttatttgttttgttgttattaattygtttgaagygggtatataattattttaggattgaagaaaatggaaatatttgtatggggaagygtttgaaaatagaaaaygtgaataataatttttaggtttttagggtattttggaattttygggaagtatttaatttyggtttagatgatttttggttatygtatggttgttgtgttaygtayggaagagtaaatgtgtaygtttygtgtatgttttttttttaaygtagtaaggttgatttggttggagtaaaygttatttttttaggattagttgtygttttttttttggtttttatttttttygaaagataagatatatttygagtttttygtagttgtaaatatgtttattaggaatttygagattttagaggtagttgaggtttggggaattttaggatagaatayggatagggtygaggagatatttttttttaaatttggggaayggtaaygttgaggagggtttttatttgygttatyggygtygatyggtagggygtggaggttttgygttgggaggtattggttaagygygagtattttygyggtaygtggtgyggtagtttttggggtagaggagygyggtygtagtttattygggtttttatttttttttttygtagtygtgttgaaggtygagtaggyggyggtgtttaagtttttattggygtygttgggttgtttagggttgagttttgygttgttggyggtagggttygggttgttyggygtygygggtgygttatatttgtygttygagttgtagtttygygggaagttggaggyggtaggttttggggagttaggtattaaagttaagaaggggygtyggagtygtattgtgtttatygagttgtagttgatgggtttggagaaaygtttygagaagtagaagtatttttttaygtyggataggtagggyggtataaggttggggttagygggttgtgggagtgtggttatttgttttgttgagggtgygttttgttttttttagaatagattttgttgagtttttgggtttgagttagttgtaggtgaagaygtggtattagaatyggaggatgaagtggaagaaaatagtgagtgtgtttggtggttttttattttttagttttttgggttatgtttyggtgtatgtagagttgtttttttttttttttttattgagattttgtttaatttttygattttttyggtgtttggtaygtatyggaatttttttagttttttttgttttttgggtaagttaatatttygttttttttygyggtatttttaggttttttggtagttttatgttttttaggtygggtygttttttaggyggtatttggataaatggtygttatttttygggatatttttttattatttttttatatggattttgtattttttagttttatttgggtttaagttttttygggggtttttagtttaygtgttggtttatttaggtgttggyggtttttygtgtaggtgttgtagggyggyggtttggagttttttattaagtttaaggggyggtttaagaagaatttaattttaaygagygagtagtttattgagtaggagygygttaaggatgtagagaaatyggyggaggtgtygggygagtttagygataggagtygygaggattgagggyggtatayggtgyggggtttgggatgttygygttattygtagtttttttattyggyggaaattygygagtyggttttttygygtttaagaagtttattttttaagtttttttattatgattttgaatgyggataattggggttaaaygaggaaggatatagatttaaaagttagatttaggttttagygygtttttgggttttaatttgggagattygtatttagttyggyggaagttatagtttttattttgagtttygtggygtagagygttttaygygtatttaygtttygtttttygtttgtatttttatttygtttggggtttgttttttyggtyggggagtttttaggtatatattygtttttggaygtyggggatttagyggttgggtttaggttataayggtttgagattgtttyggggtaattygtyggttyggtttggaggtygggttttygatgtygttggggtttttatttttttttgygaagayggtgattttttttttaataaaatattttatgatataatygggttyggtggagtagtttttgaattygtagggggtgagggtgggggtgggggtgggttyggtaagataagyggaaygygggtagttgttttttaaattttttttttttyggttttgtygaaggtagttgtgttttttattattaagttygggttaggtayggygggyggttyggtggttgtaggattttaggaatygtttttattttgggygtgaggggttagtttgaattttatttttttttttttgttagttagagagtygttggtaggagyggtttggtygtatygygggtgtttaaaggagygggagttagaggttygtygtagagttygtttyggaagtggttyggatagagagtygtttyggttgttgtttyggttttttgggatttgaaggattagttygtgyggtttttgagatggtttttattaattttttatgaggyggatgggaagtygaggaygtaaggtttggatagagtttttttattagygyggtagttygttygygggtttttgtagtagtaatggttttttagagtttttatatttttygtaggatatttagggyggyggygt

SEQ ID NO: 6900 - DNA, 999 bp, Artificial Sequence
  Description of Artificial Sequence: Synthetic polynucleotide
ygttgggagtyggggygygtttttgtttttygygttaggagaattattttygttttyggagggagttygttttygtgagggtygtttttagtttyggttygtygtttgaagatagtagtttygggaatygygaygatagtatygaattggagattaggaagttttggtggaaaaggttaaggagtggtgtgtaygyggagttygggattygggyggggatagagygggagygygggygtagttygttagygtyggyggtagagttttagttagaggttgygaggggtttaataggtygttaaaggtgtttttggttagagatgttatagygygtatttaggtaggaggtataggggattttttataggggttgygggagttggygttttttygttttaggtygggagttgagaggggttttagygtttaggtygattgygttttgatygggagttattgygtttagygtagttygagggygttgagttyggaggatgyggygyggggygggggtttygggagtaatagagattgggattygagggttyggttygygttgttgtttaygtagygtttttattttggaaagagtgtttttygygyggygggtyggtttttttagygygtatttggggttgtttttgtagggttattttygtttttagggaggtttaygttygtyggygaggaaggatggtgagttttggtttagygggaaggttggaggaaygtaggttyggaggaaaaagttttttagatttgggttattaaygaaggtttttatagggattattaggatygggaygtygtgggtagaggygttatgttttttgygttatttttttggggatygygygttagttygtggtgtagggtygagttttggggttgtgagygygygtttygttttygtgygttggtggaaagyggggtgttygtgygtgygtttgygagygtgtgtyggttgtaatygtagggagygtaaataggtygttaygt

SEQ ID NO: 6901 - DNA, 1750 bp, Artificial Sequence
  Description of Artificial Sequence: Synthetic polynucleotide
ygygtaygtattttagaggttatttagattatgtttygtygtttgggygtttaagttgtagtygttttttgtgtgtaggtagtagttgtttggtaattttygagttygttygygtttttagtatygtagaattagggttaggtgttttagtggttgtagttaagttaggtattttgtttagyggyggttgtataggagtagaatygagaattygtygtttaattttatayggggtgattgtygagtgtttatgttagyggttttaattttttttaggtggaggagtgggygggaggtaygatttgggggtttttaggttgggygygttggygatttygaggtygattaggttatgtatttttagttygtttgggtatttaagttgtagtygttttttgtgtgtaggtagtagtttttaggtaattttygagttygttygtattttttatattttagaattagggttagatgtttttgtggttgyggttaagttaggyggtttgttttgtagtagttgtataggggygggaatyggtttttagttttattttyggtggttgtagagggtttttggttagaggtttygagttttggtagaggaggagtygggtgggggtagggtttggygggtttttaggttaggggtattygygatttagaggtygtttaggttatgttttattatttgggygtttagttataggygttaggtaatttttaagttggttggygygtttagtttygtagaatyggggttagatgtygttgtggttgyggttaagttaggyggtttgttygyggyggttgtatyggggtaggaatygatttttagttttattttyggtggttgyggagagtttttgttagyggttttattttttttyggaggaggagaggagygggagttayggttaggygggtttttaggygggaagggatgygygtttgygatttygggatgttttgygygagtttaggagaattygtaagttagyggygtttgygttygagttgtagtygttttttgtygtttaygygagttygagagyggttttyggagttygggttagygtygagttgtaggygygygtttaatygttttgttgggtttaygyggtttgagaggtyggagygtttaattgttggtaygygagtaayggtttagttaagtttattyggtttgagaggtyggaggttgygagtgtygttgttgaaggttgtggtggatygggttggatygyggattttgagttatatygyggggttgggggtggattttgggtttgggggtggattgttggtttggtggtggattttggatttaggggtggatagyggggtggggagggggatygyggatttggaatttggtyggggtggaaaggttaygaggagtygyggyggtttagtagygggtggttggygtttgagaagtygttattatgaggaaattttttagtttygggagaygtttgggttaggygtttttgagttttatggattaagagtaygygggtygggggtattatatyggggattgggaattgyggaagatttatagggtggttattaagggygaygtygyggaggtggagygttgtttgattygtaggtttygggatttggatgttygygatagaaaggataggtagygggggtttagttygyggtgggagggggtttttaggttttgtttgttygtagygtttgaggygggggttttggaggtygtygggttttggagtygyga

SEQ ID NO: 6902 - DNA, 391 bp, Artificial Sequence
  Description of Artificial Sequence: Synthetic polynucleotide
yggtgttggagygaggatgygtagatygaggtagggaggygggggtgygggaggtttygyggttgygygggygygtgttggtggtttyggyggaggtttagtttyggttygygttygyggygttttygttgyggttygagyggtttggttgygggatttgtgygtayggatggygyggtygtttyggtagtattygggggtttgggygtygttgtttttgttgttattgayggggttygtygtttgygtagttagtttygyggaygayggtgygggttyggggggtyggggatttyggggaygygygyggggggataygggygtygaygaggyggtgtygygttaygattttttttayggtattttygygggggagttttaygatttgygt

SEQ ID NO: 6903 - DNA, 817 bp, Artificial Sequence
  Description of Artificial Sequence: Synthetic polynucleotide
ygygygtygtttttttyggagttttygagttgttgaggagtttggattgtgtttgtttttagtgttagatgaaagggygttgaggtttttggtygttgtttygygtttagtttygygtaygtttttttgygagttyggtygtttagygttttttttygttygagtygtygtttgygtttyggggtagtygttttgtttttagygygatgtggtttygtttggttttttgttgttggggtttggygttygtttygggttgggygattttttagtagatgttttygtygygtaattttagttttygtttttttttygagatygygttyggggttttygggagtattttygygtygttygtttttggygaygaagyggyggggagtagagtggagyggttgggttaggygtttyggygaygygtgyggttgttgygggagtttagygagygtttggagtttgtttttttggtggatgattygtttagygtgggygaagttaattttygtagygagtttatgttygttygtaagttgttgttygattttttygtggtgtttayggttaygygygtggttatygtgattttttygtttaagaattaygtggtgtygygygtygattatatttttattygtygygygygttagtataagtgygygttgtttttttaagagatttttgttattttttatygaggtggyggtatttatattaagggygttttttagtaagtygyggtaaggygttygtttttttygattygggttttagttttygggtttttygatttatygttgtttgttygtttttatttygg

SEQ ID NO: 6904 - DNA, 814 bp, Artificial Sequence
  Description of Artificial Sequence: Synthetic polynucleotide
yggagtaygggttaygtgttttaggtttygggaattagtttttattggtygagggttygyggggtygttaggagggttttttaggttttttttagggatggagtagttaygtttttygagtgtgtttattttatygatggagtaaagtgaggtttttagttygttyggatgtttttgygtygttygyggggtagttttygtatagataygttygtaagttttygattygttygttattygygtttagatattygygagtttttggggtygtagggayggtgtagygttygtygaggygtttttatttatttgtgattattgtyggagatttttggttttttttygttygtagttatatttgtagygtgaaygygtttyggggtagttygaggtyggttyggaggygtagttgttygtttygttygttgaaatagagygttyggttyggygggttyggtttttyggtggygtttttygtttttygttgttgtygtygtygggggaygygtayggttttttaggtatygttyggyggyggyggyggyggyggygaggygyggyggtygygggtygttygggtggygtaggtggtygggtyggyggyggggygygggggtyggtyggttygygggttttttygggttyggyggggaygttyggttagttygtagtttagygyggygtttagtagttttaggtgtagtatttaattttagagtygtatgttygayggtttttttygtttttttttygtttttgtatygttattyggagttgttagttttgggagtttyggygtttygatttttttygt

SEQ ID NO: 6905 - DNA, 1429 bp, Artificial Sequence
  Description of Artificial Sequence: Synthetic polynucleotide
ygygagggaaggattattaaatttaaagaygygygtgttygtgtgtttatatagaygtgtgtttyggygtttgtatayggtyggygygtaggtatgyggaygtttataygaatatataggtatgttttattgaygtatttggggtatttttttttaaagaaagtaaggaatgaaaatttaatttgagagttattagggtttatttggaggtygtttaaggggtagaaaaaatttgtaatgaygttagagtgtttgtttttggtgtaattttattttygggagggttggatataataygtttggaaagttygaggggttgttttaggatttgggggyggggggtggggtatttagtaatttttgtygygggttgtttaagaaaygtggaaatatattttgygattttttatttttttatatatataggtaygygatttygtygttatttttyggattagtagtttaygtttaaygttgggtygattttagatatataggtagtygggattttygttyggtgygtttgtttatttatttttttgygttaggttgggaygygtttygtttgtaaaaggtttaaaygtatttttygtygyggggygggatttaggggtttaggtttyggggtttagaggygggtaattttgttaattttttttagyggyggggaaygtygygtaatygttgagttttgttygtygagattaaataagtagaggaataggttgtaaatatatattttgataygtgagtgatatttaygyggtgygagaagttgtagttaagggaaaggtaaggggtggggggagygggtatygataggtayggaattttygtaggygtyggaaayggyggtttttygattttttttttttttagaaagtggtaaygaatgtttaagtttttygaatttgttttttgtgggaggtgataggtgaayggaatttaggtttggttattttygtygttgtttatttttttattatttgttttttygtagataagtagattyggygtataatgaggtagtagtttttagtyggttatygtgattaatttagaataaaagygttttttttaygttttttttaataaaggggttattagtttyggygtttttygaaggttgyggggttttyggttgtyggttgyggagttgtygygygtaaatttttyggggttttyggggttgtyggygttayggagtyggggtygyggagggaggaagygtaagtygttyggagaaagtgaggttagattyggygggggagaggggagggagtygggyggtygyggaaggagggtgattgattagtgygyggtgttyggygttttgtttygttattagaggyggttaaagtagggttaygtaataattttagaatygttaattaattgaygttgtaggtaattattttattgtgygygt

SEQ ID NO: 6906 - DNA, 7708 bp, Artificial Sequence
  Description of Artificial Sequence: Synthetic polynucleotide
yggaggggaaagygagtttyggaaataggygtagtttgtggygagggttyggtggtygagttgaatttyggggtttygggagattyggtttttgygggggaggtttttttygaagtygttattggygggggagtagagaaaaggggaaagaaggggagtggagaaaaagggaaaggagtyggttttaagtagygaggtygaggtyggttagaggtaagggtagggggyggyggygggggaggtagtygtggggtttaggtttggtyggygtttygaatttttttattttygtttttagtgttygggggygggtygagattttttaggatyggattyggggaggagygaggggtygaggggagggggaggattygggttttttttttttttttttttttttttttttttaattaggtygatttaatggagttaaagagttygtaaaattatgaataatttattygtgatttgttattaatttatygggtttygagtttttgtygttgggattgaatttgtaattaaatttgatttygttttattttattaaagaygagattgtaggtttaattgtttaaataatggattggaattaaattagtaattaygtygttaggtatatatatataaaaagttggggttgggggaggtygggygttyggtyggttygygygggattttygyggtygyggygygtaaatttaggygtaaagtgygyggttygggtttttygttygtttttgtygtygttttygtatttttagttygttggtagtttttttyggggtagggggaggttttygttttatyggggttygggttygaggggttgygggaagaggtygttgyggtttygtttyggaaggatttttygatttygyggttygyggttttgttgtaagtttagygttyggygtttygayggygttttttttttattyggtttttagttygtygttttttagtaaggtgtygtygygtttyggagggattgtttttagagtaagaggttttgtaaggggtygtygtggttgggttataggatgtgggatattgttataaataagttygtgttttygtggtyggaattttgtaygtataygtataygattygygttygtatatttygttygygatygtattttttagggttttygttttttagttttagttgtttygyggtttatattgyggttattttttttttgttagtgygggaggggagggaagggyggaygttagatttaggaagattgggttgggtttygagaggtyggggagatgttttttttttttaatttagtttygggagtttygaaagagttagtygtatagttatygtyggygtatygaaygtygttttttttaggattaggagtttyggttaaggtyggagaggagggtaygggaataaataygatatatatagagatagagatagagagaaaggayggagagaayggaaaggaaaaaaagagagagggaggttagagagaaagtgagatggttgaatggagggtgttttttgtagaggttaaataaggtttgaaatttagtttttagtttatttygttggggtaaayggyggttgaatagtaaaaagtagaaataaatttttgtattttttattttttttttgtataattttaaaatyggygtygaattttygtgtttaggaaaataatatagttttttagttattaggtgttttggagtygagtttygygaggtgttttygagtggaagttgatttatttgataaatagaagyggtttggtgttgggggagtyggtttgaattyggttttgtttttttttggggggtggtaggagaggagggatggaagttttagagagttatatttgtggtagtgtttttagtaaattttaaattygygttatygatyggtttatygttgttttattatttattaaattgggggttgygttttttttttagtttygtatatagggatataygttttatgattttttaagygatttygttggagygaatattygttttttatttttttttttatttaatttagattttttaagatgaaaataattgattttttttygtygtagtattttttgtatagttttgggtttgtttttgtttttgtttttttttgtttgtgtattagattaaagggaaaaggaagaagaatataaaatttttaaatttaattttgttgtaaaygaaagaaagaaaataattgtatataaattttagttyggaagttyggagagttataaattttttygggttttgtagatttygggtagatgttgayggtttatttgtyggaatttagaatttttgtagttgttttgagtagggaggggygygggagggggtagagttttttygggaatggtttggggtttaaagatgtyggaaattygaattaagttttttattttattttattttattttattttggygygaggttaggtttgtttyggtttygttttygttyggggggttygttttygagggttayggtttttattttagtaggygttaggaaattyggaggaaaaagttygggaaaattgagatttgtttttaaaggaggatygggtygagtaaaaggaatygtagtttttgtttttttgagttttttaagttygagttttttaagtttgtygtttttgggatattttaygaggttaggtygtattttaggtygagttyggygtttygggttatagttagtttttttttttgggattttygtygttttgtttygttttttygttgttttagttttyggtttttagtygygttaatttaaaatttgtttggygttagygtygttttgttttttttatttttgttattttttgtttagtaaagtggggtaaaggtttaaattaaaaagttatttttaaaaaaataatttattagagataaggttttgtattyggagtagtaagggattattgtatttttttttttygttttagtygaggaygtatagtttggaagtttagggggttaatgttttttttgygaggtygttyggtgtttaaggttygttatttgtttagtatatagagatttaatttagttttyggtygtygaggtygtatatttttttttaattttatgggggygtttygtgygtygygtatttattagygttgtaggtygttagattygtatyggggttygggtttttaygttttttyggtygttttttttgtatagtgtttaygttattgtagtagggaagatttagagggttggtttttgttgygtttagtttygygtttttggtygtygyggttgtagyggtygtygttgttaygtyggtatggttgaagtgtgyggggtattygttttgtagtagygtttygaagtgtaagyggtagtagattaggttgttttttatgtygaagtggtygttygtggttagtattttgttataygtggtgtaygtgaagtagttgaggtgataaattaagtttygagygygtattattattttygaggtygagatgtttaggtggtagygggygtagygttgtatagagaagygtttgtagggattatggagggaggggttgtgggaatatayggttgggtattttttttttttttttttaggtgtygttgttgttgyggggggtaattttttttttaagaygaataattyggtttttatttggaggatgggggggagagagaattagattttgatttaggtttggttttgttttaaaatagttttttttaatatatttatgtttatagagatttttattttatttagagttttygtaagttttaggaaagtttttatttgggagtggagggagatatttattatttattttttttttaatttttatttttttttttaaattagygtttgggaattttattgatttttataatttggaagaaatatagagatagggaaagagagagagatatagaygtagagatagagatagagagaatatatatagattttaattttaaaattggggagaaggagaaatagagaatttggagtttattagtgattttggttttttgattttggttattttttatttttatttttttaaaagatttggaaatgtatttatttttatagttttttttttagttgtgttttattttagtttgggttgtttaggtttgggggtgtttgtttttataatttyggattaatttaagaaattttaaagagagaggggagtaaggattttaatttaagtttttttgtggtttaagtttygagtaggagggtagtttttgttttttttttggtttttttatttygtagatttttttaagagttttttaaattgttgttttaaaaggttattatttaatttgtggtggtttggagaatttggggggggagygggggagttttgagtagtgaatttttttttgggattaaayggaaaggagagggttaaattgtaagattgtgtttgagattggggggaggggttttgaggggtagttgggtgggggggttatttgtagtagttttttttgtagtagatgttatygtttttgttgaaataggtgagtttygattttaggttgagtttgtattygtagtatttgaggtagygtatgtgttattgtttgtttatygttagtaggtagtagyggttygagattttgttttygtagtyggygtatagygyggygyggttattgttgatggayggtatggtttgygaagggagggaggyggaagatagtagygtttgygttagttagyggttttttygtygtygggaaatyggtatttataattttttttgtggttttggttattttgaaygyggagggggttgttaggatatgyggygygtttttttttattttaaaaggtttatttttatttttgggyggtttagaatttaggtttgtttgygtagttttygttagttaygggtttaggtygggtttttggtttaaatggttttggtgtttattttttttttttttagttttttttgtttttttttttaaaatgttygggttgtgtttagggattaggatagttattttagttaagttttttaagagttttttttaaattgttttttaaatgagttattygggggataaggtgattattaagttattttttatatagaattttttttggagagatagyggagtttttgggttttagttttagtgatttttggatttttagattagaggttaaggttaggataagttagttaatttttggtttttttgttataygggttggggtttttttgggttyggggatgaggtaagtggggtgtagggatatttttaaagttygtgggtgaaggataggtttaatttaaatatttttttatttaaattgattagtagagaaggtttaatygaagaagygtttagaggtygggaggatattggygtygttgtttttgttttyggagtagagaagtttttttygtgttttttattttygyggttttttaaaggttatttttgggttygttggtygggtagtgtttgttygtttggtttttagggaggtttgaggygaggaattggttatttggggttgggttygyggagttaggtgtagagatttaaatggagtttttttyggygagggttaggtyggagtttgaatttttagttttggtttggttaagtttgattagttaagggtttggggaygygattaaygataaatgttggtttygaagatttyggtttttgaaattgygttgggggttgaggaggattttygattgtyggaaagttgggagyggtttaagtyggttggagttttaatgtttttagttggttygtttttttttggygtygttygyggygtygttagtaatyggagtygagaggtggaggagagygyggggttgtygatttyggtatygggtaaggtgagaagggagtygtttygggtygyggatgggatttygtttttagttyggaagaaaygtttttttttatttttagggtygagatttyggttttaattttgttttttttttgygttttagtagtygggtttttttygaatygggagttatyggttttgtattttgatygaggatttttagtatttagtttygtgyggtaygaaggaygttttttaaatttyggggagtagaggygttgattggttyggttttattttagtttttagtttygattttatagtygygygtttatygtttyggtgtygtygyggtygatggyggagttgatggygggagtttygtttttggttttgyggtttatttygtygatgatttygtgtatttyggggttygatagattgtggaatagtatygyggygggatyggyggggtygggggygyggttttttygagggagggtttgtttttygttttagttgtttggygtttttggygttaaygggttyggtgtatygttatygyggtttyggtttygttygagttyggttgagtttttaggtygggtttygggtttygggygttygyggggtaggaygtttttygtygaggygtaggggtagttatattgyggggygtttgggygayggygttaaagttagggttataagggtaygggataagyggggyggggggagtaggagattaggatagaggtyggygttygtygygggygtttttaygtygygggtatygttygttyggttttagygttyggggygtaaagtaagggygtaaattttgttygaggyggygayggttgyggtyggggtttattttgaagtygttaggtgttygyggyggtttagttgtttggattttttttttttttggggtgygtttttagtttaaggygatttttttgggygttgagtyggygattggagtaggggttttttygaagtttgygagtygagtygagttatygggagaattgaagaggaggaggaagaggaggaggaggaggyggaggaggaggtggaggaggagaaaaaagaggaggagtagagtgggaggaggagtygtyggtygygggtttagtygygygtaatgttttttaagygygygtttagtttagtttyggttttgtagttygygttagygtaagttttygygttttttttatagtygygtttgatattaygttttgtygtygtgttattggtygttyggygttttaggttttggtagygygtgtttygggaaggygggagatttaagagggaggggagaggtaagaggagtagaggagagtygagatggtgggagttggtgggygaggttggagggygggggtgggggggaggtagggaggagggagagygyggggtttggagtttttaagataygaatagttttttgygatatttttagaaaggaaaattaaattttttattttaagaaggygtagtaaggggatgttygttttattgyggttttttttyggtttggagtygyggttttaggtattygtttgggaggttygggaaggtaggtttgtggtagagttgtaagagttttyggtyggtygttttttatygagtttygttttyggttygggttttgtatagygggttgtaggyggtygtgtaagttttttgggtattyggtagagtttgagtggygagatyggygagagttgtgattttyggggaggggggttagttagtatatttaygttttaagttygttagggtttaatttgtagtttagygtgtagtttttygtttttttygg

SEQ ID NO: 6907 - DNA, 3969 bp, Artificial Sequence
  Description of Artificial Sequence: Synthetic polynucleotide
ygttttttttgygagtygygygygtttgygatgygtaggttgttttggatttttyggggattggggggatttttttgggaagttaagggggatattttaagtgtgttttgtaaatygtattttttgatgtgaaaatyggtatgygyggtgyggtygtayggggagagygygtgtttgggggtggggggtatygtttaggaaagyggagttatttygggyggaaagygattttygtagaaagygtygygygggygtygttgygtgttygtygtttatagtygtagttaaagagaygtaggyggttttaygyggtttggtttatygtygtttgtagtgttygyggygyggggygtttygaggttgggtttatygtttttttygygtttttgaagatttttygggttttttygaaggagtattgtttttttttgtattttttttttagggagttyggtygtagtttttttaggaaygygttggygygtyggygtyggtgtaggaygtygtgggtttttttttgggttaygaagattgggaaatgygagtttygtgaagygtttatygygtgtttygtttagtgtttyggagatygttttayggtttaygyggygggggtatygtaggttttygttygttttggaggaggggagyggygttgttygygggtttggttgggtgttttttttgtygtgttttygggttagttattttygtygtttatttttttyggtttggtttttttgttttygggggttgatttygagggygygttygggggtaygygyggaagtygggtygaagggggttgygggygtygtygygtaaaygtgaggttgygggtygatgtyggygaggagaaggyggygyggtttygggtgtygggtaattttttggggtttaygtgaatygygygtggaaattygtatagtygttygyggaaatttaaatttttygtttttattygtatygygttttyggyggttagattygttttttttaggttttygttttggttygaggygyggtttttgttyggttttttygatagygagtttygggttttttygttagtttttggyggttttgggtttttgtygtttttttygttttygtttggggtttttttgtttttygygatttttgagagttttagatttygygyggatttttttggggtyggttttgagagtatagtttttygtygtagtttttggttttttygtaatttygayggttatttgtggataaataggatygtygttttgtttatgggaagayggggttggtgagggttagagaygtttagggygaggtaatttygtgygtttagtttygagtaggtygttttttaggaygttttatagtygaggggatygttattygggagygtygtgagttgtgggtattaygyggtggtggagagtgattttygtttyggggyggtygtgttgttygaatttgttttagttygygaggggagaygggtttgggggtaggygggagagggaggtttygggaggaggygagyggggttgagaggaygygygggaggggttttggagaggtygtaggaggygygtttyggagggaygatttttgttgggaggaygaggttttaggtggaygttgtgggtyggtgggtaggagttygagttttgtaggagyggtttaaattggttattgagygyggaagaagggayggaaggtgagygttattgggttaygtggggtygagagaaaggttattgtttgttttttttaaaattagttttataygtygaygtttttagagaattggtttggtttggaaggaggttgaggatgtaggyggggatattaaagaatygggtttaaggaggtgggaatttayggatttygagtttttataggaggtgttttgggyggtaggagtgggaggggaggtttatgtttttgtagttttygatatttaygttttygggatatttaygattttygggatatttatattttygggatatttaygtttttyggatatttaygtttttgggatatttatatttttgggatatttaygttttygggatatttatattttygggatatttaygttttygggatatttatattttygggatattttygttttyggaatatttatattttygggatattttygttttyggaatatttatattttygggatatttattttttygggatatttatattttygggatatttaygttttygggatatttatatttttgggatatttaygttttygggatatttaygttttygggatatttaygttttygggatattttygttttyggaatatttatattttygggatattttygttttyggaatatttatattttygggatatttattttttygggatatttatattttygggatatttaygttttygggatatttatatttttgggatatttatattttygggatattttygtttttggaatatttatattttygggatatttaygattttygggatatttatattttygggatatttatatttttgggatattttygtttttggaatatttatattttygggatatttaygttttygggatatttatatttttgggatattttygttttygggatatttatattttygggatatttattttttygggatatttatattttygggatatttaygttttygggatatttaygttttygggatattttygttttygggatatttaygtttttgggatattttygttttyggaatatttatattttygggatatttattttttygggatatttatattttygggatatttatattttygggatatttatattttygggatatttatattttygggatattttygttttyggaatatttatattttygggatattttygttttyggaatatttatattttygggatatttataattttygggatatttaygttttygggatatttatattttygggatattttygttttyggaatatttatattttygggatattttygttttyggaatatttatattttygggatatttaygtttttgggatatttatattttygggatattttygttttyggaatatttatattttygggatatttttattttyggaatatttatattttygggatatttaygttttygggatatttatattttygggatattttygttttyggaatatttatattttygggatatttttattttyggaatatttatattttygggatatttaygttttygggatatttatattttygggatatttaygtttttgggatatttatatttttgggatattttygttttyggaatatttaygttttygggatatttaygttttygggatatttaygttttygggataygtatattttygggatattttygttttyggaatatttatattttygggatatttatattttygggatatttaygttttygggatatttatattttygggatatttaygttttygggatatttatattttygggatatttaygttttygggatatttaygttttygggatatttaygttttygggatatttatattttygggatattttygttttygggatatttatattttygggatatttattttttygggatatttatattttygggatattttygttttygggatatttatattttygggatatttattttttygggatatttatattttygggatatttaygttttygggatatttatattttygggatattttygttttygggatatttatattttygggatatttattttttygggatatttatattttygggatattttygttttygggatatttatattttygggatatttaygttttygggatatttatattttygggatatttaygttttygggatatttatatttttgggatatttaygttttygggatatttatattttygg

SEQ ID NO: 6908 - DNA, 2490 bp, Artificial Sequence
  Description of Artificial Sequence: Synthetic polynucleotide
ygtgaattygagtttyggttayggtygttattygtttttatttatttttaygttgtagtgygattagttattygygtggtattygttaygatttagttgggtttatagataggagttgtttttttttattgtaggygggtgatttaaggtttttattgttttatatttgtttagatygyggggtattygggtttygtagttttttggtygygttyggggttyggggagtygggttgyggttggggggtttggaggatgagggygaagattygagttggattgyggagagggtgtyggygygggtygggtttggggggaggataygatygggttttygttttyggatatygtaygygtygatatagaggggtyggttttyggttttggygyggygggttggygtagggyggggtggyggttgaggggttygggttttaggtgygtttyggagyggtttyggyggyggtgygggggggaatagggaggtaggatggggggyggggaggygggaggggggagtygaggttttygygtygttagtttygygttttygttttttygttttyggttygagyggtygttatygygggygggyggygttgygttygggtgyggtttttygtyggyggyggyggygyggtygagaggtgygggtttygygygggygggaygyggggygttgttygtaggagygattaggtgggygtygggtygatygtagtygtygtygygttttttttygygtttygggttttggtttttygygtttttttttttyggatttygttttttygttygaggtygttttttygtttygggttyggtttttyggagttygtygattttygttygaggttttttygttygaygtttyggtggtagyggyggttygggttgygtttttygttgtygtygttgttgyggttttgtttttttyggggagggggtttyggyggttttgygttttygggttttyggtttyggygtygtygtttttygttttttgyggttygggttttygtttgggttygattttgyggggtttygttttggygtttgggtttttgttyggtaggttttygygygttttttgttttygattttygggttgggygttttygtttttaggtttttttttygtgtttttgtagtttttyggtttygttttttyggggtttttttygtttyggygtttttgtttgtygtttatygttgtgtttttggttttgygttagttttttttgggtttttttttygggttttygttgttttttygagtttttgatttaattttttatttttygtttttttttttttttttttttttygtttttttttttttttttttttttttttgtttttttgtttttttttatttttttttgtgtttygttttygtygggttttttttagttgggygttttagtgtttgtgtttttggtattttyggattggtttygtgtttgygttyggtggygtyggtygttgtttttygttagagtttttttttatttttggttttttyggattttgtttttgtttttttygtttttgtygggtttttagaatattygggtygggygttttagygtttttgggttttttggygtttttttygyggttgagtttattttttttttttagaatyggggttttgtttttagataaaygaattttaatygaagygtatygaattygagggttttagatygggygygayggggttygygygggaggagtttttyggayggggygggagygtggggtttggtaggggaaggtygggygyggggattgtatyggatttatttygggaygttgygyggggygttyggtgggtgtyggyggtagygtttgggtatagagaggggattaygygaygggtyggygatagyggttggggyggyggtygyggggattttaggttgtyggttttygtyggttttttttgattygttgttttttygtaggyggaygtygygggtatggattattygtaygaygaggatttggaygagttgtgtttygtgtgyggggataaggtgttyggttattattayggattgtttaygtgtgagagttgtaaggtgagyggygagygygyggtaggggtgyggtagaygggygttgyggggtttygttgatttttagttttygtagggtttttttaagygtayggtgtagaataataagtattataygtgtatygagagttagagttgtaagatygataagaygtagygtaagygttgttttttttgtygtttttagaaatgtttgayggtggggatgygtttggaaggtgygygtygygygggtttygatttttgattttttatagtttgagggggtagggggtgggggtgggagaggggttgaggggatagtattattggttttygygaaggtttttygtgygatattagggtttagtygttgtaagagaatygggygttggygttgggtgggtttygggyggggaagggaygt

SEQ ID NO: 6909 - DNA, 5370 bp, Artificial Sequence
  Description of Artificial Sequence: Synthetic polynucleotide
yggtyggtttagygtaggatttygggataayggatggtaattgggggtygttyggaggtttttaggattttattagtgttygttgggttgggttggttygttttagttttaagaygygtagttttyggaatttttggagttgttyggtttagtygygtatagagtyggyggtagagygggygygggtygggttyggtagggggttgatygggttygagtgtygggyggtggyggggaaggaggaygagaagygtttattgttggtagttttgtttgtagtatagttttygatttyggaagtagtagttggtggtgagggtttgttgataygtygygtattgtaaatatttttygtgttaggaygattygttgattygtattaggaagyggtyggagatgggtygttggtagttttygtagayggygggatgygggtagtyggagtttgtagygtatagggygaaagttyggtygttagygtygttyggtttagtttyggygtttyggtygtatygggtttatagttttyggtttygagggttygggtygttygggattatygtttgtygtttgygtttttyggatygtygygttaggggtygggyggtttyggttagttygttttagttttygggtttyggygtggagaggtygygggtttygagttttggttyggygttgtgtttttttttttttyggagaattygygtttygtgttaagataaatgataaygagtayggygtagggtggtyggttgggattaagataggygaggtgaggttggggygttygttggttgataygttttayggtggygttygtggttttttattttygatttttttaaaatttgtggtttgagtgattagggagaygttttttttttagaattttttttattttaggtgattttgygttttttttaagttygttaaggtgattgttaggttttttattatttttgttattygttatttattatatyggagtggtagttttagaatttaagtttggaaaggatggtgggtggygattggagttgttttgtttttttaggaygtttgtyggaggygtatttgyggttttttggygattattttaggagttttgtttttgttttttttttatgttttgtaaatttattttttttattygttggttttaaygttygtgtttatagtyggaygaygttttattttaygttygagattattygggygtttygatttygtatttatttagtagtatttttagagtggygggttyggggygtagggygtgtttttttattttgatgtygtttaatattttggygtagttygtttgttygygagggaagtatttttttagygattygggatttgttgttatatttatgggaygyggggygygttgyggatttygtyggtygggttgttygttygtyggttygtttattygtttttygttgtygyggttttggaatyggggaggygyggttttygtagggtaggggttgygtyggttttyggygatygtggagyggygaygygttggtttygggtttyggygtygtgygggygggtyggggyggttgtagttygygtygygttttttyggatatttgtagttaygygygtyggtttttttgttatttgtttgttagtttyggaattyggyggyggyggttgttgtagayggagtygyggggaggaggyggyggyggyggtggyggtggyggyggyggtaggygggggagggggtgggggtgtaggggyggtttygygggtygyggggggggygygyggygtagyggggtttygggyggggygtagygggtygyggggtttygggygygtttttygygttattttagtgttatggtgygttygttgagtygtygggtttagagttggggttggyggyggagggataygggtygttttatttttygaaattttttgatatttgaatttygyggtyggtatttttgygtygggatgygtygtyggttttaygttaaatagtgtygtttygttttttygygygtttyggggtttygygtttttggttygygtttygygtygygtttggtttygagtttaggtttyggtttttyggttyggtygtttygygggtttttygtagaagttttgatygttttygaaataaatttttttgttttatttttttgaaaaattgatttgggagttggggagygaaggttttttttttttttttttgttttttttattattaatattttgtaaagttttagygttaygaggagtggtttygagygaggttagattgygyggayggtagggagygyggyggtttygttaggggayggygtyggtygggagtggtygtttgggaattttygattgtyggtygaggtaggtygygggggttgagtyggagtttttygggyggyggygtttgttyggggtygtttggttygyggagagggtyggtttttaggaaygaaggaygggggygggtagaaggygaggayggttggttttggattygtgtaaggggggtttaggtttaggaayggggagtgagtttggagtgtgggtgaggggtttgggaaagtttygggtttggtagagattgggygggggattgagtygatgggaggttggggtttygggatygagaatgggggatattgggaygataaggaaggttaggtttgggtttaggygatygagagtttagaggataattaaggttggaaaaggggttttygggtaggggtaggagtagtgggtaagattygggttttttagggtttgtagtgaggggygttaggagggagtggtggttttagggtagyggttttgaagaaattaggttggttgttaagatyggggttttttggygggtygggtgttyggttaggggtygttgggaygygyggattaaggatagtgttttagttagtttgggtaaagtggatttyggtaaygggaygygaaagttggygagatggagttgtygattttygygttagtygggtttggtattygygttyggtgygagaggttatagygtyggatyggttgtttgyggttygtggtttttatygaygygyggtttatyggggagtaggggggyggttgyggttyggggtagyggygggttgatttttygygattygttgyggggyggtttyggtttttttyggagygaggtagyggygyggagtygggygggggyggagggtatggggggygggttttttgatttygttggaggygaaagggyggatyggatttggaatttgygggaggtttggttagaagtggttttttgygtygyggggtttygyggaggggttyggttttgtggaggattagaggttttygttttattttatttgygtgtgtgtyggtgggtatttgtgtgtgtttgtgygtgtygggttttygtttttgyggtttttgttttygtgtgttttttggttttgtatatayggtatgtgtgtttttgtaattttttagatttttaggggtgaatttgtggatttgtgtttgagttttttgtattygtgtgtatgtgaatgtgtgggtttttygtgtttgtgtttggggtgtgtgttygtattattttatgygggggtttaagtttttgtgygtgttttagtttttgtgttgtgtttgygatttttttttgtatgggtgtttttgttagttttgygtatttgtgtttattttyggggttttgaatgtttttgtgtgttygygtgttttttagtgtgtgtgtgtgtgtgtgtgtttgtgtgtggtggggggttttgtgttttygtgtatttttaggygtttttgtgtggttaggtyggggagagtggatagttaatgtggagttttttttttatatttyggttttttttttgtttgatttggaaattttaggtttggattygygaagttgggttgggtttgagtygtttttttygggtatttggggygggggygyggttgttgtagggagaagtygggygggtaaggtttyggygtatagagttagagtttygaggygyggagygyggttyggggtyggygggyggattaggtattttttgttttttgttggtygyggtttatttttgtaatyggggttgggygattgtttgtaggygagagttttygttttaggtttagatttttttttttttttttagggtgtatatggtaatattttttygttataggttttgtatttttaatttttggygtaaggttttattttttttttattttttttgtgtttggttttttttattttatagtttttttttttttttttttggttgaatgagggtttttgygatttagttttttaggtttttttaattygggttggygtttagtgtygatttggggtygttggttgtgtttagaggygtatttttyggattattygaaggtttggttttaaggtaggaggatttgtgggaagtatttttttygtgtygygtttggtttgttygggtgygtatgtatttttagygtttttttygygtttttgttagttatattttaygttattaaggyggatatagggtggtttgtygttatgyggttygygtttagataggggygttggttyggtggaygttagagtttggttgttttttttggtttggggtggggttgttgagtttatattttttgggtttttttgtatgtttttttygttgtttatttattttttttatatatatatatatatatatatatatatatatatatatatatatatatatatatatatatattttttttataggtttygttttttgttttttgtttttatttttygtgtttygtgtttttagttgagttggtyggtttygggtttttygtaygtagaygygtaggggttttagatttttttagtataatyggggttttygygtttttttatygttttttttgtygaagaagygaagaagyggtygattggayggtatagtaggggtygaggtttagagtyggtttttgttygtaggyggygaayggtattttgtttygttaggtttttgygggtgtgattygtgattygtagattttttygggygtttttggtttatgaygygggggttgttygttttaygtaggyggtttygggatgttttttygtttagattttagyggtagaaatagtttyggattttttttatttgggggaaagattgagtygggggttyggaattattggaagaagygagaatggaaagggaggttttggagygggggtttyggttttttttagtttgyggaygttttagttttattgagtttygttttagttttttygtttttttttttagggttttgtatttttttttttgygttattygtttttttygagtaygg

SEQ ID NO: 6910 - DNA, 3120 bp, Artificial Sequence
  Description of Artificial Sequence: Synthetic polynucleotide
yggayggatyggyggaygttgygggttyggtygggttgataggaattatttgygttgttttaggtygtttttyggtttattgtttttttgaattyggtyggttttygygggtygtttgatgtttgtagggttatagattttygtatataaattatygtygyggggttgggggtggggyggaggygttgaaatttaattygtagagtttgtttygtygtygtttttttgttttttttttygttygttygaygttttttatttatttttttttaaataaggtttattttttttgttaaaaaaataaagttggtattaagtgtttygagggagaaagttttttttttatttttgatttggaaggaagggtyggttgtygattgagtygggattgtagagggggttttaggagaggaygggygggaggtgagtttagggtttttggttttatyggttttttttttygttttygtttgttygttttatatttaatggtagygaattttatggttttyggttatgttttgtttttttattygttttgttyggaaagggttttttttatyggagttttyggtttttatgttgttagagatggaagtattattttttgttttttttttttttttataaaatagtttttgtttgtygtttttaygaggtgatattttgtttttagttygattttttttgygttyggagtttgggttyggygygtaggagattgygtgtattttggygttttygatttttgttagggygtayggggattttagagyggattttttaygagttttaataggaggttagggagtygggatattagagataaattttttygaagttttttttyggttttattgattggagtttttgggttgaaattttaygagttttttatttttatgtttatgaggggagtaaaayggagttttygggggtaygtaggtttygtttttgggtgttggttttgtttttggtttttttagtyggtgtagtgattyggaatagygyggtygttttttygaygttygyggttttttattgygtygaggygagygttayggttaaagtttaagtttyggygttygttgygtttgtyggagttttgtttgttygagtaggtagyggggtttaggtayggyggygaygtygaagggttagtyggtagatagggttgggtttttgyggttagagygtygtaggaaagttttgtaaayggtgggaygagggtggyggyggyggyggyggaggtggygagaaaggygttaygggtttggyggagaagagggttttygtgggggtggaataaaggaatttattttyggaagaaaggggtygagtatgtagtygggaatggttaattttggagatttgtaggagtgygagygttgygatattagttttagggatttaaygaaatttgtttygtygagggttttagtttggtatttttattyggttttttttttttggttaatttygttttaatgggggtggtgggtgtgtattyggagtgttattttttttgggaagaggggatagagtaggattygtgttttyggttagaggaggtaaatatattttattaattttttttttatttattttttagtygtggggttattgtttttattttttagaygttgttaattaaggtattygtaaaattattttttttttygtttttayggtaaygtttyggtttttgaggtttaagygygttyggaaaygaaaagygttagggggttatagggtyggagtttttttttttygtygttttyggaaggggtggaggggatayggttgtaaggtgttyggttttttttttgtgtttgatatgaataaggggattaggatggtaagttttygtygtttatttygtgggataaagggtttygyggtttgagyggtatagtttttgattaaaygatagagttttgttatttagtattattttaggtatttgtgttygtgatataattttattagaagataaaatyggygaaattttttttataatgaaaagttatatttaatggtyggattttttttttattttttttttyggagtttgttygttttttttygttgttgttggatatggttygtttataattggtatttaaagtattaagttygggagaaaaayggggtttagggtttttgtaatttttttaaattgtttttgttygaaatttttatagatataagtttgttaagagtaaatatttgtggattgatataattatattttttttttgtaaattaaatttaaaaaaaaaaaaataagataaaaaaaaatttgttattygtygttttygggttggggygtaggagggagggggttggggtyggttttagtattygygtygggaattyggttttygggtygtttggttgtttttaggagttgagggatttygtaygttttttaggygggaaaagggttttagattttttttygtaatttttaattttttgtttttttaataaataaatttttygaatttgttgtttttggttagttygagggggtyggtaggagggtttggggaggggygagggttgtgtttaataaggaatgaaaatgttagtttttttygttagttttattttttttagygggagtttgtagtggttttaaggagaattattggttttttttggatygygtaaggttttatttggyggggtatttygattttagtttaagagagttttygagttattaagggttttygaaaygttgagaagttygaaagttgttgtagggttttggatttygggttttagtttagygygttttaggatygaatttttttataaattagttgttgggtgaaagggttgygttttagaaagggtaggatygtgtgygygtattagagygygyggtttttaaattygggttaaatttttggtgatatygaaatttattaatygtygttggtgttygyggttyggttgyggagtttaggagtttatgtatggtgttattttatttttagtaaagaatatgttgtaygaatygtygagaggtgggtttggaggggtgygygggtggaggtygttgaaagtygttttattygygtgttyggaygtygaaggaagttttttygt

SEQ ID NO: 6911 - DNA, 3120 bp, Artificial Sequence; identical to SEQ ID NO: 6910
  Description of Artificial Sequence: Synthetic polynucleotide

SEQ ID NO: 6912 - DNA, 7861 bp, Artificial Sequence
  Description of Artificial Sequence: Synthetic polynucleotide
yggattttyggtaygggttgggaggagtttagaggyggggtgagttttaggttygggyggtttagagtttyggtttagggggygtttaggttaggagtgttygtygtttttagttygggtggaagyggygayggtyggaygttygagttttattygygattagygtttttygtyggtttttgygtttttttgttttagttygygygtattttttatatgaggttgttgtttttgtagatgtttaygtgtttyggggygattaygyggtyggtgaaggggtttatttyggttttygttttgatttaygttttggagaagatgtygaggttttygttagggatggagttttgagygatgattattttygtaggtagtattaggttggatagtttttgtatttttgyggyggyggggttaggaaaatyggttagagttygaggtagtygaggttyggttttttttttttygtygggatttyggtttyggttttgtttagattagttaaatttaagtyggttttaaatttagagaagttattygggtgtggaggaagtyggatgtgyggaggtttaaygattttttttttgtttgtaatttggagatttttygtgttttggaaagygagtggtgygttggggattatttttagaagtgggtttttagttttttygygaatttttaaagtattygtaattttttttattttttgtttyggataagtttaagaattaatgagttaayggtagygagyggttttatgtatagggaaattgaggttaggttttgtaaggaggtgaaggttaatyggagattttttygtttagtyggttttygggagtttattgtgtgtttaggttttgggtattggtagaggagtygggtygtgattagygttggggatagatttygggttggtaggtgttggaggtgttaaagaagtatyggtagtagttggttaggttttgygttygttgtgtgatttygggygygttygagtttttttttgtttttaggttttggggtgttagggagggyggygttygggtttagataaatttygatgttatttttttgggyggggaggagtygyggyggtttttagtttttygagggtttttttgtygggtatttgyggtagggttggaagyggygaggygtataagggyggtttttatgttttataaggtttttttttaagttatttgggaaaatattyggygagygggtyggttgaaaggggggggttaaayggtgtttattgyggygyggygggtaatttgttaygttgttaaagtgatygtatttattyggttttattygaaagaaattgttaattttaaatttattagttttggaagaatgttgtagtagtaaattgtagtttaatgyggaggggatttgtttaaaaggggtygaggaattttttttataaaaaagggggattagatggttgatatagygtgaatggaagtggaattagtttttayggtaaattaagagaggaatagaaatygtaaagggggaaaagagggygaygygtagagatgttagagttagggaaagatattgtttgygggttgatgaatgaggaataagaatttgagatattttaaagaaaagaaatttttttygttttttttttttttttttygtttttttygyggtttttttttttygttygttttttttttattttttttttagtttyggttgttttttaaagtttttggtttaagtgggaattttygtgggttaagtttaagttaattaaatgaatttaaaattttttttttttgagttaattgttattataygtttagtaaggttgtaaatgtygggaattygttagtttaagygtaggaggggaagggaggggtyggygggggygtyggggtygagygayggggtygtyggggtyggtttttgagtygggtgggttgyggagttgtttggtggttygygttttggtttggtttatggggaaattgaggtgtatygagygtygggagagtttaggttggygygagtagtagygaggtygggtattttagtygygtttygygtatygttaggaygggaatgggggtygtygggaggagggattgygtygggtttygayggttggatttatygtyggagaaggattgygttagtatttyggyggtgaaggttgttttggggttggygtggtggtttttgttttygaagagttgtttttygagtaygttgygttagyggtygtataggaagttgtgtaggatgtyggaggtgataatttyggttagygttagtttyggygtttttagttyggttttgagtattagggttttagtygggagtayggagtttattatgggyggttyggagtttttyggygtygggggayggtygggtygaygggggaggtgggygggygagaggggagtttaaggggygagaggagagygttgygatggagaaggaattagagtagggggaggayggagaggaggaggaygtaggagggagygggaggtgagggggygattgggaggaaagygaaygagggggagaggggaagagagatggtgaaatttgtagagatggtaaaggyggygyggagggtggagagaygygggtggaggyggaggygggtgyggggggtgtagggtgggtgagaggygggtggttgtagggaagyggtagtaaggggtttaggygygygttagtttttygtatattyggtyggggtygttttttttttggtaaaattttagygtttttataggagtygtagtgatttttttaattggttattaatgattttttgaygtyggaggatagatttgttgtattyggttgggttygaggagttttygtygygagagygygaggggygggggygygyggatygttttaaatagtatttttttattttttttttttttttttggttttttttttttttttttgttttttttttttttttygtgggaagygtagggtagggagggaggtttagtyggttttgaggagaggaggggayggagaaggggagggggtgyggygaggttttttaggattttagggattaggttagataagaggggaygtttggtttygggtttygygttttttttaggtttgatttatgtttatyggtttggtttagttyggygtttatttttattttgttgtttyggttggtyggtttagttttgtatygtttttttttttyggttagagttygygttttttttttttttyggttttgtatttttygggtygttatagtygtttygagttygygygtagttttagttgttaygyggattttttgtttagattgygttgttgaagtyggygtttygttttataygggtygygttaattyggtygttgtgtayggtygggtgygaaattttttygygggtttayggggttgtygaggyggggtygtagyggtygtyggggttggggttggtttyggtttgagatagttttatggaaggttaggttttyggtttttgyggggttaggtygggggtygagatgggyggataggaatygttttggtagtttgtttttgggaaaagaattttttaygggatatagggggattgaaaggggtttygagattttttttaggtgggagtaggygtgtttgagagygaagttttttagaaattgtaggtagtttygygagaggttttagtgygggttyggtttgyggttyggtttttyggttttttgttgagttgtaatttygggaagtyggtggygttgyggygtttttttttttttgttttttagtttttttttttttttttgtttttttttttttttttttttttttttttattttttttgtttattattttaggagtagatttgttttgyggyggtttygaggtatttyggagtttagygattttttttttygaagtaggtagttgttgagtttagyggaaggtttygttttttgtaggtttygyggttttttagtgttagttttaagtttyggattttaggttttgatatgttgggtgagggagtttattttatttgtygtatttttggtttttattattagtttataattttagatgtygttaatagaggtgtttggattttttyggygtgggttaggtttayggattagttttygttggattgtgtggattttttagattttttttttagygyggaggatttgggtggaagaatagygagttgattttttatgagygagattttgtttaaaygtttgttggtatagaygtttttttattattyggaygygttttggttaagagggttttatatttggygtttagattttagatttttggtttttagtttttgttagtagttttyggtatttttygttttygttgggaygtaaagggaggaaggyggyggtagttggtttttagattttgygttygggttygttygaggttggagtttaaggaagggtatatttggtagaaggtaggatygttgggtagggygttagtagagggtagygttgttgaggagggaggtgggttagggtygtygaattttttatttatttttygaygtagtttgtgggtygtatyggttttttggttagagttygagtttgagggggygtatggagttygatggtttttgtaggggagttttatyggggtttattttttggtttttgggaagatttaggtggagaggataaagtgttaggagygagggagaygaygtyggggagygttgttaggagttaagygttgyggtagtttttaagtttygaaagygattttagtttttttaggatattaaagggggataaggattgttgtgtgttttgtggattgttttttttttttttgggtttyggtgtttttgtttgtgtaatggtttgagttggattttgtgaattgaggtttttttgtttggtttttttttgggtaagattattttattttaygataatttygaggattttgttttttttagggttaygttttattgygggaagtttttaggtttgtgtatttttygtgttggggtgtagygtttgggttttgaatttyggtttagagttagaggtttggatttygttggygtagtgattaygggttyggattgyggttagggagttttatttttttttttyggattygtaagttyggagagtagtattgggagtygggtagaagyggagygtagaaygtttttttagttggtgygtttaaatttttatygygtttatattttgtgtttttagtttagyggtaaaatttatttggattttygttyggggaaaaaggagttygtaggtagygtttagttttaaggtgtattgaaatagggagtaagattttgtgtttatattttttygggaggagatttygaggggaaatatttygggtttttttagyggatgattygtgttattttgttatttttygyggggtttaggygyggaatgtgttygygtaaaagtttttttttttyggtygggtyggagtttttaggtttygtygtttttttygttygttggtygttatttggygatttttttaatatttatgggygttaatagagaggtttttagtatatyggtttattgtgggyggttygtaggatttgaataggtttyggtttttttttttyggygyggtttttygaggggtygggttaggagtgaatggtttygtttttygtttygygtttttttttttttttagggagaatatttttattttttttttygttgtygtygtygttygggtttttatttaygyggtttyggtttygggyggaaygaattaatttgtygyggtttttyggaggttattttygtygttygggtgttttttttttttgagtttaygggagtggagagagggtygtygyggtaggtygayggttttayggagggatattgaaggggaagtggaggagaagagtaggggygattyggaggggtggttgggtyggggygggtaagatagttttagggttyggtagtygttyggggttggttaatttttagttgttgtttygtttagggyggagygtygaggggaaggaggtygyggtttaagttyggaggttygttygttttttttttgaggtattagygygygttttttyggttyggttgaggtatttatgagaaygggggygtgtgggatagtttagggtttygtaygaygttttygttttygtyggtgygtyggggtttagtttygggagagttaggtttygatagtgygttttagggggaygttyggaagggyggtyggtttygyggtttttgygttttygttttggggttygggtttgggtgygggggaggggggtgygagtyggttaggyggggttaaagygtaygggttttygttttgttygtttygtyggtttttagaggygtagaaagaagtttattgttygtygagaaatatatttttgggggtygagtgaaagttygttttttttttgaattttagaagaaagttttttgttttygtttttyggagggagagatttgttttttttttygggagtttygygygtttttttttttygaaatatttgtygggggaaaatttattttggagggtagatygygttygttttaagtttggygaatttattaaaaagatattagyggygggggtaggtttygygtaggtatygatyggtyggaatgagttygaggaagaaaaggygaagaatgygttygygtygygtttagaygtttattygtttygtttagtttttgygttttagtttygtatagggagaggggttttygygtygtttygtattgtttgtgagtttygyggttygyggtttagtygtttttattygggtttttyggtatagtttttyggtaatttttttttgtyggtgttgygtttygttttggttttttttgygygtaggttttyggtygtttttttttttygttygttgtygtygygygtttagtattygygttttttttttttttttttttttttttttttttttttttagygtttttttttttygttggygtttygattttttttttagtttygtatatttttttygtttttttttygtaygtttttttttggttttttgagttttaatttttygtagtggtttaggaaatttttttttygygtggggttygygtygtttttttttttttattttygtttttygtaagayggtttagggttttagggygttttygtyggygygtataaaggygyggttggttgttaaggygggtgggggygaggtygaaaaaaayggttttaatagaygtgattyggggttaggtttgygyggggttgtyggyggagtggyggtttyggtttagtgaatggggatagyggtttttttttttattttatttttgtttttttttaatgtaattagtttttaaggttygggagagataaaggygygtttyggggygtttaygtggagtgygtaggygygaagtyggygtttygatyggtaggtgattggtaygygagtttttttaggygtttaggggyggaggaggggaagttttttttttgygtttttygaatttttttttatygtttatatttyggtttttaggttagygatgttagygttatagtttaggttgattaaggyggygggaaygaygggagagaygtyggggatattaggagatygggyggtgggagagatagaggygtaggtttttggaagtagagggggygagataggggtygggggagattgaggtaaggygatgtygaggtggagggagtagatgaaaggtygagtyggagaygtaggggtataaagattyggagatgaaggaagtagagggggagaggtayggttttygaaagagygg

SEQ ID NO: 6913 - DNA, 1434 bp, Artificial Sequence
  Description of Artificial Sequence: Synthetic polynucleotide
yggtttygyggygaggggtttagaygaaggaaaygtygttttaggggygygygggyggagatggagtggtttaggttgggggagyggggagtagggtygttatygttgygtyggttygygaygtttgtttttgttygttttgtttttygtygtttttttgggygattygggtttygygyggygttygtttagttyggggtttyggattgaggagggggaggaggaggaggaggaggagtygygttaaggyggtyggygggygtatttaygtyggtgttgyggtttagygtttygtygtyggtygtygagagtttggtggtgttgaggtttattagygagggtagygtttgggatatttagttagtgattatggttatggtgtttagtaygatttygattttgagtagyggtatygatatygygtttygagttgtttttagygttygtttygagttggtatyggttttygygtttaggyggtttttaggyggygggtatygyggygggtaggggygtttggttgtgttttygygttttttyggttygtygtygttygttygtygtygtygtygtttygygygtttyggttatygtygtgtttttttygggygttagggaaggtggttaggtggtttttgttygtygygttttgygtttygygtygttygttttgygttttgttttgttyggttgygttttttygggttttttygtygttatygggaagygtygttyggttttgagygttgygygggttgygygygggggtygyggtygggaggyggggttyggtygggygggatygaygtaattygtttaggaaatgggtggattttttttttygttyggtttttygtygttttttggttgttggtagygaggtttgtaaattttagttygtttaggagttgggattagggtgatatgaggagayggatatattattatttttagattataaaatattyggyggyggygyggggattttagttgggggtayggttygyggttttttygtttyggggttttttttatttttaygtyggggtattttttttygattttygtagagggttygttttggggtaaaggttgtyggtagagagayggygtygttttgtttattggagttttttttygyggtgattygagggttttagttagtttgggtygtygtttgaaatttagtaggtagggtaggtttygaaaagtagttagattygygagggtttttagygttaggggggygtyggggtatyggtggagagttaaaggygtttttgygattttagggtagtygyggtgttttaaggttttgtttgggaggaagggagttaatyggtatttttgatatttgtatagtaaggygggggttggggtggtttgtygtggttygyggtgygtagtgagggttttgggagggygtatattygg

SEQ ID NO: 6914 - DNA, 5053 bp, Artificial Sequence
  Description of Artificial Sequence: Synthetic polynucleotide
yggttyggtattttgyggtttyggtaygtagttttyggygttatatttattttttttgygtttygggttgagttttygtygattatttgttgttttygaggttaaattttagyggygggaggattttgttgttttttygatttttttttygggaattttagtttttttggygtgtgttttagtttaggtttttgtttttgggtygtttyggygtaggaagttgyggggtygggaygaaygttggygggaagttttgatttgggtttttttttatyggtgttygttttygggtygggtaygyggggyggtttttgggtatygtaggtttyggygtaaaggygtttagagttygtagtggttygggttggttttygygattttyggtttygtttygtttygyggtttygtttttyggtygtttygtttttygttyggttagaggtttygggttttagggyggttygygggygtagygtttagtagtattyggagtygtttggaygtyggttyggggttattgyggggtggygtygttgggttygggaaagttygggattggagagtggygaygtygggyggygggatttatggaggygygyggggagttgggttyggttygggagtyggygggaggygatttgttgttagtattgttggygyggagggyggatttgygtygaggtgggtgttygggtygagtggttgtatyggggagattaggagatttttaggttttttygggtttggtygyggaggttggtaggagttagaggatttgggygggagtgggygygaggatttyggaaygttygygtttgggygttttagtttgtatttgttgtagggtttttggtttgggttgttagggagtgagtgaggttgtggtattgygttgtttyggttagggagttttygggggtttagggtgggtttaggagatttttgtagttyggagttagttttttgggttggaggaggygtagggagtagtggyggggtagtgattaygggataggagggtttttaagaaggtygttttagtyggattttttttaygttttagyggaatagagttagatgtaggggttaaggtygagttgaatttygatygtyggttttttygaagttaggttttagygtttgygtttatagatattygttyggtttattttygtttagggttygtttgtaggaaaaagttttttttttttaggttttttagttttttggtggtattattttagtttttagtattttggtttttagggaatttgggtagtttttttygattttygggttagttggagtygtaggatggggaaggaggtttyggagttagtggggagtgagagggatyggtyggygggaagggggttatatttaggttgtgggggttygyggttttttatttatttatttatttttygayggtttttgggaggggttggtygygggggttggggggyggagagagggagggaggaaggaggattgygygttygygttygggagagttggtyggagygggygggttggygtttaggtttygtygatttygttatttttgatataggagttttygttagggttggagtygttatgtagygtaaggttggggtygygggygyggygyggggtgggttggggyggtttttgttygaygygggygtyggyggygagttgyggtygaggygttgttyggttygyggtgttgaattygygttgtgtyggtttgtygggtygtttygtttygagtygggttttygtttgygatygttgtttaygatggggatttygggygygtagygggttttygaygtttygtattyggagttgyggttttgtyggatgyggggygtatttatygtyggtttttygttattgygtggggaggygtagtttagtttttttygtyggaggtygagggagtttttttttggtgttttttatttattgggagatgggttggagtyggyggggtttatagttagggaggygggtgtaatatgttagtaaatttyggtttttttagygggtattttttttttttagagattttttttaagtgaagagggagtttttagtttttgatatttggaaaattygtttatagattygaggtttttatagggtatttttggatttttttagtgtggtttttttagggggtttgtagtatygaagtggggtgtggggggtagaagtagygggaagttagaygtttgagtaattttgayggtgttgggggtatttaygtttgatataaaggtagtggatyggtttgtttagtttatttataagtaattttgyggttgtttaatgatggggaaggtattgatatttatttyggaggtttgtagatagggttattaggtagggtagttatatttgygaggagtttttagaaagagtggttatgaygtttaatatgaaggagattygatggggtgttttagttttaggtgatggtgaagattygtttttttatgttttttgtygggttttagagagtagatttttttggggtggggtttttatttgagttttatatgtattttttttggtattggtaatattttgtaattgagtatttagtttygtgaaatggtttgggttgtttttttgtttatatatatttttagatygatgttagtttttttttagtttttgatataggatgyggtgtttgtatattttyggaatttgyggggttatttaagttggttggggaagagggtgtgtagggaaaggaggatttttyggtagttttgagttttgtgggtyggaggggagattggttygygttggggtgggaaggtggttttattgttttttggtttaygaggtgatttagaattttttygtgtttatagagatttygttgtgygttggttgtgattagtatattttggatygttttatttttaaggttttggatygttattggtatagtaagtgttttaagtgtagygattgttataygttattggtygagygttgttttagtygaggggagagygtttattgtaaggaygatttttttaagtgagtttygaaattttattttagtgtgggagyggagggtaygtttgttttagggatttttttttttataattattaaggttaggttttygaagtttgygtttttygtaattttagtttatttttgttatttaggtagggtattttgtggtttggttaaattaagggtggggtttttttatgggtgttttttgggtggttgggtttggttgggatattagtaagtattatttggaaaaaaaagtaatttattatttaaattatagaagtagttattagagaagatatatttttatttgtaggattttattggatttagttttttygaaattggtgatgttttagtttttaatgttggtatttagyggttttggtttagtggtttttatggttttagttgtggggtgtgagggattggttttagatgggtttttttttttyggatttatttttttagatttagtatgggttttgtaggtaatggyggttgggtttttygaggtttttttgagattgaggttttttttttagtgggagtgggtagttttgtttyggyggttaggttggygattattttgtagggtyggatagagttttttttyggggtygtttttttaggtagtygtttgtttttttttaattygttyggggygaaatgagtttygygttttygygttgagttyggttttgtgygtttygtaggygtttygggattaagtgygtygygtgttagttgggtatttygtttaygtaggtggtgygtygygtttaggatttygtgtattatttgtattgttttgtttgygtygtgtgtaagyggtagttggttaygggygaygagttttattttatggaggatagtyggttygtgtgtaaggyggattaygaaatygttaagtagygaggttagtygaggggaygaygtttttattttttttggtttgaaaaaaatggggttgaggttaygtttaggggggygttyggggaaattttttttttaagygtttattaagggggtttgggttagggyggtgtaggtagtaggaagtygaggtygggaayggyggagttayggatagattygygtttygaatygtttygttyggttygaagtgtgyggtttttygtttttggtyggaattatygttttaaatttttggtygygaaggttgggttatatttatatttttagaataaaggggagttygyggggaaattagggtgtttggagaagggagttaaggttgaaggygggggygtygtggaggtgygattttagggaaggygtygttttygttttygyggtagaattygtttttygtyggygttttttttattttagttygggtgttgttygtttttgttaatygtttttagygttygygtttttygagaagtttgtggggygggatgggggtgggtatttgaggtttygaygttttygygtyggtyggggtgggagggttgggggttyggtyggggtyggaggggttgtygygttttatygttygttygtygygtagaggtygaggttayggttaagyggtygygtaygattattatygttaagtagttggagaygttgaagagygtttataatatttygtttaagtyggygygttaygtgygygagtagttttygttygagaygggtttggatatgygygtggtgtaggttagygttygtttttgtttttttttygttygyggttttgggggttttygtagagtygggyggtygtttatttygtttygtttttaggtttggttttagaatygtygggttaaggagaagaggttgaagaaggaygtyggtyggtagygttgggggtagtattttygtaatatgaagygttttygyggyggttttaagtyggataaggatagygtttaggaggggtaggatagygaygttgaggttttttttttyggtaggyggagggatygyggagttyggggggggaygagygygygtyggyggggtygtaggggttttagggagttygygg

SEQ ID NO: 6915 - DNA, 6343 bp, Artificial Sequence
  Description of Artificial Sequence: Synthetic polynucleotide
yggtagggygggayggggttgyggtttattatggaatagtygtataygtgaatttttttgttttgattttggtgggagatgygttygtygtttagatatttatagtygtagttttgtttttgtatgtygttygatattttgtygtagatgttygttgggatgggagggyggttttaggaygtgttttggtygtttttggaggtygygggaggaatttttagtygaaggggtttgaaattttagttttgaatagttttttttttaggagagaygaagttttttgaggttgggatagggatgaatgagygaaggagggtggaatyggggagggygygggaattgggagattgttggggagggtgttaggtygtgttaygtttttttygtttaggattttagtttgggttaaatttagtaggggtaggattyggagtagagygtagttygttayggttygtagtttygttttygtttygttagtttygtttttgtttygttagtttygttttygtttygttagtttygttttygtttygttaggygtgtttttggtatgttygtaggtttygtttttattatggtatttagtttatttgtagtygygtaygatttttttgttttttgtagtyggagtttyggagyggggagtygagtggattyggattagtatatatttgaagaygtygtyggagtygatgtttatattaggaatgagagygaggttygttatygttatgttttttttttyggagttttttttttttattygattygggggtygtttgtattgygggaggygggttttgygagagygaygattaatttygtyggggaatgttttttaaggtttagygttttagttaattgtatygtygatygaggtaygtgttgattaatygtaatttagttttttgtygttttgyggtttygttagtttygtttaaaggaaaygtggaatygggaatgggtggtgatgaaatttagttaayggagaagtttttttttagyggggttyggtggtatttttggaayggggtagttaggyggttygygaggttggggtaaygagggaggtttgagggatttgttagttttgattttttgtttygtaygtagttygaagattatttttttygtggtttttatygtttaaaggttttttttttttttttttttatygttygaaggtttttttttttttygttttttatygttygaaggtttygttttttattttttttatygttygaaggattttttttttttttygtttatygttygaaggttttttttttttttttttttatygatygaaggttttygtttttaatttygttatyggtataaggaggtaayggtagtygttatatttaagttttattttatttggttygaaagtttttgttttttggaaattatttyggtttaggggygttttyggtyggtttttaggggtggggtygaatgtagaggttttggggtagggggygyggggygyggyggygggtgggtaagygggaygtttggtyggtgtagaygygyggggaygagatgggygtgtygggtgygaaagtaggagyggaggygggggtgtttaattttttttatttggtgtttttttttttggtttygaagtagggttggggattttaggagggtttttgygtttggtttttatttttttttygtatattttattttttagagagttttgggygyggattagggtgtatttgggggataggtggaggtygggtygtygggtttgygtttttaygttygtagtayggygtgyggttagagygggtgtgyggggatttttygggataggttaagttttttygggtgggtttttaygtttattaattagtttttttttttatttgttygtattaygttttgttttttaggtttttatttgggaaygtttygttttttggtttttttttttttagttaggtgttagttttggttaggtttaggtgttttgttttttttgtttaggttttttgttttttyggttgggagatttgtatatyggtttgaagatttttttgyggttttttttagtttttgtagggtttagattgtagyggttggaggygaagggayggtagggygygtggygtggttagtgtgttggtttygattagygggaaygtattgygtatygttygttttgtttatygtttyggygggaygygttygygtatayggaygtatagaggtygattagggtgttttttagygaggaggtaatatagtygygggaggyggggyggggygtgtttaaagtgatagattgggttttggttaygtygggtttttggaygaggggaaatyggagtyggggaggttttagygagagtttygyggatygayggggatyggatttttaygggtggggtttgtgtagtagtgattttttygagtgaaggtagagttyggyggtttttaggtttatttygttttttagyggggagtatygagggygaggatygattttttttggggattttygagggygagttgggagagggaggaggttyggaggagggagaggggttgttgggggtgggaaggygaagggtttgtgaggaatattayggggaygaagggtyggggggtgggggtttgggyggagttggaggtygaattgagyggagtttggaaggttggggaattagaggyggggtttagaagaagtyggggtggggttttggyggggttygggggyggttttgggtgggtygggyggggtttgagtgggtagggtagggttygggttagygtttgggttaggtttggtgggttyggygttttatatgatgtygtttagtaggttggygttggttatttagtygagygygygyggttyggaggyggttatgattatgtatatgaaggggyggtyggtgygtyggttygtggggtagatggtggtgggygtgaagygtttgttggtttygaygaattygtaaagttgttygtagaygygygggaattygtggygtaggaagaygtygygtagtygtagttygygttggatgtggatgaaggttatttygygygygygtyggttygtttygtygttttgatttaggttygtygtgttyggyggtggygttaggattagygtttttatgtygggttygyggtttygygtygggggyggtygygyggggttgtyggtygttagygttattttggygaatttgygtattgttggttygtggttgygtggygygggygygggtagggtyggtgttttyggtggygyggtgtygggttttayggttayggataygttgagtaggaagtattttgtyggttygtagaggygtttagyggtygttagttygygygygtagttgtttaggggygtygygtgtgtggttagtttaygtagygataggtaggtgggggatagtagtagtttttttaggttaaagygtaggaagttgtyggtygagtttggatttgggaagtttaggaagagtaygtygyggtygygygataggaagtygataygygygatgygygagaaagygyggtgtatygggtygttgtygyggtaaaattgtagtaygtggyggtataygttgtttaygyggtygtataygtagygygttttgtgggygttttagttttygyggyggtataggygygagtagtagtaggtgtagtagttgtggtaggatttgaagtagaggtaggygttgaatatggtttyggtgygtyggtagygygtattggagtaggttattaggtygttttygtyggygttgggttygggggaygygtyggtygtttttttyggggtygygggtttttyggygttgtyggtygaggyggggggygagygtggyggygttagygygggggtttyggagttygygggtygygagtttagtagtyggygtagttgggggtttaggtagtyggtygygggttttgaggtttggtyggyggtgggtygygagtygatgattaggttygtgatgagttygtttagttgttttaggtttygttggyggttagaggtggggtygtygggggtygygtggggaggtggtygygtgyggttttygggtaatttttaggttttggygttygggygttyggtggygygtaggttattgttagtgatggtgatttygggygttaygtattagttgyggtttaggttttygttygygyggttttttttygttagygaygtttyggatagggatagtgyggygtagygtttgggagaggtggataggtttaygaygaygggygggygtyggttttygggggataygtttygyggttttygtatttygygttttagtaggttttygtagttgyggtygyggtttaaygggttttttyggygyggtttyggggttagaatgttgttttaggagygygagtagtggyggttgtyggtggttagtyggggyggattggtgtyggtgtygtygtgttaggaggygagtaaygggtyggggttagagggyggtattatttgtagggtgyggtayggtygygggttttagttygtttaggtygggttgttgygygggtgygggtaygttygagttaggaygttaygttygyggtatttttygaagtttttygtgtaaaaggggygggyggtggagtgggttyggggtttttyggggatatagyggggttygtagggtaggtygtaggttygtggagtttttttatagtaggagygggagggyggtttttggattgggaaggtgygtattttttttgygtagtagtygtttatgygttttggattgggtttygagagtttttyggayggatagggtttggggtagtaggygtygaaggttgggtygggattggttgtaaagttgtttyggaagttttggggtttttttgtatagaagaattgggtggggttyggyggggtggtgaagggtagattgyggygttyggygtagtttyggggtttaggtaggggttygtygtagtagaaygttyggggattygtatagtatgagtygttgggygtyggggtgygygatagygttatgtggyggggttygggtatygtgaggtygtggaattgyggggyggggygggtttagtgygyggtttyggtgggttygtaggatygygagtttygggtggygtgttggagtattgygtygtttggtttgatgtttaggyggtagygtaygtggggggygggattygygggtggttygggyggtgygtagyggttygyggyggygtataggggygygaygyggtyggggtygtttygttgyggttgtaatttgatgggatgtagttygttggtaagggygyggagygtygggtaygygggttttyggygyggygatgtttyggttygygtygtaygttgggtttttygttttyggyggggtaatatyggyggygaggygggygygggygttaggttygggggygygyggggygtatttttggagygggygyggyggygtggttyggtttygygggttygggygygyggtatagyggatttyggyggyggtggtttyggtagggtttttatggtyggttygtttagygtttttaggaagtygaagttgyggtagtggygtttgttgaaaggygygggtttagtaggtygggttayggatygtttatatggygagtatttggaygygggtttyggggtygttattttgatgttttggtatayggtygatattagtaggttyggagggttygtaygggttattttaaaagaggtttttaggttggyggttttagtttatattgttttgyggggtttttgttttggggggagaygygggttagggyggtttttttygtagtttaggtttygttatttttttaygttggttyggtttatttggggygtagygggyggagtagttttggttgygggtttgggtygagaaygygggygttttttttatgtyggggttagaagtatttgygggaggaatttagttgtttaggygttygttttgttygttttttygttttttttttgygatggggygggygggttagaaaggtttagtygtggttgtggttttygyggygggagttttygygtgaagttttagggttttttttttttygattagtgayggyggggtyggttygggtggattttttttygggtggggtaggggagtgggggygtggttttggggttgygttttttggtgttygtagttggaaggaygggtygtatttgggttttatttataggtgttgttttaggagaygttagtgattgygttttygttatagygtttattgtagagygattttttygatygygtatagtggaaggyga

SEQ ID NO: 6916 - DNA, 1089 bp, Artificial Sequence
  Description of Artificial Sequence: Synthetic polynucleotide
ygttgaggggtygtatttattygygtaggtattagtaggtagttttggygttygygggaggyggtygggggygggggtttttyggtgtttatygtygtttttgyggttgggttygygtttygggtyggtygagtttaaygttaggatttygttygagttttttagggtttygttaggygtygygttygygttygygtttttttgtyggtttyggttygggttttatyggggygtagggttggggaatyggagtttygttygtygattyggagtatygtttaygtagattygtttygggygagggaggggtygggygygtattygyggggagggyggygagyggggattagtygaagtygggagaggggygtttttayggggygggaaattggygygygattttgggggaagtgtaggatggggggataggggygttttygygggggtggatgggggattatagyggggttggyggggtaggggtyggygtaygaggttggaggaggggagygygygtttttattygggttgggtygtygaggttygyggygtatygtggyggyggtgggyggaggggggyggggggtatttttttttttttgtggygtaggtgggygygttttggatyggtttgaygattttttttygtygttttatttttttggttaaaggtttttagtttttaattagggatatttttagtttatagtttygaagttatgggtttttttyggttttttgaagtygttatatttgtgttagtyggtygygtttttagattttttttygyggagtttttttagtatttggagaygtagygtagggtttygaggayggtttggttyggagaaaagatatygaagttttaattttttttaatttygttttttttttttttttatttttttttttygtttttaaagttygggggttttatttttttttyggttygyggagtttttygaattttgyggggattyggygttyggyggtgtttttttggggygtayggggttggggygggagygaggagattaggtggggaggggattttagattttagaygttaggggagayggygtttttygt

SEQ ID NO: 6917 - DNA, 1020 bp, Artificial Sequence
  Description of Artificial Sequence: Synthetic polynucleotide
ygtagagatygtagagattaaggaggygttygyggttgtagagttgtagagygggattttttygagttgtttgtgttygggtagtyggygygtaattgagttagaggatagygtattttttyggygygggtyggtagggtttttgyggtyggtaagttggtttttygggtggttatygggattttygagtttaatggygggggyggyggtaaaatygataatattgtagagattatttttatttttaayggagtaagtgttygagttttaggtggygaygttatttttttttagtattttygttttygyggagygtttggtattttttttttgygtatttttygtttttgattgtttttttagtttttttttttatttgttttttgtttttgttttgyggtttttttygttttattttttttttgttattttttgttttttaatagtaggtygggattttyggagatgyggtgtttayggagtagttgtagggtgagygggagygygagygggagggggagggagaygygggyggygayggattgggtagtagtttgtygttggtygtgtttttaggtttttttagttttgaggygttgttygtttaggtgggggygttgggyggyggttagtagttgtagttyggtttttgttgtttgtyggtgtttttygtggttttgggtatggtttyggattttatttttaygttggygttttygttgtattgttattayggggtttttttttttaatgtttttggttgggagtagttttttaatgttagyggygttagygtygttagygttgttttagtagttagygtygttagtygtgtygttattagtatygatttttygtgtagyggtttygtttygtyggattttaattattgttttaaggattgggattataatggtttttttgtgtttattattaaygttatyggttaggtgaggyggttaggygggtygygggtttgggggygggtagagagyggygagggyggggttttaygttygt

SEQ ID NO: 6918 - DNA, 6343 bp, Artificial Sequence; identical to SEQ ID NO: 6915
  Description of Artificial Sequence: Synthetic polynucleotide

SEQ ID NO: 6919 - DNA, 1109 bp, Artificial Sequence
  Description of Artificial Sequence: Synthetic polynucleotide
ygatatagggtggygtgtagggagygtgttttggtattaggygggygygagggggtagggygtaygttygggataygttttagggaaatygtttttgggtttggtagttgaatttagaygtygagtgtagttygttyggtgygygyggygttttattgttagatttyggaaattagttgttagggtggggtygygttttggygayggttattyggttatttttgtygttttygttttttttaagagatttttttagygggttaattttttgttygggtaaattttttggtgagtttttygttttttttttttygttttttttttttttatttttgttgtttyggttttttagttygttygygtygygttttatygttttygtaygttygggygtaygtttttttygttygggtygttttttggtttttygygttyggtagttagtgttttatygygtygtttygygttagggttygtttygagagtygtttttttttygtygyggtyggygygggtttttyggttatgygttttygagttttagtttgygtygtygyggygttygggttttgtagttttttgttgttgttygygttygggtaygygtgtttygygggttgygtttgtatygattygtatatygtggattgtygygatygygggttgtttagygtgttagattttttttttttggaygtgygtaagttgttggtggtyggtaatygtatttagyggattttygaggatttttttattttttayggygatttggtttatttggattttaggaataattygttgygttygttggaggagggtaygtttagyggttyggttaagttygtgtttttygattttagttataataatttgatttagttgggygtyggygtttttygttyggtygggaggttggtgaagtttagtttggttaataataatttggtgggygtgtaygaggaygttttygagattttggagtygttgtaggtgttggagtttaaygataataatttgygtagttttagygtggtygttttggtygygttgttygygttgygttttttgygtttggaygggaatttttggttgtgygattgtgatttygt

SEQ ID NO: 6920 - DNA, 1109 bp, Artificial Sequence; identical to SEQ ID NO: 6919
  Description of Artificial Sequence: Synthetic polynucleotide

SEQ ID NO: 6921 - DNA, 1384 bp, Artificial Sequence
  Description of Artificial Sequence: Synthetic polynucleotide
yggaagggattygtyggttgygtttygtttaggttggtyggggtyggtgtgatygtgtgatttygtgtatattgygttygggttttygtgaatgatagtagtttgtaatttttagtyggagagtagyggtggttatygtygggyggaaagggttataagttagaatgtaaagygatttygtttygggtgtgggggatttygggttttyggttattttygaggtygggygtgttttgttygttttttttygttttgggygtyggggygattttattttgygttttaagttgggggttttttatgttygtygtygtygagtttttygtygtygaggygttggtygyggttttygggttygggtyggggtygtygtygtygtttagtttygttagttttyggttggtggtygtgagttyggttygtaggttggttattttttggttggtygattggatygttttatygatgyggagygygagttgtttattgttttttattatgtttaggattttggtttgggggygagagaggtgataaagagttgtatgatgygyggggggygygyggtygggtattttyggttttatttgttgtgtttttygyggttyggtttygttygygtttygatttttaggtatyggtagygtyggttttttyggtataggaatgatagyggygtttttagttttagtygyggyggtggygaggyggyggggggaggaggyggaggagaaaaaagaggaggagaaggaggaggaggagtagygatygtygagatttyggygggygggygtygagagttgttttaagaaggatatygygygttattaggtattttttaaatggagtttattattygtygtyggttygggagggggtttyggtyggaggttgggggtatttttggtttttygygttttygtatttyggagatatatttttygggggggyggaggyggyggayggtagtygggagggggttaaggtggygtttttggygaggggtaggggtygtttggatygaggtyggttttttgtttttttttttgagyggtggggtagttttygttttggagaattggtgtttygagtygtgttaaggttggggaggtgttgggtgttyggaagagagggtgtttggaaagggggttttagaggggagtyggggtggatttttatggaagggagaygtttgygttagtttaggagtggagttygtgttttatyggttttttaaattgygagtaygaaatttttagaggggagttgagttggtgtttygygtgttttttattttttattttttattygtaggttagatttgygttgtttattttaggagggagygtttatttttttyggygtgggtygttggtgttttygt

SEQ ID NO: 6922 - DNA, 1384 bp, Artificial Sequence; identical to SEQ ID NO: 6921
  Description of Artificial Sequence: Synthetic polynucleotide

SEQ ID NO: 6923 - DNA, 835 bp, Artificial Sequence
  Description of Artificial Sequence: Synthetic polynucleotide
ygtgaagtyggygttatttagtttttttygttaattgtttatttttttyggttattgtttttygagtgtttatygagtgttygtgggttagygagyggggtygttggaggaaggggygggtgtgtttagggttggyggygggttyggggtttttgggaggaaagggtygttygtttagttttttttyggagtttagagayggtttyggyggygygggtatataggggtatatagygyggggyggagggagggggtggyggtatygttygtggagggygygggttygtttagtttttygtatyggygttttttygygyggtgtttttttygtatatttataygtatttatttttatagttatatattttagtatttgtaggtataaaygtttgtagggatatattaygatatagatatttaagtatatataggtatyggtttatagattygtttttgagttatatataggtatyggtttaaaggtataggtaggtttatagattggtttttgagttatatatagtttagatttagatgtatatatatagatgggaaygttygtttgtaygtgtatagatatayggatatattygtatattatygyggggtttygagtatataygygtttyggtagaygtttatagatataygtagggtygggagygtatatatatagatataggtttatatagatagattyggttttaaaaataygtattygtagaggtaaaggttagygtataagtaygtatagatatatygataggyggttttyggatatygygttttttgtygtatttayggtttaygtaagggtttatatayggttttaygg

SEQ ID NO: 6924 - DNA, 2248 bp, Artificial Sequence
  Description of Artificial Sequence: Synthetic polynucleotide
yggttttygggttagtttttygttgttatygtygtttagttagygttygtygygtgggagtygygaggttaggtttygtagayggygggttttyggtttygttgttttyggygggygygttttttttagttggttyggtygttgggttgtygtygttttttagttygyggtgttagttttygygttttaygtttggttttygggtttygtgttttygtagtagaagggattggggtyggyggggygggtggggaygtttgggaagygaggagagttttygtttttygggygtttttttataatggggttagggttttttttttygtttttygygtaggtgtgagygygygagtgtgygtttyggtaagtgtgagtgtgaagtgtgtgtgtgygggggagtgygyggagggagygygggyggygggyggygygggaggygggaggtagggygtaggggagggggttgggagggagagtgtgygygygtgtaattttatttyggggttttgtgygagttygggygatagtatyggyggyggttggaggaggagyggtyggagaygygtgtagttygttygttagagttyggtagtyggggtaggtgggagttygygygggagtygagtygaygygagtyggagtyggagtygagttygagyggagttygggyggagtttaggagtttygttygygggtagttygtgggyggtagttaggyggggygggygtyggyggggyggttttttagtaagatgtgygyggygtygyggggygttttttatttgtagyggygttygggagtygggyggttgggttaggyggygttttyggggttgttgygygttygygtttagagttgtygttttagggagttygttayggtygygtttygggtaygttyggyggygtttaaygatgatygttttttggyggygttttyggagtttggtttgggaatattgggtygggtttttygtgtgygttttttggatttyggattygygygggatgttttaygttattyggatyggtaagygttttttggagtygggggttttygtgygttygggagggggygggaatgagggggttttttaaygygtttyggagagatttttttaattttttttygagttgttgagtygatyggtgattattaggagtttttttttgtgaggataaagttttagagtyggggttaygggttttatttattggggaggaggtygtygggtygtagtgggygaggggtttttggygygtttttgggaggttagatttggtatagtgtggygaaggtttttagtgygatttygagtygagggygtatttygyggtgattgttagtatgaatygtagtygatygagttttgygatygggttttttygtagagtggggattttggggaaggygttaattttttttttttgtttattttatttttygygggtttttygtttttatttttggtatagttygagtagtygtagygaggtygtagggtatagattygtatgaygagggtagtyggtttttttttttggtggtygtttttggtttyggtggtatyggtttagtttygtgttatggggygggggttgggggagtaggatttygttgttygttgtagttggtttttyggggttaaggtttttttttygtttggggtagtgtaggtagagggaagggaygatggaggtygtttagtgyggttygggtaggyggtttagggaygttagyggtttttaaagttagttygaattttttygtagttggyggyggttggyggggttgygygyggtttttyggggtttyggttttttygygttttttttygtyggagatttttatttyggtttttaattttgttgtggtygtttaaggtattttgtaggtttgagygtygygtatgtttygggtygaygatyggtagggttgggtttggtygggttaagayggagtttttattatygtaggttttgygttygttattaggtyggatatttgggtygtttgggtttattyggygttagtattagygtttggtattaggygagtyggatttygtygagttagggttattttttttttttatagtttttttttagggyggattttgggttgttagyggygtgaaagaggtgtyggaatyggtgtygggtttggttttygtatttgagatttttttaggaggyggttagaaatttagygggtgggtttttttttgggyggtygttygggagtygg

SEQ ID NO: 6925 - DNA, 3541 bp, Artificial Sequence
  Description of Artificial Sequence: Synthetic polynucleotide
ygaggttggatagttttyggtttgtaygtyggatttttggagagttygagttttttttttgagtttattttttttttttttyggggygtgattttattaygattatagtygatgagtygtttaagttgggagaaggagygagaaggttgtagyggygtaggttagatatttttgggtttaaygtttatttttaattagygtttttgttagtagygtttttttyggagttatagtttttatttygagattttttttttttggaatttyggagygyggtygggtattaggggttygygtaggattgtagaatygttgtygttygtygttttagttttagttgttygygyggtatttatttgggttttagtgttygggagaaggtgtgttygygygaggygtgaagttagagttygttygatttygttygtatyggaygygtttttagggtagaggaggtyggyggagttgtgaygttgggattagaggaaggagaaggaaagtygagaygggtygggtagaygygtygaggagygtttagtgtaygttggtagtygygggaggygaggygggygyggtgagtagtygygtyggaatygagtygygaattygygtygtttygygttygtagtygttaggattygygggaattttggttygtyggtagyggtattgaggagggaggggygyggggttgagtygtttttyggagttygagygtttttyggagtyggtaatttttgttgttygggygggatgygggygggaatttagttygygtggaatgtgggatyggtygggttyggagtttttagygttgggggaaagyggggtttatatagttaggaygagagggggtgyggttttagggttattttygygttattttttaygtggyggtygygttttyggggygtgagtgtgtaygyggayggtaggggggtygtgaatgaagttttagyggttaattagtayggtyggygygygggatttygggagygaygtttaatggagagttttgggtggtygggtagggtggygggygggygygyggggygggggtygggtaggggaggygggaggtagtttygygggtagttaatgggyggygggyggggtggggtttyggagygtygagygggtyggggttttaagtyggyggagygaggyggyggggttygtagayggagyggagyggyggyggyggygyggygtagggygyggggyggtatggttattatygygtagtatttgtygyggggtttyggtggyggagtygggggtatygggtygtttatgtattyggaygttgyggyggyggyggyggyggyggyggtygyggagygattgtatgtaggggtygygtatygygaagtgtagaagttgatgtattaygagtggttgggygygggygygggttatttygtgggtttagygtatttttagtggttatttaygggaggaggyggyggyggygattgggtyggyggttygtatttagaatayggtaaggtaggyggyggyggtatyggtygagtygaygayggyggyggyggyggaggtttttaygygygtttggtgtattagggggyggtttaygygggygyggtatgggygtagggtagtatagygtattatttgggttyggttatgtygttttygttyggggttagygggggttattagttttagtygttygggttgtaygygtaggyggtttattyggggggyggyggyggyggtttggtygggatgttggyggygggyggtggyggygyggggtygggtttgtattaygygttgtaygaggatggttaygaggygtagttggagtygtygtygtygtygtatttgggygtttayggataygtatayggatatgtataygygggyggtttgtaygyggyggyggygtatttgtattygggygygggyggyggyggtttatyggtgggygagtattyggaygaggatgygtttagttyggaygatttggagtagttygttaagtagtttaagtagyggygtattaagttgggttttaygtaggtygaygtggggttggygttgggtaygttttayggtaaygtgttttygtagattattatttgtygtttygaggttttgtagttgagttttaagaatatgtgtaagtttaagtygttgtttaataagtggttggaggagatygattygtttagyggtagttttattaatttggataagatygyggygtagggtygtaagygtaagaagygtaygtttatygaggtgggggttaaaggygygttygagagttatttttttaagtgttttaagttttyggygtaygagattatyggtttggtagatagtttgtagttggagaaggaggtggtgygygtttggttttgtaatyggyggtagaaggagaagygtatgatttttgyggtyggygygggttattygtttatggaygatgtataygygtttggggagttagggtttggygggggyggygtatygttatttttygygtttttatygttttygtyggyggygttgtattattattattattatatattgttyggtttagtgtagtgatttygygggtygggttttygtyggygygttgtagggygygggygygtagttygttygygyggtttggattttttttgttyggttgttttggattttataaaaaaaaaaaaaagtttagaaattttygaataaaattaaatattyggaygatttttttyggtgagyggygaagatagttyggtaggttgygtygttygagtttygggagagaggagygaagattyggaattygttaatttatttygggtattttgttygtygtttgttttttgtttttattttttygaygattttygtttttgttttttygggttgttyggggtyggatttyggtagyggtttttttaaagygataggtaaygtagtgyggggttagggatttttygggagagaggaygaagygaggagagttttttatttttttttttygygtggatttttgagtttgygggtttagggtggggggttgttattttattygttataygtttttttttttttataaggatgygttttatttygttttttttttttttygggtttggttttttayggtttttatttattygtggagtttttyggtttttggggtttttttaatttygttygygtttttaatttaaatygtagtatattgtatttatyggggtttyggaggggaggtygygagagtygygtttgtgtataaaagtaggaaatagttaaagttttaatttagtttaatttatttttttttttatatttttttattttattttttttttaaaaaaaagtaaaaaaaaaaaaaaaaaattaataaaaaaaattygagtgtttatttttygtttygttttattygagtttyggtttggttttyggttaygtyggaggggtttgygtttttatatatttagaygggaaggggtttttgttttgttgtagatygatygtygtatagygyggtttttgtttttygygg

SEQ ID NO: 6926 - DNA, 1513 bp, Artificial Sequence
  Description of Artificial Sequence: Synthetic polynucleotide
ygtaagaayggtttagygaattttgtgtaggggaggygtygaggattggagaggttttgttaagggtttygttgggyggaaggygygygtttttttttatgggaaagatagatgtggggttaatgaaagggaggtygagaggygyggggayggtyggggagaygggggygtggyggggagaggaaagttttyggagaaagtygatyggattatygtaagygaggtatgtagyggagttyggaggaggaaggygtyggggattggggtagggttagggygggaygggggtggggggtgtggggggtattataggtagttggattygagggttttgagttgaaatttaatattygtttttggaaggatygtttttttttttttttygttttttttttttttttttttttttttttttttttttttttttaatttttaggayggagttttgygygggagaggagagggtttgaggggaggagaaaggaatagtattgagaggggttaggagtttaggaaggggagggaagggtagtygygggttaggggtgagtttgygggttaygygygattttyggagttttygtagtttttttagtgtttttatttttagtttaggygagtttataggattygggtttttgtttttttttygttttttttttgtttttttttttgttttgtggtttttttttttttttttagagatatttgggagttgtttttaagttttggggygtttygyggggttttgttaagggtgygtgtgagagagggyggyggagtyggygtygggtgttaggggtygagggtgggagygggagttygtggttttgygttttggagtygaggattggaagggggttgggttttttygtygtttgggygtaggtygygygtygggaaggtagtttygtttgttttaggggtgtttgygtgttggttgttgttgttyggggygaggygtygtagyggygattttagattttygggygygttgagtgagtgygygygtgaaaatygtygtatygtygggggtgygagtgtttgggtygaagyggttattttagygatttagttttayggttaygttttygggggtttttggttttaggtaatttggggtaagygttttagttttygtttttttttttttttagyggggtygtygtagattttagttttgggagtatygttttgtagygyggtyggygggtggagayggttggtttttaaattygttygtttagtttaatygtttyggyggttttttttagttttygaggtttttttgagyggtttggagaggygtygagygtagtttagygttygtttgtttattygtttyggttygggaagggaattttyggattttgygagttyggggygttttygyggtttagggygggtagttttyggggtttggtygagtyggtggygttygggaggtygyggggatagtaygtagygygygtttttggatgtygtttygtagygaygtttyggttygtttygt

SEQ ID NO: 6927 - DNA, 3541 bp, Artificial Sequence; identical to SEQ ID NO: 6925
  Description of Artificial Sequence: Synthetic polynucleotide

SEQ ID NO: 6928 - DNA, 558 bp, Artificial Sequence
  Description of Artificial Sequence: Synthetic polynucleotide
ygtgtttggttttyggaaagtgyggaygagayggtgtgggtgggttaggagttatttgtaagggtgtttgtaaatygtgaagtttagaggagaaygggagaaggatggaatygagyggagaggggaggtgtatggtaagaatttygttygtttygggttgaaggggagttgtgggtyggyggttaaygtttgaaggagaggggtttygggtggygggaggyggttggggattygygtaggttagygtgtyggttttttttagtttatygttgtygtygtyggggttgttttaagggagttaagyggagtgggagygggtttgygygtttttgttttgygygtaggggygggggggtttaggayggggygtttttttttatttatatgttgatttaggatttttaagyggttyggtttaggatatygtttggaaatttagtygygtgggagagggygattttatttttaatttttttgttgtgygtyggtttagtttttagaagttagyggayggyggaggaggtggttyggttttttttggtggttttgygttttygg

SEQ ID NO: 6929 - DNA, 7244 bp, Artificial Sequence
  Description of Artificial Sequence: Synthetic polynucleotide
ygtatttgttgggtygtttygggttttygagttttygtggttatatttttggtttttgygggattttyggttyggagtggggaaattttayggtgatttggttttaagygagaaggatatttgggttatygtttttttaaaagttaggtagatttgtatagtttatttygttttyggtttaatagaatttttygaaaattttgtttaaaggagttttgggagtaggygtttggyggtttttgygyggaattyggyggttgtyggygtttttttttygattttatggtttatttatttaggtgtagtyggggttagatatatttggtttyggaatttttaggtgttggaaggtggggtttgggttttgygtttttagaggatatattatttttgaagtatttttttatttttattttaygygggagattttygygggggttgatattttttttttttttaaatttatttatagattttagtaagtggtattttttgggagygagtaattagttttttatygttattatagattttgttygtgtyggagygttttygygtyggggtttggtgaattttttggaagtttttygttyggttttttagygaattatttttatttatttttttttttagttttagtttttyggtgggtattttttagggttttttyggggygttaggttttgyggttttygggtgggggttygttagtygtatygttttttttttatttttatttttgggtttagaagttgatagattgataagaygyggtttagtagtygtgttaggyggaatgggttgygttttgaggtygygaygattygggtygagtttgygygtttagattttygtyggtttggaggttygaaagagtaaygtagagaygtayggttaagagtggagggagaaygataggaaygtttattttttttattatttaaaygaattttttttattttgaaggagagagagaaaagtagagaataaaaaygagagtgatagaatattagaaattagagggaaaaatagaattagagggaaaaatagaattttagaaattagaggggaaaagatatagagataaaattagagttatagaaatygagggygattygttygagggtygyggtattaattttagatgtttgaaaggtaatagttttttaaaaaggaaataaaatttgaaatttgttattttttttgtagaaygagttgttttttagggtygtgatattaagataagaygagaataaggygaaagttaaaattgaaaattgttygagggggttttttagtagtgattttgttttttgtygggaaggtyggatagatygatgygygttttgagtttaagagaatttgyggagatatagaggttattttttattttygtttagaaaagaaaaaaaaaggggggggggttatttgtttatttgtaataaygataaaaagaattttattattayggaaaagaaatygagatgttgaaaagtgaggaaaagagagtttaaaaggggttgagggaygygaaaagaggggyggggagaggaaaggtttagggygygagggaygtggygggtatygataggaagtgtaattttattttttttygttgagtttttttttaaataygaaaatttttataaattatatttattttttaggatgattatygtattaggatttttaaaataaagtaattgagttttaaggagataggaggaaaaaattaaagtagtttttaattattttaaattygtyggatttgggagygygtygaaatatagtaggaagaaggtaggaaaaatygttttggtatttatgttttgaatatttttttttttttattttygtatttttgtttygtttttatttygatygtagtaattgaattgttatttgttttttatttygttttagggttttagagttatttgggaagttyggttttgttaagygttttaggttagtaagagyggtgtagtygagtyggygttttagaagtygagaggttatataagtttaygtagagaggygtatyggatayggtaattaggagtaatttataygttttygggygtayggaaattatttgttaggaaatttttaaygttttttttygtttatttttttttattttttttttggygygttttttttttttttagaggtaygtagtggagtttttggagtttygaatttttyggatattgtagaatgyggggtttttygggygygggttyggttaattagagygtygtttgttttttttggttaatggtaggygttatattgttgtttaattttgtttaatggagttttaaggattaataatagagygggygagyggtttattgagagtttggtagygtygggtaattgggtttyggttgygygtagygttyggygygtatygygaggggattyggtayggygagagttaggtygygggttttaattaygyggttygtagaygagttttygattyggatttttgaagggagggttggattgygttgygttttgaggggttyggaagttyggatatggtgattgaaggagggtgaygtggttagataaggggtygggggtaaagggaagyggttaagagttttagygtygttagtggagtygggaggygygtgtagygttagyggaggaggaggatttyggagtttaaggtaggtagttgagggtygtagggagagtagtgggtggagatttggtttgyggtttttgttgaggaggtttgggtttygtgggttttagggaygttygaagggtttgggagaggaggtaaygtttatagagaggaggtttgggattttyggayggagatataaggattttgtygygggttttggtagggayggggaaygygggaagtagaggagatygyggtagaagyggggagttgggtttgtttgggttttatggggttgyggygtgggagggattttggtgttygtttatggttagttgygaaggygatttttttggtttggtgyggtttgttgggttattygtgttttaggattttaattttgagattagaaygtaggagtttgygttygagaggggttttttgggattttaagayggggagggygtgtttgaygattttgtttttaaattyggaggggaggggagggtagtgtgaggtggttttygagaaagatttttttttygaaatgtttaatttttygtaggataygtttttygtttygattattattttagattgygaagttaaaaaattgtattataggttttatttaatttttttttttagtatttgtttgtggggtttttttttatatattttttttttttaggygyggtttttggatttyggatatttagattagttgttttttattgttttttttgtttatgaagtttatttttgggttgggtttgtttatatagaaagtttttttggtygaatttttttttttaatattttttagttttaagttaaattttatatatattttgttttttattttttggaggtttttatygtggaatttttggygtttatatttttaygggttttagagttattgggtttaattttgtttaagttgttttttygtttttattttgttttttaaagttattttttttgttgttgatttttttttttaaagtttttgttttaaattgtattaaaaataaataaataaaaagaaataaaatttyggtttaatyggtttttatatttgygtttttatattttttttttttttatttttttattaaattgatygttttgtttygggtttttttgttttgtttttggtattagtttaatttttgggttaaaattgtygttttaattttagtttygttaaaygagtattttttttattygttttattttaattaggttaagttttggggtattattttaatttttttaaatttttattatagttatttgaattagtgatttttatattttatatgtttttttattttttttagyggaattattaatttagataaaattttatttttagygtgtatattaggtttaagagtagttatggttagattggggtgaaggtgttagggtttataaggaggtttygattgtatttttttttagtaattttggtttttttagtttagttttygyggtttaaatttttttttttagtttgggttttttaaggyggygttttggtttagygygyggtgtgttttttattaggtttttttttttttttattttttttttygttaggttttgttatggagttgygttyggagttgtttagygtgttyggtgyggygayggyggyggyggtaatagygayggggtygtttgtggygtyggtggygtyggtggyggtagtygyggyggtygttgtatygttatyggtgagygtggtaggyggtttgttgygggggtygttattgttgttgygggtagtygagaagtattygyggatttttaagtgygygygttgtygtaattatggygtggtgtyggtttttaagggttataaaygttattgtygttggaaggattgtttgtgygttaagtgtaygtttatygyggagygttagygtgttatggyggygtaggtggygttgygtaggtagtaggygtaggaggagaaygaggygygygagttgtagttgttttayggtattgtygaggggttggygttggtygtygttaayggtattattttttygaggttygtttaygaggttttyggtttagtgtgygtygtygayggygggggatttggagygggagygttygyggggatyggaggyggagtagttggygtagggggtttaggtgagagygyggttaggtygtaggtaggggtagtaggatygtagttttggggtayggggtttaggggtttgtttyggtttagaaagagtagaattttygtgtttagtygtygygattgttagggtttatygttygtttagtttygggtatggagygtgggtatagaaatttttttttttttygtttttggagtatttgtattttattttttttttttgtatygggtygaaatgtataygttttaatttttttattygtttttatttaaaygtaggtaggtttttgtttttttgtttygttttttttttaggtggaaatttgygtattttygttygttttgygtttttttataggttttttttttttgtttttttttaatttttttaaggaatttttttttttttaattgatattttaggttttgagaygttttaggttttgagaygttttagttttttttttttttttygygtttttaaygttttttggataatygtttgttgygttttttttttttttagtttttttygtattttttttggttttttaggtttgtttttttatgttttttttttttygttttttattgtttgtttagtattattttttttttttggattttygtggttttttgtggggagggaagaaattaggttagagtygttgagggaaaggagggattygttttaaatttgggagggaagaattttttaggttttaattttggaaagggtggattagaaataggggttgtatttttgtttgtagagaagtttgggattttttagataattaaggygtttttttttataggttgtattgttagggtaggtattttttatatagtgggtttttttgtatagygtggttaggtagaagttatgttgttttttgtttgaattttggatttggttatttttttayggtagggtaggattggaagggtagttaagggtggaggtgttggggtatagaygtggggaaagtagtattgaatatygagtttatagggtataggtagttggggttttgaggagtatagaaagagagggagttttggggttagggttgtaggggtttagagyggaaggaatgttagagtaaaaagaaagaggggtattggagtttagtgaataagggttgtggggttgagggagaggaaattgagatttaaagggtygaggtgttgtgattgttgttttttagttaatygttttttaygataygttttttttttttttagaggttaagttgtagaagtttgatttgttttttaagaygttgttgtaggtaggtygttygggtagttygttgtygtygtyggtgaagtttttattattygayggygtagattyggggttygggaygtygtttttagaggtgyggttyggtttaggttyggagaayggygatggygagtttttttttggttygtttttagttygggtttttaaagaggtaggtggtagttgtttaggtagygttggttttggyggyggyggygaggaggatagttygggtttygttagttttttgggttttgaattyggtttagaggttgataaagaagagggtgaggtygygtyggygttagggttgggyggaggttygggtttayggtagyggaygtygttggatattttgataygygtgtttttaggttatyggygaggygttttggagttggtgttgtagggttgyggyggygaygtggtgtaggttatygagtaggtgttgaattattatygtgggggtttggyggtyggtttgggttttgyggygtttttagataaggtygtygtgggtgttgtagtagttgtagaygaygygtggtttagtygygtygaygtygtygtygtygtygtygtygtygtyggggggtttgggttgtttgygtygttgtaggyggggttygtygtattttygtattatagatttttgttggtyggygttatggygtttggggygttgggttygttgagtagtygttyggttttttygtygttgtagtttaaygttagttatttyggtgtygaygygggygtttattygttgggygygtygttyggttttagttttttgygtttggtttatttygyggyggyggygtatagtygyggtttggtttttatggygttttattttattgtyggtttggtgtttaygttyggttttygtttatttatggattaygtttttagygattttatgygtgatygttyggtygtygttgttgyggyggtgtataaggagtygatttayggyggyggtttgtaygggtttatggttaayggygtttyggagaagtagtagggygaggggtttggtagtyggtyggtttttaaataggaattttagttttgttttygygggttatygattttttttygtttagygttttttttgygttttggttgggygt

SEQ ID NO: 6930 - DNA, 824 bp, Artificial Sequence
  Description of Artificial Sequence: Synthetic polynucleotide
yggagtygttaggagtgagtatttttttttygggatatttagtttygyggygtttttygygygttttggttttatayggatttgttagttttagggaataaaagyggagttygttygttttttattgtagtyggaggatgagtygagagggttgagyggagagtgtggttttyggyggttggaggtaggagaatatgttgygttygttygtygyggygtgagaggttygaggtgggygygtyggggtaggggyggtygygggygtttgttygtttagtgggygttgttyggatttggygaggtggtggtttgtaatattgtgttygtattgtttattgtgggtygggygtygagttttygyggtygygagggagttttttgggtgggaattggaggtagtgggggaaaagtttggagttagaagttaggtagyggttgtygyggyggttgtggagggttgtttgyggtatttggyggygygygttttatygygaagagygggaaggyggyggttgtagtgtgygtaaagttttgggtggygygtaaaggygtaggygagggtygtygtatagagtygtttaagttgtggtyggagygttagggygatttttgggaattttttaagyggaatttttygagataagyggtttttgttttttgatattttagtygaggtygagttgaygygtagttatttaattttttttgtttyggggaaataattttattygygtygaygattggattttggttggttgggtagygtygagattttyggggggtttagttttgtggttttgagtattttttygtttagttygygt

SEQ ID NO: 6931 - DNA, 824 bp, Artificial Sequence; identical to SEQ ID NO: 6930
  Description of Artificial Sequence: Synthetic polynucleotide

SEQ ID NO: 6932 - DNA, 1415 bp, Artificial Sequence
  Description of Artificial Sequence: Synthetic polynucleotide
ygtttaaaatgatttygggygttttatttaaagagaygttttggtttaggtagttygttggggtygaaggttttattttttttygatttatygggtttygyggyggaagttttygtttaggtaggggatgttttaggagggaaggaggygayggtgtttaaggaygtyggaagtyggggattttygtttttttygggtttyggttaggttattagtgttggttygyggygygggtgtttagttgygtttgggatattgygggtayggttgtggyggtaayggtagyggtygtygygtygtygaygttyggtaggattgagygtayggagyggyggaatttttygtttttttaygtgtagagtagyggattgagygyggatagggygtagtataggagttagttggtygtttgtattttttagggtatyggtagygagaagtygttggttaggtttatttatattagtggttgygtggttagtaggaagaygtagtagagtagtagtatygataggtygttgagaygtygttgtgttygtygygggtgtagygygggyggtaggggttgggtttgygtygggtgygyggygttatyggggttyggygygtgttgggygttygggaaggyggyggyggyggyggygtagtygggtaattggtgtagtaggtggaagttgagtaygttgattygtttgaygttgataygtaygyggygtaygatgtttaggtagtagtgtagtagtagagttgtttgygttagtagygtygyggyggttagtagygtygggtagtggattygyggtggygyggygtygggtygyggtgtttagggygggagtagtagtaygaggtttagggygagygtttaggatagygttagtatgttygtygtgtggygtttttggtatagygtttggtaggtggygggygttygggtgatgagtaggtagyggtttagggttaygaggtagtgggagaggagggatatygtgagttygaggtttagtagtttatttygtagtaggyggtagttgtttttagygtygttttagtttgyggggggtttygtagagtyggtgggtaggagttygagtatygttttttgyggtatttagagggygtagaygttgaggtyggyggygtagtygtttaygatgaaggygttgttggtggtttgtagttttyggaaggaygataygagatagatgattatgtygttggttagygtgttttygatggttaggttygaatataggagtgatatygggatgygtyggttygtttaygatttttttttttygtagagtagtagtagygagttatyggtggtggaggaggtggatgtggaggaggagttggttattttggttaattttttatatttttttygttagygtyggtttttggtagygygg

SEQ ID NO: 6933 - DNA, 1415 bp, Artificial Sequence; identical to SEQ ID NO: 6932
  Description of Artificial Sequence: Synthetic polynucleotide

SEQ ID NO: 6934 - DNA, 3039 bp, Artificial Sequence
  Description of Artificial Sequence: Synthetic polynucleotide
ygggygtttataggyggygygggtagygygagtttyggagtttyggaggtttgtgygttttgagtyggtatggatttygagtattgygygttttttygygtggggtttgtattyggtttttatgtggtttygggggaygagttttygggttygtagggaattttygtygttgygttttatttgtatttygygtygtttygyggttygyggttgattygtttttyggtttgygggtttttggagttttattttttagagtyggttaagtygttygttaagtatttgtaggatttygggttyggttyggtttttaayggyggttatttttaygagggtttygyggaaggtaaygygyggygyggggygtagygygtagttygatttttttttttttttttttattygggtttattygggtttttttgtttatttttttygttygtttattttttaattttttgtttttttygtttttygttayggtttttayggaagtygggttggygttggttygggttaggtaaaggttagtgtggggygggagggtgaattatygtttttyggyggygggaatggaaggygggaggtygagggaaggtgtagtggygayggttyggagtttagtyggggttygaaagtagttggatttgggaaggagagagtatgttttgtygaagttggattggaattgttatttattttgaagtttagattyggtygagggttgtggagttatattgagatttgaygaagaagygyggtttttgtgtttggygttttttgagggttttgaggttgggttttaatttagagtggttaaatyggggtyggttggggattgyggtttggttttggttygtttttttttttygggtttagtttttataggaagggtgttgtttgtgyggtagattggtatagtttggtygygattggtygtgtaatgttagggttgtttttaagayggaataattgtatttttattttttatattaagttggtttttttgtygttatgtattatgatagtygtttttttggtagttttggttttttygygttggattattatygttgggtagttaggagtagttttgggtagtttaattttttggygtygygggtttaygggtyggtgttttgtgttaaggtyggttggatygygtyggtattygagaatgygtttgaaggtaggggtttggtaggttgatyggtagttttgyggtygttygtygtattttatgatttgtaaggygtttyggttttygtattgtatttattttatttgygttgttatatttygtagtttaggtttagaattggattttttaagattygttttaattttttgtygtygttyggttggygtttygygggtttttayggagtggtygggtattttyggttttygtttagtyggggyggtgggaatgtgtaggggagggyggggaggtgtgtgtgggttaayggaggaaatgaaygagttygyggagtttygtgtttgtgttttttgaaagaggtttttttgataaaaattatagttgggatttaatgagaagtagttggtttggtttttttgattttagttagayggtagaggtygygtagtgyggtgagtatygttagagataggtattyggtttggtttagygtttygygtygggtaggagttatttttttaggttygygtttttgttaggygygtygtattyggtatygatagttygggttttyggattatatyggtgtygygygaattgtagagagygttggtgyggaaygagyggtygggagaaatttagtatttygggattygayggtaagggtggttttgataaygaaatatygagaaagaaaattaaagaaagygagygataattaagaaaaggggaagggaaattgaataaaataayggagagygyggygagaaygagagggtaaatggtagtyggygagttgggatgaattaaaatgaataaatgaggaaygaaygaataaaaaaagtaggagtaagatygaaygaaayggataattagagaagggggaaaggataaagagggagggagtagattaaataaaagaaaayggagtatgtttaaagygtagaatatattaaaatgagaataagggggtaagaaaattaaygattttagttgaayggaggataggttaaaygaaagggaggtaggygggtgygagtagagtttggtagagattttggyggtygttagtttttggygtttttgtyggtgtttaaygggttgttagygtttttgyggtagagyggatttyggygtagygyggygygyggtggagtttggttgtttgaggatagttagtttttagggtygtatagtttatttggtgggaagtggygggygaagagggaattygttttatttttyggtttttaaaataatyggttyggagygtttttagtttataygagtgagygygtagttgygttttatttgyggygygattttttaygaggttgggtagttgygygttttagagtttggygtatttygtttttttttygtttgtagttygtygttygygtagttttaggtygttttttgttgagagygtttagttttgttttgaatttaggttgygtgttggygttgttagttattttygygtygttygygtttggttagtttgtttygagtttggttttgaygtygaaataygttttyggtaagagatttttattagagttttgttygttgtygttgaggttttgagtyggatgattyggtygatygttaaagtygaggagagttttaagtttttagattygggttgaggtttttgggttaaygttgagaatttttaagaagggtatygaggttttatyggggttttgtttayggygtttatgtttattttggttttgagttttyggygggagttgtaggagtttgggttttagygagttttgtaggtygtttagtgattttatagtggtyggaggaaatagtgyggygygggataaggttgtagygaaatgtgaaagttaaggttggtttygygg

SEQ ID NO: 6935 - DNA, 1277 bp, Artificial Sequence
  Description of Artificial Sequence: Synthetic polynucleotide
ygygtttttggggagyggtttatttatagtattgygagtatttagtatygttttagagtayggygtatataggtataaatgtagtagaggtttttygattygttaggayggygttttttttagatgggtattataygtaygttttttgttttagttatttygttttttagatgygttttttaygagggaggaagggttttttgttagtttygaatttagygaggattagttttaggattgagaattaaatatttatttygggygtgatagttttgtttygtttgttaatgttattgttaaggttataggtttgaggtygagyggttggggttggggtttttagttgygtaagaggtttttagtggaattgygttttgggygygtagttttaagtygyggatgggtyggataggtttttttyggtttttygygggygtttgttttygtagttaagtttaatttttttyggagtttttgggtttttttgagtattagaagttgaagttyggtgtttaattygtgygtaygtygttggggatttygatgygygaaggagagygggtttyggggtttygtygttaggtaayggyggttggagyggygagaggagttygggaygagygtagggtygggyggatgygggggtagygtygttttatattttggtttttagttttttttggttggggyggggttagaatagggaaagttgtagtggtyggttyggtaaagttaggyggggygyggttagygatttatttgttaygygtgggtagtygygtagattyggttygtgtatttyggtygagtagttgygattttygaygggtygyggaygtatagtttttttttygggttataggttttyggttggggttggggygattyggagttgygygtyggygtaygygatttygttygttttttattttttgttttattattagttttaatttggttttygttygtygygygttyggggtttaggggagyggygyggggatttaggttttayggyggagagagygygygggattgygaagattggggtygagtgtygttttttttgygttttggtagygtyggttttgyggagtagaayggagttgggyggagygttgygygtattgttttttygtttttygaaaggttattttggyggyggggygtygtgaygtaggtttgatttaygygygggtyggygttaatgygaggttttygggtagygagygaggttttgatggtygaygtaggyggagagggtgggygtggggygg

SEQ ID NO: 6936 - DNA, 2394 bp, Artificial Sequence
  Description of Artificial Sequence: Synthetic polynucleotide
ygttgtaaatgygttaatatttyggttgttagygtatggygagygttttttaygtttattygtaggagyggygtttyggtygttttttygtttttagtttgttttgttttygtttttttttttttttyggttatggttatttttggaygtttgagttttatygtgygtagttttttagatttattygagtaggaygygtaatatttgtygaggygggagttagaattaygygttttttagttygatttttgygtygtttggttggattyggagygyggttattatttttgtaagtgygtggtggattgyggtgyggggtgggaggtaggaggygtggggtagtagaattaagggtttagtttaygaggggtyggaaagtygaaattttagtttagagtttagatttttttagttttggaaaygggagttttgttttygaatttttaaygtatttatttyggtyggtatattttaagagtagatttttgtttggtattggtgtttygagatttggggtttttgtgtttgaygatttttagaggtyggaataattgaaatttaaaaygygtygttatttgtygtttttattttatttttygttttttttttatgtttgaaaatayggttaygatttttaggttttygtttgggatggttagtgttggygagtttatttttatttygtttttatttagggtttygtaaatttyggtatattgtagtgtagtygatttggaggaggtyggygttggtgatttagtttgtgataaattggtyggttagygtaattatyggtgyggatatgttaagagggtttyggggtgggttttttyggggtaygattttaggttygttgatgatygttgtggtatgaatgaggttatygtattyggagaggtggatgtttagatgtggatttaggaaatggttttatttygaaagtttygggttagtgggygtgttttttggttagtgtttttaygttygygttagaagggtagtaggttttygtagggttyggygttttatttattygtgttttttttgttgtttttagtttyggaygagagtagtttggagattagttygttagattygtygtagyggtygttygttaggttygygttttygggttyggaygtygagaaaaggaagaagyggygggtgttattttttaaggygtagaygttggagttggagyggygttttyggtagtagyggtatttgtttgygttygagygygagtagttggygagtttgtttygttttaygtttaygtaggttaagatttggttttagaattatygttataagttgaagygygttygygttttaggggyggyggagtygtttgatttggtagtattygtygagttgtaygtygygttyggtttgttgygtygygtggtggtgtyggtgtttgttygygaygggtagtygtgyggyggyggyggyggtggygaggtgggaatygtygyggtttaggagaagtgyggygtttttttagtygtygtttgttttttgtygggttattttgttttyggtttyggttyggygtttggtttttttttygtttattagtatttagtatttttygttttggttttttggaattggtgaggtygtagggyggtatttggggttattttygattttggagygygttttgygattggagtagggtyggagtygaaygtttggaaygtttttygttygtttttttgtagttttatttttttgggygttagggtttttggygygtttttattagtygtygygtaagtatataygagggaygtgtgttagagtttttttttttattttttttttatygttagttttagagttagattttatgtttgggttttatttgtatatttttaaatagygatttgtataggaagtaagttatttttttaaaaaatagagtattttttttygtagttygagaataaaatgtgtggggttgggttttttgygygtttgyggggaaygtaggygggagtygtgttttttagatyggtgttygtatygttggttygttttttgattggttaagtggggttyggttttagttggatygaagggygggttgtagtttygatayggttttaggaagatatttgggggatggaggggtggtgatgttagggttgggygygggaagaaaaggagaggaggaagttgaggtaattttgggatttttgttagygggaggygttattggttttagagtgatttygatttttygttgggtttttagagttgttggygtttygaatatygaaaagttaattttgtggattaygatagggtagaaggagttttttyggagatgagtyggygaggttaggtgyggggygygttgtatyggagtagtttaggtygggtygt

SEQ ID NO: 6937 - DNA, 1627 bp, Artificial Sequence
  Description of Artificial Sequence: Synthetic polynucleotide
ygtttygggtttggagggaggggaggtttttyggaaaggggtggygagagattttygttaygatttttaagttttttygygygygttggaggggatayggtgggygtttaattttyggygtagtagtaggttttataggttgtttgttggggtttggggaagtygaaattgygtatttygggattygggagtttttygtagygyggtttyggygtggtgattgggaagygtatattgtygttagttagttagtygtygtygtattggtttagtttygaaaatttttaggyggygtagaggtgtttaattttggttattayggygtygygtygtyggtaygtygygtgggttttagatagygttagtygttygggtaygaagaatatttggtttggggattatagygggttatygatygagggtagggtgggyggagaggggyggttgatatttaggaggyggagttggggtgygggatygtagaggtgttggatygagtttgggtaagaggagttgggggatygaggtaaaagtgtagggagggtttggagaggtgagttggagtttgggygggygggygggttgatgggggggyggtgttttggagggattyggagattttgttttgattttaagttgaggtttatttttygttttttatattttttagatttttttttaagattttgttttygtttygygttttattygttagygyggaggtgaagtagaaggygtygtagyggtygygtattyggtygyggggttygtagttgyggatttygggtyggtttyggtygtygtayggggygygtgyggtgagtatagggtagygtayggagttttygagtagttagttygygttatattagtttagattttyggtttaagttggygggagayggyggaggtyggggataagaggygttataggtaggagttagattgagttygtttggygttttttttygggtttttgagatagtttygyggggtttgggaagtgttgggttyggtygtttattttggtagagttgggagtaggtggttaggygttygttttgtttttygtaygtttgtttygtttygtagtaattgaattggtatyggtttyggttgggttggtayggaaatattatatttagggggtggyggggattttggggagggttagyggatgggagyggagggggaggaagggyggygyggtttgggagagggagttggggtttttaggggtgyggaggagatattgggaaggagttttgggagatttaggygaggyggattygttgttatataggaatggggygggagyggaagggttttattttttaagtttaaggttagygttaygttttygttttygatgtygttgatgagttygtagyggtatyggttttygttttttaggygtaygttygygatgattagggaggygtttagtygatgtttttttygtattttggygygtttttttaggggtttatattttygggygtgtagttygttggtgatgaggattagygtttttyggagttttttaggttttattttgttttagygtattttgtagttgggaggygtggtgtttaggaygtagggtagygtggtygtggttttayga

SEQ ID NO: 6938 - DNA, 271 bp, Artificial Sequence
  Description of Artificial Sequence: Synthetic polynucleotide
yggttygyggagttagygtttttttygygtygatttygggtttygggyggtygtyggggggygtygggygtatttttygttgttaatttttygttygtgttttygttygygtttgggtttygtygtattttagtagaagttattatagagaataaattatttttttgttttygagatgggttttyggggaggaaggtaaattgtttgtttygtgtataataagttaggygtggagagtagygyggaggaggtygyggtagttatygagygg

SEQ ID NO: 6939 - DNA, 884 bp, Artificial Sequence
  Description of Artificial Sequence: Synthetic polynucleotide
ygtagtattttggygaatttttttaygtttttggtgaagttgtttygataaattygaaatatatgttgtagygttttttattgttggtygttgaaygtgttttgggattaaggttttagagagyggayggtgttygagtygttgttttagttgtgygtttgtagtttttttagttaygttaagtygtyggtgygygtttagttgttattggygaaggaygagatttggaggtagyggagggggaaaagtttttgygggattgggagagaatgaagattggaggygtgtagtaagtggtygggagagtagttagtataaagagaaggaagaaagaaataagaggagatgagttttaggaggyggttgatgttagygaattttgtgtygygttgttttttttyggagttagggagtagygagttttttatttagatygygttagtgygtttygggttttattagtttttattaggygttgtttttttygtttttatttagtttttttttttygttttttygygagtgtatttaagygttttygttttatttatttttagygtttttttaagtttggaggagygtttagagtagtagaaatagtaggtattttatatygttyggygtggggatttygyggagygtygttgygygtygttttttgatttgygtatttttttttttygtygtttagtttaygttttttttygttgggtgttagttaatttttaagtttagatttyggtagtttttttygttgggtttgtyggyggtttgttgtttttgtygaagggygttttygtttttagttgtgygagttgtaaagaggtyggggttttaggaattttggygtygtygtttattttagtaggttttataatyggygt

SEQ ID NO: 6940 - DNA, 1007 bp, Artificial Sequence
  Description of Artificial Sequence: Synthetic polynucleotide
ygygggtttggttttaatttagtaygyggaggtttttttttttttagttttagygaaagggyggygggtgggaattattygttattttggtaatttttttttgtygtttgtttataatagtttgaattatatttttgttaggtagttattagttygattttttttttttttagttttygtttttttttttagygtttaggttgggggyggygtyggtgttagtttagtttagggygaagtttttagggtyggttygggtygggttgygggattygtygtggagygtaaagtgtttgaagttttygygygtattyggttttgtttttaaaggttttttagaaatgtaagaggttaggygtagaaatatatayggayggtagttttatgagaaaatgtagataaagagttyggyggtagggttatatgttttttataatttttaaagtygttattttaattagagttttttttgagttttaatgtttaattttgagtaaataagtygttttgaaagaagaattyggtttttaattaaaagtgtattaatattttttttttttttaattttygyggagtaaagtttygygygggyggaggygaggttaggtygyggygaggtygtttygggttygygtygtttygygtygtygygygtttttaggtgaygttaggygggttygggattagggtttattttgygtttttygygtygygtygtagagttaattaaaagtaatgttayggtaaatttaaaggtttttygttggyggagtygygttttygggttagtttgygagagagggtttttygaggtaggtgttggggatttatttgtgtgtgagtgtgagtgtgtgtgtgtgtgttygygygagygtaygtgtgagygtttgtgttgaaagggagagttttttggattttttggagatygagattgttttttttttttygtttatgtttttagtttttttygtatatgtattagtgaagaaaygtayggatatygtygt

SEQ ID NO: 6941 - DNA, 2191 bp, Artificial Sequence
  Description of Artificial Sequence: Synthetic polynucleotide
ygtygygttttgttyggttttatttattyggtggygtttgggttygttttagttttttatttttattttagggtattatttattagggtttygtttygttttagttttaygtgyggggttttatttyggygttagyggttttttaaatatttttatttttatatattattttttttttattyggayggtagtygaatagggataaaatttatggygtatagttagtttttttygyggagtaygttttgtgttgttttagtygttggggttttttatttygggttatagttttttggygtttttygggtygaggtagtygggtygaggagtgtyggtgtggttyggttayggggyggggtyggygggagtttyggtygtygtygtygtygttgttgttttygtttgttttttgggtygttygttygttygtygttgggtgygttgtaygyggggggtagtygtggtgtagaggtttatgtagyggyggyggyggyggyggttgttgttgttgtygtygyggaggtagatagatygggygttgttatygtygttttttttyggttttatgtygtygtygttgtygttttttttttttyggygaggggyggggggtttyggttyggggtgggtattatttttygtagygtygtttttttttttgtttttygttygggygttggagtyggygagggtattygtygttttttaggagtgtatttttygygygttttgtyggagygagggggygggygtgggyggaygtyggggtagyggggatttygygyggttgtaagaggagggggtttttttaaggatgttyggyggtttttygtttttaggtgygagttgagtttgatygggagygagyggygygtygttatgtyggygtgaygggygttttyggttgttygygygggttttygygttgttttaygtygygtygtgtyggtatygggttgtaggatgggttgtatttaaagtattatttgtaaggygyggattyggygygagaatatygtggtgtaygatgtgtgygttattatygattagtgttttaygygtatygaggagatttygtttatygttttgygttataagattttttattttaaagttttygttygygtggttatgttttttatttttygttaygagatttgggtggtgggttggatttaggygtgtaattagatggagttttttaatatttatagygatttgggtatgtaagygattygtygygyggtaygggagyggattttgggtttttagttttgtttgttattttgatttttttttttagtttttttttattgttgtttttatygtttttttaaatttttttttygtttttttttttattttttttttttttaygtttttgttttagtgatagggygggtgtagggaggttttttgygaaggtattttttygtggtttgtttttgattttttagaaaygygaggagaaaggtgyggggygggaagaaygygataaggagggttygagaggyggaggtggggatggttggygagtgtttggygagttttagggygtygtttgtgttttgtggggtttttygggaagagtttgggggaaattatagaggagtggagtggagtgtygggggygtatgggttgtgtygygygttttttggagaaatyggagygggtttggaagagtaggtttygggtattygagygggagttggtagttttgtttttgttttygygattgttgaagtttygaatttttgtttttygggttagggagttyggaggygttttygtttggaattataagtyggatatagttgtttttttgttttygygttttttggattagttttggtggggagttggaaggtatygagtgygtttyggttaagaagggyggatagttttgtgygagtagygttyggttggygyggygyggggtgttttttatgttaaaggaaaggatggattttttgtttgtttagggtttttattttttaaaatttttttaattgyggtattggaagggatttttttggygtttatygtygaattttatyggygagttgggagttttttaatttttagtagygtyggttggtgygygtygggtttggttgttgyggtgaagattaaggatygtygyggttttttaatygttaggggtygtaggttaygggyggtygygttygg

SEQ ID NO: 6942 - DNA, 859 bp, Artificial Sequence
  Description of Artificial Sequence: Synthetic polynucleotide
yggygygttaygtagggaggttgttyggggttggygygtatygagggggtgggggtygagttyggggyggatttttttttygatttttygattggaggatagggaggaaatggttttgtatygtaygatgaaaggtaggtaggagggttattaggyggggggtggtaggggayggaggatgtttagagttggaggatttygttygttttayggatatygttattttgttttttattttattttgttttttattttatygtagygtttggtttatttattttttggttttygttgttygtttaygttttaayggttygtagyggggtygttttattgtygtatttttatttygygttttgygygtttatttgtttaygaagttttygagtatygagtttttgtyggygttttggtygtttattayggygatttgyggtagttttagtaggtagttttgttttagygtygaaaaygygttttgtagayggtttattagygggattagtttttttatttttyggttttttattttgttygaggggtyggygattagttggtttttgttygtttttaygatttgatagggagtaggggtygygttgttttggttgttgttgttgygtygggtttagttagttaggttttggygtagaygtyggagttygtygttagttygtygtttggttttgatagttaaygattygtagygygtttgygygggygggtaggggygtggtttattttygygaygtttygttttygtttygyggttgtttygtttygggttttttatyggattattaggttaggygygtaygtattgtagtttagttgyggttagatgttayggtttttgygt

SEQ ID NO: 6943 - DNA, 791 bp, Artificial Sequence
  Description of Artificial Sequence: Synthetic polynucleotide
ygygygattgtagttttggggggygygttyggaatygaaatggtttaagagatttgaggatyggygygtttttttttttyggttttagtttttaattttygttatagygtagagggggtagtgyggtgggagggggggagttgtggggttggggtttyggtttggtyggtgaagttttaggattygttygtttggggttaaggtaaggggtgyggtaygaggagygtagggagtttygagttttaggygtagatttagttgyggattygtygtatagttttggtgttgtaagygtggatygtgggygtaaggtttyggygggaggtattyggttyggtygyggtygggtttgtagggttttggygtagyggatttyggygygttttggttygyggttygtagggtttagayggggtygagatagttaagttyggttygttygygttaggygttggagttaaggttgaygggyggttttgaattatgtttggaggagyggygyggtttttagggtttygttgagaygygttgtagggttgttygggttttttttyggygaygyggttagtagttygygtygygtttttagyggyggtaaaaattaggagtttyggggttttgtygggygtyggtattggagggtaagagatgttggtttttttyggggtttattatttyggggttttatagtatttaygtgggatggggatttyggagtagattayggayggaaaggaayggtggttttattttttgtaaaagaaattttygygygtataygggtgtttygg

SEQ ID NO: 6944 - DNA, 586 bp, Artificial Sequence
  Description of Artificial Sequence: Synthetic polynucleotide
ygggttgygygtttygagttgtaygggtaggtatttttttyggttttgttttataaggtggggagagyggggttggaygygggagggggygggggggggagygtgagaagaaaygaaatygygggaaggaggggatatyggygggttgggtagagggygaggyggaggttaagttgggtttgggygtygtygttttygygygygtttgttgtygggttygggttattyggagagygygggygattygggtttygygtttgttygtygtygtygtygtygtygtygtygttaygygtttagtttygggttgttygttggttyggtttyggtayggygyggygygggggyggtgggtgtagttttagttgtygtgygtttyggygtttttgtgygygagtttygtttagttttttttygtatgtttttgtgtgttttttttygtaatgtttttygtgtttygyggggggtgtgtggtayggttygggygttygtagttttgtagtttttygttgtttttttttttyggttygtttttgtygttttttgtyggttygttttttttttttyggaattttttttttttygt

SEQ ID NO: 6945 - DNA, 1678 bp, Artificial Sequence
  Description of Artificial Sequence: Synthetic polynucleotide
ygggatygayggyggygtttttttttygtttttygtyggtaggagaggayggggygggagaggaaggggttagttgtggttgtagtygttatttttyggygttygggattygggaygtttagtygggttttgtagagggtgttttatttgggtattagyggtttttygtttttagttagggtatygaaggygygttyggygggatgtagygaattgttttttgtttygggatagtggagyggtagaaggtttaatttttyggttygtttaygttygtaaggtggaaaaagtggggtgaaatyggggaaatttagygaaattggggygaaagaagagagattaaagygtgttatttaygtgttagatggygaagaagatgagygtagygtatagtattagagatagtatgtagtagaaygtagygaaagtgaaggttatggtyggyggattttaattttattatataygttaagaagtttttaggagttygatgtttttttagaggatygtattttttttaaggagtygygtttgtaygtttttttttaggttagtgtttaggagggygtatagttagygaagygattygagggttagygaataagygttggattttygtaggtttyggygattttagattyggtttttyggygaagataggaaaaygtgtgtygagagtygttggagggaatygttygtaaatygaagaagaaattaaattagtagygaatatttgtaaattagtgttaagttgtgagtttttygagattaataygataagygatgygaygattttayggaggatygagggaggaggttttattygttttaggaagagttttttgtttttttttattaaatygttgaggagagaygagygtttygtttyggattttttygygttatyggggygtaaayggatagtgtttagygaggtgttygagyggttttygagttttttttaaattttagagtygggtagygttttttttygagagaaggagtttttaggtagtygggaggaggtaggtttygttggttttgygttttagaygyggtttttagygtagtygtgygtttygaggygygttygtttttaatygtgatttyggttagtyggttttygtaatttaagtgtttyggaaatygggggtyggatyggggygagtattggttttatttaaygggttaattttagttygggtggttgtagtagtgggttttaggttaaaygttgtagttygttttatttgttgttgtygttgtygtygtygtygtygtygtttttgttattgygagaattgtagyggtgygattygggatttttttttttyggygttttattttygatttttgtttygttgagygygtttttttyggygggyggagattgtagygtygggggttgaggaaaggtgggtggygaagygtygtygggygtttggtggtygttgtygtygttattgtagttgtgtaygttygtttttyggaggaaatttgaagttagtagtataagtagggttggaggtygagyggaggtggggygggatyggttggagtagggattttttaaataygtgygtttggaggaggtgggaagttgyggaagggtatggtgtgtgtttygygtttaaaygtygtagtygtttttttyggtttttgtagtttygtttatygg

SEQ ID NO: 6946 - DNA, 1600 bp, Artificial Sequence
  Description of Artificial Sequence: Synthetic polynucleotide
ygagayggagttagtatttgattagygattaatagtggatyggygaggygggtttttaattagagygagatttttagaagttggatagtttttgtatttatgggagtatgyggygtagttggtagtgatttttaggaaatttyggtagtagtygtygtygygggtgtggtgatttygggttygtygtttatttggagygtttyggyggygtttggtttagaattatyggggyggatagttttttggagttgtaygyggattgyggaaggggatagtgagygggatyggttygtatttygttygygggttyggatygttggaagtattygggtttttttttttttttgtttttyggtttygttttttttttttygygttgygygtggyggtttygggttgygygtttttgtaggaggagatyggtattgtygtyggyggttttttttttaatygttagtttyggtygygygtttygtttygtttygyggaggagggtgggggygtttttygygtygggttygtttagttttttygyggttgttygggtygggttttttattggtyggygggygggaggtgaggggyggtagggttygtttttggyggttygygttygggaaggtyggtagtygagygtyggaggtygtggagagggygggtagggaggyggygggygtygaggagatgtagyggyggyggtggtggyggtggtggyggyggtggyggyggyggygtttggtttyggtygtagtttttgygtttygttygttttgggtygtttttgttagtttygygygyggttygtttttygtygyggttygtagtttgyggygttygagtttygagggygttttttygggygttgggttygaggyggttaagayggygggtyggtygggtayggggyggygggygttgtgttgygggttgygttggtggggggyggygggtygyggygygggtttagggttyggygtgtgyggttgggaggtattgtgggggygggygygygggyggyggtyggggttatggtygagggyggygggggygygyggaggagggygtyggygttgttygaggttgttygygygygttaygagagtttgtatatttyggaygaygtgttyggygagttyggttyggatagyggygggaattttttttatagtatttyggtygtttygygttttttttyggtygttttttyggaygaygagygygagttttygggatttttaggggtygtttygttatygtttygygtttyggaygtataggagtyggaggaggaygaggtyggygygggttggagygtagygttgygggatygttygttttygygtttygaggatatyggyggtaaggggttgttygygggtggatgtygggggyggygttggaatygggygygggggaggygtgggtgttggggygggygagtttagatttttygtgggttggtttgtgggtgttttttyggaaataaatgaggttgtaggagyggtgatyggtttgattgtttttgggggtttygaattygtgggtggagagggtaaggyggaggtygtggttagtatttttttagtgataatgtygtygg

SEQ ID NO: 6947 - DNA, 2394 bp, Artificial Sequence; identical to SEQ ID NO: 6936
  Description of Artificial Sequence: Synthetic polynucleotide

SEQ ID NO: 6948 - DNA, 1160 bp, Artificial Sequence
  Description of Artificial Sequence: Synthetic polynucleotide
ygtaggattygtttttygatggaygtgagttttatyggttygttggtgagattttttayggagygygattattttagattttttttaatygtttygtttattattaagtatttgagttgtyggagttgggggttgatgtyggatagttttygggggttgaygttyggtgatttttttatgttattgyggtygtaggygttaygggtaggtgggtgggtagggggagtatggatagagaggaggggattygtgaggagtagattttagggygagagtaagagygyggtyggggtttttygggggygagygtygyggtagagttygygttttttttttttygtygttatttatttattttttygggtagttgtttttagtgttttattttgggygtttyggggtagtgygggttggggygagtggygagggaaagaatgattgaaatttttygagtagttttatygygygygtygttttttttygagttttagattgtttagtgttttagttgtaaagggttatttyggygtttyggtttttygttygtyggttygtttatttaygttyggggygttatttatayggtaatgtttttgtttttgggtgygtygttgggaaattttygaatttttataggtaaagatagagtgggatyggtagtttttagatttgaggyggaggggtygygggtyggagttttttgtagtygttagtttgggaagattggagtgygttgtttatygagggtttgygtygygtyggtygtttygggtygttttgtgygygttygygyggtttgtattygagygttttygyggygtgyggtaygatgtaggygyggyggtttagttyggtgattttaggtyggttygygygttygtygtaaygattyggtagtygaggtagygtygygttttaygttygttatygtygtygtygttttagtatatygtaggygtgagtttygtygygatygggagagtttttttagttgtgygttttygaggtatttggtygggyggggaggygtygggtyggggygtataggggttaggygggggygttgttgtttatttttygtttttygggygtgygtttygtttyggagttygtatttygygttygygtttygtttggaagttttggggtatyggaygygt

SEQ ID NO: 6949 - DNA, 588 bp, Artificial Sequence
  Description of Artificial Sequence: Synthetic polynucleotide
ygtaggyggyggygttttgtattgyggagtygygttttgggggagtagtatttttagtttyggygtttygtagttagatagttttttttagggtggtagtatttttyggttagggtgtagggattttyggggygaggyggtygygtattattttttattttggtaagggttaggatyggattgttgtaggygttgagyggggttattygggtygagtgtttttttatgatgagtyggtygtttgtaggagygttgtygtygatygtttatattttggggtyggttggagygygtttttttygggttygtggtygaygyggttttttgtygtyggggagtattagyggttygttttttttagtttyggttttttyggttgttygtygggtttyggttgtygygttgtttattgyggyggtygttttgtagygtatatttttttyggtygygtagttattttatatataygygygtatagttttttatttggaggttgttgtaaattttaaygttaygtataagtgtattttttgtttttatttygtagtttatttgtttygttttttttttygggaygtttagtttygt

SEQ ID NO: 6950 - DNA, 878 bp, Artificial Sequence
  Description of Artificial Sequence: Synthetic polynucleotide
ygggaggygaaaaygaaatttatttttttgygtttatttttgttagaggtttgtaggaygtgttttaatttggtatttygagtttagaataaaagttaygggggttgyggtatgggtagggggaaggygygyggtggttgaygyggggtaggggttttggygagygygggaggggyggttagtagtygttygyggggttggattgggagtttygtgygatttygggtttggygtttgggtygggggtggttttygggtttttttygggggtygtygaggttyggtttygatagttttgyggttgttgygagygtttttygagttttygtttygyggtgttygttttaggagygggygyggygttgtgtttttttatttgygygtagagggtygttyggtgaagttatggyggygggttaggggtaaaygagygttygagyggggttggtaggttttyggggygygggaggatygtgggattayggggatgaaaagttttgyggtttygaygygtttggagtaaatygtggttttgygygtttttgttttttttygtttttttttttttttttttttttttttttygttttttttaygagtttattttttgttttggtaattagtaaagttttttygttgygygtttttyggtatttttttttagaggygyggggygggagtyggggtgtygygattyggggttgggaygtaaggyggggtttygagtgtttygggygtttttagygtttagagygygygttttgttyggtatttaygtttttttgggygggttttagyggggggttgataygattgtygttygggatagattgygagygaaggattggttttaagaaayggttgtagtygygggtygt

SEQ ID NO: 6951 - DNA, 561 bp, Artificial Sequence
  Description of Artificial Sequence: Synthetic polynucleotide
ygagtgggygygaatttttatagtagygttaagtagtaggattatagygttagygtttggtttyggaggaaagataagttggagtaygtaagggygattygttttygggggtttyggttaggtatttgtygtatgtatttttttygtggtggtggtatgagygygygyggggygyggggggtaggygaggggattttggtaggygtygaygttttaggtyggattygggggtttttttgtttgtagttttttgttttaatgatygggttgyggggaggggagggtaggtttttttttaggtttttggtttttgtygattygatttgtttatttgygtttttyggtagggtttatttgtayggggttttggaggtgtttgtgtagagtgagtaygaaggggaagtgttattagygtggtttygagtaatttggygttgtatggtagtgggttttagagyggygtttgttygygtttttgggggttgttttatttagtttaaaaattagtaaattaaygaatgagtaaagttggygtygttagygattagygtggattygygt

SEQ ID NO: 6952 - DNA, 1235 bp, Artificial Sequence
  Description of Artificial Sequence: Synthetic polynucleotide
ygagttgagttgttygygaggttgyggtaggaggtttygttttttygggtagggttttttttggaggttttttyggttttttttagaygtattygygtygygtttttgtttttygggagtagtttttttttagtygtyggttttgggagttttatygtttaaaygggagttgagtttgtaagyggttaggyggyggtgyggttggtgttgttgttgatgttagagttagaaagtagttgtgattggatttaattagaygttgttgtagtaaatagataagttttttgygtgattggttttaaagtggttggtgttaaataattagtagaggygtaaaagtagtttttttgygttgggagtttagagtaggaggtagagttygygggaagttyggagtatttaggaygtygygygttttttttygttttttttgattagggagtagttygttttaggygtttagtygaggtttttagtttagtgggagtaagttatagagaataattygagagatagagagayggagygygtttttttgtttagttttgaaaagtgagtygttttygggtttgtaattttaagtttygtagtagyggyggyggyggttgtygggaaggaggtaggtgtaggtgtaggagggaggyggttttgggtttygygtttgggtttyggttatggtttyggttttggggagyggtagagggtttggagggttgagtagttaatttaaatgtaagtttaagaggaggaggaggyggaggtttaagyggaaaggtaaggatygygtggygygtyggtttttgtttttttttattttyggtttttttatttyggttttttatggggttttygggtttgttygttgtgagtagttttattttggggtgttggygggatggttgtttygtgtagggygttygggagtttagatttygtggaaatgtttggggtttttttttgtttagaggggatagtgagtagttaygttgygatatgtttgagggattyggaygaagtggggygagggyggygaggagtttttyggggatttygygygttttygggtttygtagtttttagtggtyggtygggttggtattgttttttatttttyggaggttatttygttttttagtgttaaaggaattatttaaaaaygggggaaygagttttygygttagttatttttatttaaattgtttyggaggaagggataggygaagttttgygatygt

SEQ ID NO: 6953 - DNA, 5964 bp, Artificial Sequence
  Description of Artificial Sequence: Synthetic polynucleotide
ygyggtggttggttgtagtttaygtttttaygatttttgtagaaggaaattaygttttttttttttttttygtatttttatttttattttaagttttygggaagttttgygttggtattagggtaagygtttgtyggttttygggagttaagygaggtygygyggtttgggaygtaaatgggagggagtagtygttgtygttttgyggggttagggttattgggtaggygtagygygggttaagagtgggaggtttagggtaggggattygtattyggggttatttttgtygyggygygttttgygttttagtagtgtatagggtggggatttttygaggatagtggtgygtygaygggtttttyggtttttttttttttataggtttygttgtgtggtgaaggagttagaagaggygatttgggtgttgagattyggggttaaatygtggagagtgtttggagtttatattttagatttttggaygtygtagttagtttagtaggttttatttggagtygtttyggggtttaatygggaggtagyggggtgtaggygagagggttaatgygttyggttyggttggtttgaggagtttttgtttttagygatttatagggtagagagtttagggtttyggtttgatgtttttaatagttggggattggagagttggaggggtygtagatttaggttagagtttaaagtgygtygygyggygagtygttggatttttttgggttttaygtggtttttgtgttatatggagtgataggtyggyggaaggygttttagtygtygtttagygttttttaaggtgtaaggaggtaggatttttttatattggyggygtagggggttttayggttgyggaygttygttttggattttttagttyggtagattttttgggtggagaggygttttttagggtygyggygaaggagagyggtttttyggtaygttttttygtattttttttagattagtttyggttttatygtttaggagagggttygtttgaggatttttgtttgtgtygygygtggttagtttyggtttttttattttatggttggtttttagttttttagagyggatatttttttttagggatgtagggygaggaagggygggtggagttgygaatttayggggatttggaggattttttggttttttggagaggggtattatgagagggatttatgggatatagatttgggggattgggtaattttattttttttggtaattataaaaattttgagtaaaygtgtttattygttatttygtagaaatatataatgtaggtttatataggtatttttgygaggttttttagttaagggygtagygtttttyggaagtttttggttttgttattagggygttatyggttttttygtattggggatatttygtttgggttttgygtagtygttgtatttaaggttttgggagtttygygtttttttttaggygttygggataaagtgttygagggtttygtagaygtttagttttgttyggggtttayggtygtyggggttttttaayggatygtygagggttaygttttgttggggtgtgagygaygatttttttttygttttatgaggttygttattagttaggtgttttatgagaygtygtggygagtayggttatttggtagttygttygggtagttttaatttaattttttgtttttyggggtatttttttttygaatagtttttttyggtttttttagttttgtttaaggggtttggaaatgttygtagttttaagaaaggttttatttaagtataggatggggtggggygggyggggttaagattgttttggggattgaatttattttygtttttagygattttyggyggataaagygtaagtttgtgtatayggtygattgagttattggaaatttagtttaygaatygtagttagggaaaygggagtttgtttagttgtttttgyggaggggtgtgyggaaaygttygygatgggaattttttgtagattatgtatggagggagtttataaaaaggaggaaggggagygyggtggggaggaggtygygtgggygtggaaggttttagggttttgggggtgttygtttgtttaggygtagggaatggygyggagttggttggggaaggagtygattaygtttygtaggttaattggtttaagaaattttgtaagygttggaaaaggtygttgaaggagttygttgtaygygtaygtatatatatatatatatatataaaattttaaaaaaaaaaaaaaaaaaaaaaaaaaaagagygtygagtatgygtatagagaggatgttatattggaatgagttgtagtgggagtyggaggatyggagygggygygygagggaggyggygggyggggagygagygggtaagggygggygagygagtaagygagygaggtyggtgttttttygggyggygatyggggtttgggtttaygtygagggtaggaygaattttattaggtaggaygtygygtyggttgttgttttyggygtttaggttggtyggagagtagtttttyggttygtaggttgagtgygttggttaggggttttttttagtttaggaaaaaaaaggaaaaaaaaaaaaaggaaggaagtttgagggagttggggttggaggtggygggtgggggaaggttggggagggtgtaggggagygaaagagaagggtaggagaagaaagygattgtatttgagygaagttttaaatttttttgtgygttttaggttgttatttttgtttttygggtttttttygtttgygttttygggttyggaaaagtygagtygtgygggagttygttyggagttgtaaagtgtttttttttttygggygtagtttgttttttttygtygtttatttttttygtttttgtatttattttagygaygtagtygtygttgttatttatttygygttttygygtttttttygygttggggtttttttttttttttggtttgggtgggagaaaaagatggtgaggayggggaatyggagatyggtatgggggtaaaaatygtgtagatattyggaatygtttttttggaaatatttgtttgagtaattgaaataaaattggtagtagtagttttggagygtgttttagygaggatggtttttttgtttattattttttttttaaagtaatattttgttatttaggggtttttyggttgtttttttttattygatttttttttaaaattgttgatttgagttggttttggagtttattttttaatatgygtgygtgggtatgtgtatgtgtgtgtatgttttgtagaaattygttaaaatgtaattgtaggaattgygagatgtatttattgattttgattaggggyggtgggaaggggttggagggagttgggggattttggagggtgggaagtggttgattttyggtggtyggatatttatttagagtttgattygtattygtgtttttttggaagygttataattgyggggaaggagtttttagaaatygtgttagttttaatatggygggttaaggtggtttttaaaaattgaaaataaaggttttgaggtgggaaaaaatttagttgaagtttttattttttagtttygattttttttggttattttaggaagygttttagygaattaagtggggaaaaaaagaaggaatgggttgttyggtttttttttttygtggttagagtttgtgtgttaagtttattgttaggggggaaagggatggagaagtgtttttggttyggattagggtatygaaaygtaattgtygtgtgtgtttgtggattagtgtgtaggtttgygtgtgygtagtttttttgggtgtgtgtgttaaagagaattatttygaatgtgtgtgtgygttttggaattagattttgttatgatttgaygtgataaattgyggataygtggtgtaaagtatatgagggtagagggagtgatttattttgtttttttaggagaygagttagttttygttttgtgtgtgttggattttgygygggtagattttygagtaggtggggygaggaggtgtttattaaaaggattaattgtttygggtattgggtgtaatygggttgtagaygttagtyggatttygtgtgtgtagggggygygttgtatttaatagtgggtttttgtttttttttaygtygttttggggtgggaggtgggggatygggatygaagtttggagaagattaaagtggtggtggtggtggtggggtggggtagaagggygggagygygyggttttgggagataagtaygtagggtygaggygaggggttgttttttttatttttgggtttygygttttagggaaggtgggggatggggatagygtttggggaagaaattgttttttgttyggtttaggaattttttyggygtatyggagaggggtatttttttgttttggygggtatggaggtygggtagtygtygggggatgtgagtgggyggygaagtgygggggaaaggtyggygttttagggyggggaggatttgggagtggagttyggagataaaatyggggttaggtagaggagttagagggaaagttagtaaaygygagttygggtgagagttatyggaatgygggaaygtagtttagtygggaatagggttttygataggggtygttygtggttaggaygyggtygttgaatagaggtygygyggyggtttttgttygagggatttygtgggygggggttatayggaggtygygtayggttttyggggttggygggggtaggtgggaggatttttttygggttygygaatttgatttggtagyggttaggtgtttggaagygtttttaaatgatagggttataaagatatgttggttaggtttgtagttagygtagtaaygtggtttgtaggagygtagaaygaggttagatagggttattyggaygtygtgttgttagtgggtgggggtygggagtaagyggtattggtttggagatttygyggtaggtgattttttttatttgggtagygaggttgaaygatggygataygtyggttaggaygygttygtggtttttttagtttgygtttgggygygttttttyggggtyggtttttttatgggtttygygaggtggggagtagtttaaaatggttttgtgttgygaagttgtagttttagtygygaatttttttttttgtttttttgaygtygtygttgataagygtaatttgttttaaggtttygaaattygygattttgtaygaggtygtgtygtggaagyggatgtatagttgattataaagaatattttatagggttttygaagggtttaagtttttttttttggtggggaggagggaggagtygagattgggtaggagttyggtygattatygttttggtatttaggggttyggggygtattagtagttggggttggggatttggatgygygaaaagtygagggagttttyggggaygyggatggggattattyggggtaatagttayggatatyggtgttygtggttgatggygtttgtggtgttygagaatttygggaygaygttggaaagtttgggagatygtttttaaatttttggagattagttygtagtttygttttyggaatttttaggatttttgggtttttaaagttgggtgggattttaagaaggtaaggygaggttygtggttttgaygatyggtygttygatttttygtttattttagttttttttattttgtttttttgaattttgtygaatygagtygggtttggggtttyggggtttygygtattaattttagtygygttttgagggttttygtagtatagtygyggttgattygaggttattggtgggaaattaatttagaygaggtygattttttttggatttggttyggttgtygt

SEQ ID NO: 6954 - DNA, 5964 bp, Artificial Sequence; identical to SEQ ID NO: 6953
  Description of Artificial Sequence: Synthetic polynucleotide

SEQ ID NO: 6955 - DNA, 5964 bp, Artificial Sequence; identical to SEQ ID NO: 6953
  Description of Artificial Sequence: Synthetic polynucleotide

SEQ ID NO: 6956 - DNA, 703 bp, Artificial Sequence
  Description of Artificial Sequence: Synthetic polynucleotide
ygtttggggattttygtgttgggtatttygtaygttttggaygygygtagttttatygggagygaattttgtttygtttgygggtgttayggagaggggttgggaagtygagttagttttggyggygattgggggygtttttggttttttgggggggygggggygygtattgttgtttaggatygggyggygggyggtggyggyggyggtggygygyggtggtygtttagtattygatttagtagygygtyggggattggttyggggygygttgggygtattatgyggygggtygggygygggygaggggygggtyggyggyggggtttattggygtygggttaggttyggygygagaggygygagygggttatgggttgaygtygagggtttgyggygggggyggyggyggggayggggygggggttygttagttgygggygttaaggtygtttagtaggttaagggttttygttygggygaatgggaygttygtttyggggtattagtygtttgtagttagaagtttttyggattttttggaagygtaaaaaataaaaggtaatgtgtttttgtttttyggtygyggtggtagggaggygattgayggtagtttttygtttttygtgtttttaygttgggtyggggaaaagggaygygtygttgtttttttattgggggtttggagtygtttatttygygt

SEQ ID NO: 6957 - DNA, 1315 bp, Artificial Sequence
  Description of Artificial Sequence: Synthetic polynucleotide
ygtgggygttygggggattygygggtattygggaygaggygagggygtagaaaatttggagtttaattagtayggagttgagttttygygttttaatttttaggtgatttygtgyggyggyggyggtagtagtagtggtagyggygatyggagttygtagtagtttygagygttttygggaggataggyggygagttyggygaatygttatttgttagtygatygyggygtttygygggtyggggtygggagttyggggygagttygaaygyggtttttttttygttygtygyggagattttgtygggtgggttgygggygtttttygttgtygtttgtgaaygttgtgggtgygyggggttgyggttayggyggyggtggyggyggyggygggagtygygagtyggggtygttygggttgtgtttygtttyggtagtagyggtggyggyggygtttgtggtttaggatgyggtyggggggygtattgttygttttgttygttagtttgttgttgttgttgttgttgtgtttgttttggtgttyggtagaygygttyggtygygttaggtaatttatttattygtyggtygygtttygygtygygygtttygtttggygttttyggatttttaagtygtttatygttttttttygggygyggagatttttggtygyggyggggagtagtttaygggyggygayggtttgagagtggagtgggggagggggtygtagggaggygatttttygatyggtggayggyggttggggagtagagggatyggttagggttgygggggttttagygygtatygttgtgggygaggtagttgtggagygggatttgtygtygggtttygtattaggattttatgttttttattttggtttttgttgttttttttttttygttttaaggtttttttaattttggggttggggatttggtttgggagtyggggagtgygagatttttttgttaggtaaggagygygatttttagttttttagttaatagttttyggyggggtgtagtaatttaagtttttttttyggttgtgtaggattttggtggaggaaagtagggaggttatttayggtattttygtagygttgaggaygtttyggagttyggygatygyggtatygygygttattaataggtatagyggygtttagygygggyggattggggttygggagttgygagtygggtatggggygyggttgtatyggtttggattygttgggagtaggtaggttgggayggygygagtgagtgtaagagtgtgygtgtgtttgaagagggygygg

SEQ ID NO: 6958 - DNA, 1316 bp, Artificial Sequence
  Description of Artificial Sequence: Synthetic polynucleotide
yggggtttttygaggtygtttygtygtttaggatggagtaggtttggtttttggaagggygygygggttgtttggggaygggggygttttttttygygtttygyggtttttttttttttattgtaggtagygygygtttgtagygttttgggatygaattgatgtttttgggaaaygaaattaaatttttttgaagtttttagttygggttttttttgtttttygttattyggygtggtttagttygggygyggaaygagggyggggtygtggttatygyggyggaaaygattygggtygggggygggyggygaggataagggggttttgtgyggtattygtttagtttgygttttggggattgyggtygggyggyggggttggaygggagtggayggggttgggygygggttgggygygttgggtyggttaggyggygygttgatygyggttttygtgygtttygtaggyggggagttygtatygtygygttygggtygygagtgatgataatttaagaggtyggygygggygggygtgagyggyggaggagtygggygyggygataygyggttatggagygggagtyggyggggatygaggagttygggttttygggayggyggaggygtygagagggtaggaygygtayggtgygttttaatttgttgtygttttygggygtygaggattttgyggttggygyggttaagggygagyggygayggyggygygggtgtgtttagtatttggtygataatyggtttaagattattaagtataygttgttgttttttttgtttaagaatttgttygagtagttttatygttyggttaaygtgtattttgtttttatygygttgtttaatttygtgtyggyggtgaaygttttttagttyggtttggtattggygtyggtgttttttattttggttattayggtttttagggatttgtgggaggattatagtygttatygtttygattataagattaattatttgggttgtttggtttttagtaggtgagttgggygggygggygagygagygygyggtggygtagggtagggygtttygggaatttggtgttgggtatagtgattggtaggggttgggtgtttagaaggtagttttatttagggtggagggttyggttgygygggattyggtgtygatygaagttatagygtygttaaggtttttttgtgttttygtygtagttaaaggggygttttggatgyggggaygygtggggattttttgttatttygtgtyggggttagaatgattttaaggttagaaatygayggtygt

SEQ ID NO: 6959 - DNA, 1110 bp, Artificial Sequence
  Description of Artificial Sequence: Synthetic polynucleotide
ygtttatttyggttyggagygtggttaggagagtyggtatygtagaaagygttgygggaagygggttttttttygtttattyggatttaygatttttagtaggtttagtttatttttttgatttatgtttttttatgtgtttttttygggaaggggygaggagggttagttggagtaattygggagaagtttgggaggattggtaggtttttttygtttttttttattggtttttyggaagtagagaaaaatggaagtygaggtagagttaggaaaaggygtaaaggggtagggttttyggygttaggagaggagtagagggtgggtaggygaygaggggaggaggtgygaggttagagatttttgtagtggaggygtygggagaattygaggtyggtgttttgttyggyggtttataaaggaaggagaaggygtygygttttygttatttgtgyggyggtttygagygttttygygggagttaygttttttagtagttttatttggattttttgygttatygtygtygtygttgtgggaggygatttggatatgtttttttggattattggygaaaagtyggttyggagygaagtagttagttttyggyggygggttttttttttttygttttygttttttygygttttgatyggttttgggggtygtttagggtttaggttyggtygttttyggygtagygtttygtagygtttygggattyggygttttgttgttaggygtttagtgygygggayggggtyggggtatygggygaagygagtygttygggaggygggaygygggggygyggttgyggtgtttgggagaggggagtttttagyggggtagtyggggtygggagagygggygtagygyggyggggatyggagtygygggygtygggaaaggttttygttaggaggggagggaatttygggagygygagttagggggaggygygtyggaaagygagagtgataagtagtttataagtygaaaagtttttygygggaggygygygtygygtgggtttygatttagtygttgygygtygtygtggtatataggttgaaaagtttgygaagttatagaagttaggttyggygt

SEQ ID NO: 6960 - DNA, 1655 bp, Artificial Sequence
  Description of Artificial Sequence: Synthetic polynucleotide
ygggttttttatyggygaattgaaattggttygtgaagaagtggtaaagtaatataatttttgtagyggttaggtyggttttygggaatttygttatgtygtygtygttatttttttattttattygttagtttttygtyggtgttygggggttttygatgtaataggtaygatygggttaaaygttgyggatyggtttyggtaggattyggaggtttttgtaaatgtygttgygattttatagtagggaatygagaagaggaagaagygaaygygagtaggagygtagygtttttyggatttttgaggttttttttgtaatttgttatattygtagtttttattygatattgaataataatygyggggaggagaggttatttgtagtygaggttygtaaattgtyggttttattygggtagygttaattyggtgttygyggayggtgattttygagttttagygatgygttttattgggtttaaaatagatttaattttatagttagygtygttgtttgttttagatttattagggttggtyggttttgtaggaatttttttttgtttagggatggtttyggtaggaggtttaggtttgygggaaggaggttgatgaygaaattttttygataagttttgtttttttttttygttygaygtagggygygygttttttttygtagtyggaggaatgggtagttttaaagagttgagttttgggaaggttagggttgtagtagtttgaggttygaagttaggaaaaaaatgtgtttaaaaaaaaaaaaaaaaaagaggaagaagaaaggaaaagggtggagtgggagggagttaygttggaatttatygggagagggttttttygggtttaggaggaggtggttttaagttttygyggagttttaggagtttggtggyggaggaggygttgtygtygttaygttttttygygttttttttttatattttgaggagggaaggtagttygtaatttgttagatttgtygtygtatttttttttttttttttttygttttttttttygtttttttaggttttttttatttttttttttgaaatyggtagttygtatagatttgtttaatggttgtatttttttyggggttggttgaggagtygyggttaatagattaagtygggggagtttagygaaggggagggagagggttattttagtttygtgygttttaggtagtyggttgttttagagygyggggagaggggataggtyggggagttatygggggagygyggggyggtattttygygtygtyggggygttattttygtagtttgttygtaygttttgggtagtttygttaattgygttttatatttatttggttttygggtygttttygygttygattgyggggggygatygygtttygtttygattttggyggggtttttttgggtaygaaagggttaattatagttygttttttygyggaggttggttttggtagtggttagggagtggagaaagtaaattagagtyggttyggttatygattttgygaagttttttygattttagtttagygygggagggtggyggaaggtggtgtatygtagygtggttttygtygttgtygtygyggttttgtaaagtgttagygggggygaaagyga

SEQ ID NO: 6961 - DNA, 1655 bp, Artificial Sequence; identical to SEQ ID NO: 6960
  Description of Artificial Sequence: Synthetic polynucleotide

SEQ ID NO: 6962 - DNA, 304 bp, Artificial Sequence
  Description of Artificial Sequence: Synthetic polynucleotide
ygyggtgggtagggttttaggaggtagttttygttyggygatagttttyggggygtaatttttygtaggaygygtatttgttaggatagttattaagaggatgyggaggttgggggttttttyggggataaaattagggtattttaaggaattttttgygygtttaggtttgtttgtgaagttggtaggyggaggataatgggagtaggggtaggtttttagaggygagttygtttttattttttttatttgttttttatttttgygtyggtygtatttatttygttttttttttagygttygt

SEQ ID NO: 6963 - DNA, 1666 bp, Artificial Sequence
  Description of Artificial Sequence: Synthetic polynucleotide
ygaaatygygygagtggtaggagtaggttaggtyggaggttttttttyggtttttaattyggyggtttgttttttttttttyggggygtttgtatagtagatatttgtagtaygggyggtygttygggttttygatataaggygttggtatttgagtttttgattggtaatgtattataaatygttttttttaggtttttttagagtaggagtayggaggttatygtgtttataaatttttttgtgttygttaygttttttgggttttgggygttygggtttttagtygtagagtaygtttgttygtgggaattttaatatttgtgtttygygaggtyggyggggygggggygggggattgggattattttgtttttttttagttyggtttttttygttttgttygtygttggtttatagagygtagygagtggaaygaattgggtgygtygtttttagaygttggyggaaattaaatgatgaggygaggtgggatattygtttttygtttygyggtygaygtttagtttayggtaaaggtattatayggtgtttygtttygyggygaygygagyggygggatgattyggtttgggttttggygtagttaaaggttyggttygttggggygygattttagttyggygygtatagtttttygagttttaggttggattgggtgyggttgtatttgtggagtgggtggttyggtgattgttattygggttagtgttgttagtagatgtgtatattttgggygggggttggyggtygagtgttattagtaggggyggyggttaggtagttattygtygttttttaagttyggygttgygygtagggtttggagtattyggtgttgagaygygaatgygtataaagagaaaagtgtttttagtgtttttttaaaatggggaatagggaagaaggataagtattatgtaagattgttattgttatttgttttttgyggattatgttgttttttttttygttggtttggttttgagtattgaaagtyggggagagggygtyggttttagagttagtygtattyggggatygtaggyggygttggttygggttatttaagttyggtagatgagtttttggtttgygggggatygggtyggaggttagggggayggtagtgtygtyggagggagygygtagtttaaggtyggtgtttyggtttygygygttttttttygggttygtagggaattygggttatttggggagtygggttttgtyggttaygttggtttttygyggttttagaattaattaaaygttttttttggttaagggaagttttgygtyggaygggggtgggggygtgtgggggyggtatgtgggtatyggaataattagttttatttttgygtttttatagaattygyggygtagygagaagtgaatagyggtygtttgaatggyggttttaaaaggygatatttgtaagygyggtyggttgtgaattgaattgagttaaatgyggygttygttygtatttgagtygygagttattagtgttaggygygttyggtygttygggyggggaagygygyggttaggtygttygygttgaatgyggtaagttgyggygyggtygttttatgggaatgtygttatttgtgttgttagyggtygggagggggtgygt

SEQ ID NO: 6964 - DNA, 5030 bp, Artificial Sequence
  Description of Artificial Sequence: Synthetic polynucleotide
ygygttatagtggtttttttygtttagttaygygtagtgaaattttyggtaatygggttagttaagataygggatttgtatygtagttttttagtttttggagtyggagtygagygttttyggtagtttttttaattttttttttaaagtgygaagggaaaagtttygtttgttttaygattgtaaggtyggyggatttgggagtygygttyggtttyggaggattyggygggttyggggtttttyggtagyggtttttttgttaggggttaatagtagttttygyggtygggygggygyggaygttttttttttattygttygggaaygtggatatygygttygtaggatgttygtyggttgggatyggtagttaggaaatatgagaaggtttygttatttttgttttygggyggygygygtygggttgggtaaataaagtygagaygayggyggtggyggtggtgagygygttggagttygygtggagaatatgyggyggggatgggagtgygtttagtttygaggygggagagttagtygttttgtagtyggtygtyggtttygtagttataggtatagttttygygtygtygagttttagtyggttgyggyggaaygttaggttygttttggtttttgygttttgggygtyggtgttttttygttttttttttaatttttttttaaggtttggtggagaggygttygggtagyggttaaggttggtttaagggtttgygyggagtttgggagtttatttggtygygttttttttgttttaaaattattygtyggygttgggggagggggatatttttgtagggagtgattttttyggttatagtttggagtgaatyggggtaagtgatttgagaagaggygygggtggtygygygygggagttttgggagggttagtaagtgtggtttataygttttyggattttttgygataggatagygttyggatttttgttatygtttgtttttgagtttgttgtttgtagatttatagygygtygggtgtttgtgtttgygatttttgygtgggtttggggttgtyggggaagtgttygaggtggttaatttygtgatgatttygttaggaaaaataygtygtygtatttaggaggaygygttggggtggttyggagaaggtygggtyggggaagggtgttttgtataaataaagtagtatgaatatatatttttaagggtatgattttaaaagaaaatattaaygygagttttgattgtagaataggggttgtaagtaygaaaattttttttgatatttattatygaggttatgtgtatattttaggtaygtatttgtttgygygggaggaygtagttttaggggatataygatatttagtagaggtttgattttatttttttaygaatatagatygtagtygtygtttgatygyggtggttaygygtggttttaaatgttaygygtggtttttgttgyggtggtygaagggyggggygggggygttggygagtgtgggygtttggygaggtaaagggtgtgtgtgtgtgtgtgtgtgtgtgtgtgtgtgtatgygygygygygtgtgttagtggagtagtagtttatgtygyggttggaygggtaaagggggygttggtagygaagttgaggtygttyggaggaaaygggagttgtttygaggygygaggygaggagatggggygggygaagttygtygygygttttggggttgtaattttgyggtttygyggtygygyggatttgtttttgaygtyggtgygyggtaggtagaggtttagggttttygygattttagaggtgagttgttggtttttttygatagtggtagtagtggttygggaggtgygtygattaagttgttttttgttttgggtttttgatatttttatagtttttgaaagggttttyggagattttagagagaggygggtgtygaggggttaygagttygyggttgatattygygttgyggaagagaatggtattgattgagggttttggggatttgggttttggygttttggattttaggattatgtatttttyggggygygttgggggatgataggaagattttgggagagaagggggagaagtggtgttttygttttgaygttatttaatttttttttgtttttgaatttaattttatttygggggattttggyggatagaagatgygggggttttaattaaattatttaygatttagaaaataygaaaattttttaaatttyggtatggtttgggatttatgagttggggggttttgtggatayggttggtatattattttaaatttttttttttatttaattttttttgaygtttygagttggggtttttagaggttttagttttttgttgtgattgaagaattaygygyggttttaygtyggtygygtttygtagttyggagtatgttttttttagatttaaattgaaatttagaggttygtttgggaattygttttttttgtttttgygggtgaatgattttyggttgtagttttggggagtgaagggattggggggatygatygtttaggtaaggaagagggtaggtatttgttyggggaatttgtaggggygggggygtgtagttaattggggagagtygtagggtttttgttagttgyggyggygtygttttttttttyggtttygtagttyggygattyggttaagtttaaggttttgaatttgtaggggtttgagtatttttagttagtaagtaaygagatgtattttttttttttagaagtygagtttygttgyggagttttyggyggtttagtttygaggttttgyggtygygtygygygtttttattaatygatattatgaatattatygtttttaataagtttagyggtgyggtgttgtttgaggayggaggygtttyggagygggagyggggtggtyggttttatagyggtgttttggatagtttttaygttygtttygaggtgggtattttygayggttygttttttaaggataatttyggtttgagatatyggaggatygggtatgygtatttttttgggggttttgttygtttgyggttyggaggggtgggggtggtgagttgtgayggggtttygtggtaaygygggygggtggaygggaaagggttyggagttttttgggagtgtaggtttgtttttttagggttygygtatttttatgttaaggggtttttattttaaaatatgagggattaattygtyggggtagttttaaagagtttggtggagattaagggygttaggagttgtttttyggtttttygttgtttggatttyggagttgggggttatttgttttttttyggattgtgggtgtyggtgygyggttgagggygaggaaaaaggattgagttyggtgtagagaaataggygaagtygagtagtyggggagtttaggtttaggtttygyggattttttttyggttattygagtttttygttagagtttygyggttygtttggtttaaggagtygggaaggtygtttttygttagggagtttygggygtgagygyggttyggttgggttygyggygaattyggagggggaggtttygggtttgyggggtygggtttgagtttagyggggtgaggggtatgttggggggggyggtagtttgygggtgggttagttgtttagattgtyggtgagtggagggtaggttttgtttggttygattyggyggtttttygggygtttygtyggggaggggyggtygttttagtygtttttatttgaaygattgtattagttgtttgttttgyggygtygttgtttagtaaaatagagattyggtttygttaaaatgttattattagtygtttygggtggaattgtattttaaagtgtttaaagaggtagaaatttaggaggtttyggygtaggygygtaagtttyggggagyggttgggttygttggyggtygygygygatatttttyggattygtgagggagygtagygttttaggttaygttttaggtttttggttgtttttgttttttttttttttgaatgtgttttttttgaggtttttttattttatatgatgggatagagtttgtygtatttttaatttttttttagtygggaaayggttygayggtgtttttgggttttgtagtttttttttataaattattaatttttttagaaagtttttttttttttttaaaagattaaaggaaatagtttaaagagagtyggggyggtaatgtttttttgttttattttttatgtttagtyggygattttttttttgattataagygayggaaagtttttgggagtagataagagattttygagggaagtttygagagttagtygtatattttgttaggtttgttaggttagggttattygagggtgyggygttagygggtgagggaagggtagtagttagtttygttgtttagataygygattggaatagtagtattttttaaattatttgattttygttttttaaatttttaattttggggtattgggtttaaggtatttttttatttaagataaatttatygaaatgatttttttatttagaaattgtgtggtttttattttttgttttttttaaatattttgggygygygtaaagtaggggygtaaggtaggaatgygtagtttggatgyggggttygggtttggtyggggygtggagygttygggygggtaaaygygtygtttattagggtygttttttttttttatgttttagygttyggtagaatggygggaaggtgaggtataagyggtaggttttgtaagatatggygygattttttaagtagtggttttataagtatygtgataattygtattttattaagatygagaagatatttttggttttyggttygtagatgaygttagtgtaggtaattaggatttattaatattttgattygttttttygygaggggttgaagagygggaaygtttagagttygtgtggttttttaygtggygt

SEQ ID NO: 6965 - DNA, 2868 bp, Artificial Sequence
  Description of Artificial Sequence: Synthetic polynucleotide
ygygtttygtattttagaggggagggagaaagggagtttaggygyggggggtggggttgggggagtaygagagagtttttttttaaataygtattttttygttttttygaygttgtagyggttttattatagaygtatttattgttttttttttaaaagtygttttaaaaataaygtaggaattaaagygagtttttyggttygaaatgtaygtgtaattttttatatagtttgggttgyggtyggyggtagggtygttgtygtttattattatataaataggtatyggggyggygtaggygggggttgttttttttgygttttygtygttttygggyggataagtttygtttttttygttataggaattgtttagataataataattagtagatatttygttgttgtaygagagggagagaaagtatagtatygtttygagataattagaaatataattaatttataaygtttttttaaattggaaaaggygattgtgtaattattattatatgtttaggtttygatttttygggttgtttttttttttttttaatttttaygttaggtagaggggtgtgtgttttttttggtatagtagtataaattaataaatattgtagttgyggtgtaagtagtagtttygygygttygtyggttygttygtttttttttttattttttttttattygagatttagagygttatttaagttttattattyggttttagygtttygtgygttyggtttaggtaataatttttttaaaaatygaaagagaaaagygygaggygtaygtatatyggtttatttyggygtagagatttygtttgtttygggagggggatttgtttgtggtgtttttyggtttttaagtttaggtaataatttygtaaatatattygtygtttagttygtttttattygygyggttttyggyggygttaagtgggtattttttttgttttgtttttygygtygtttygtygygtttygttaaaygtggattttattygyggggttygtygyggagtttttaggtyggggttttgggtygggtagygggaggygttagggaggaggggygtttagggattygygttttygygtttttaattttygttaygygagygygttyggttygygggttttaattttatygtygtyggtygaattttgttygttygyggygygtatagtyggygttygygtataygygygtataaattttaygtaattygyggtygtttygtttygtygtygtygtagttygtttgtygygygtttatagttyggttygagtygyggggttygagygatagygayggygtyggtyggggtygyggygygyggaagttattttgtayggttagygtygggtataagtttgtttygyggttttygggggtttgggygttgagggagaatygygttgagggggttaggaggagggggagagggaggygtygaagggtataagagtggggaaaagtgyggaaagaagtaatagtygttttattygggattagaaaagtggttagtgygtttyggtygttygttttgygtyggggatgyggyggygtyggygtyggttaayggtttagggaggyggtaggggyggygggagtygttaggyggagagagattaggtaagagatataayggtttagggagagygagyggtygyggygyggtttyggtagyggyggtagyggaggggggtagagagtattattttttatttttttattttattttgtygtttttgtttyggttgtttttagttyggttygttttttttattttygggggygtttyggttgtttagttttttttgatttygtygtttttyggtttttttygttatttatygttattgygtygygggttygtttgttttttgygtttatatttggggttattygttatgattttttygtttgtgtttaaatgttygagttattttttttttttttttttttttttttttttattttttygtttttattttttttttttttttatygtatttggtttaygatattttyggttttaygatattattttttttatatttagaggttttygttttayggtyggaattttgttgttagggatygggyggtttgyggtaatygtgggtattgttgaatttgaattgaggggygagggaaaagttttttttaggtgtggtggggagagggaggyggatgtygggaaatygtagggaygyggttagaaaggygaygggttgtyggagttggaaaggtaaagttggaggttyggyggygttttgttttygygttggttatattygtygyggttgttyggggtagggagggatttggttgattttttttgtattttgtgttttyggagttgttttttygagygtttagaggttttygtttgtttgttttttggaggtagggttattattagttttaygtttygygtgttygtttttygtatttyggggttaaggaaagggatygyggtttggatttttyggggagtttttttgatgaggggaagggtaggtttggggayggygaggataygyggygatyggagagaggttatttgattygygtagttyggatttttttttttttttttttagggaygtttggtttttttttaagygaatygggatgggaagtgattttaatgagattgaattttagttggattgaaagagaggttagaagtttygtttgttagtagtttttttagtagagyggaatgagtaatatttatayggtgtttgttttatttttttattygtattyggtttttatttgttgttatttyggttttttatattyggttygygtttttygttttttttttygygtagaatygt

SEQ ID NO: 6966 - DNA, 2678 bp, Artificial Sequence
  Description of Artificial Sequence: Synthetic polynucleotide
ygagaggygatggygtttgttttggttagatttaagggtaagygaggttgygygyggttttygtagggtyggattttygagttttagggygtttttttattygggtgtagatttttygyggattttttygttttttygggttttattagttgygtaggaatggagttggttagagttttgggagyggggagggaggygtygttattagagggygtyggagttttagygttgyggtyggtgagyggttaggtttttyggtttagtttagtaaaggtttggggaygttygayggttgttttttttattggattttattgtttttagttttttaagagtagggttaagttagtggggttttyggttttaagtttagtgtttagggtgggtgggtgggtgggtgggtgggtggatggatggatggatggatggatggagtgtyggtttatagttatttaayggttaaagtggttttggaaaaaaaatgtatagaagatatttatttttattagyggagtttyggagttttygtagttttttgttgatygttttygtttaatgtagtygttgatygtttatttttygayggttaggattttttagggatagggaygtgtttttagggtaggtttttggatggaygyggygattgattttatttygttggaygttgtgttgggaaggatatagagaggtggttggggtagtttgyggttataaagygaggtttaaaggggygttttttttatttttaygttttttgggtgtygatttgtatttttttttygttatyggattggggttatttgggatgtttygggggtattyggagggttaagtatygtygagggayggtttygtgggaagagttttttggatttagaaggtagaygttagtagtattgttttaggagtyggaggtyggggtgggggagtttttagttttttgggtygtayggagttttttttgggtaaggtagtaagtatttaggtttaaaggatttatttatagttattatttattgagtattgtttgtttgttagataygatgtagagaatttygyggygtggggygggttttattgaatttttygttttatttygyggggtgggtttgtgattagtttattttattattgagaggtyggaagtataaaggttatattygtttttattgagagtygtyggygttttttgttttgtttgtataggygaggaaattgaggttyggttggtggygtygtgggtttggagttygagttaygttgattgtaaagaygggttttattttygtagatygagttttgtyggyggttgygtygtaagtygggtaggtggygagtttgagtttttaygtatagaaagtaggattttttyggttgttttgggtygttatygttagtaggtttttygttygggattaatttgtttgttttttattggtttttatttagttttygttatygaaaggtttygtttygtagttttttaygygygttttattttaygtttaaggtttttagtttttttagtggggttttgttatagggataataagyggttttttagtyggygtygtttaggttgyggattttattgtagatygggttagyggtgyggggtttagyggagtttgagaaggttaaaggtyggagygtattgygtttygggagtatagagggagyggaggaggggygaaggggatgggtggggggtgtygtygagggagtygygygttagagatttyggttayggttagtattyggtttygggttygttttttatygygygtttygtttygtttygtttggtttttttttttaaagygttyggygygygttttttatygtygtatttttatttttygttagtygtattgttygttyggygttyggttttygattygygttygttygttygttygttygttygttygtgttatgaaygttaaggtygtggtygtgttggttttygtgttgatygygttttgttttagygayggtaagtgygttyggyggggaggttttggygaggttttgggtttyggttttygttyggygtagagtygyggtttttttgtttgygttygtagtttgygtygttygatatagtgggggtggaggtagttygtttagttgggygttttggtgyggtgtygygtttaaagttttatttttgygtygagggtttgtgatttgtagagagygatygtttgattttaagttggttgtagagygaggttagtygggataattgggtaggaaygttttaagagagygttygggattggygygggaaggygygagggtggggagtygyggattttagatttttgtttgtttattttttatttattgttttttygttgygggttyggtttttataggygaatgggtttygaggttttgttgygtatagtgttggaggtygggyggtgtatggygagagygygttttgtaaagttygttttatgtygygatttgaggttgtgaggttygatgtagtygygtagttttygttttttgygaagtygattttttttttatattttygyggggtttttggttaggygygggygggttgygyggygtagttgtygggtttgtgttattygttaggtygygtttttgtatagtttygyggttygtagygaygyggatttgggygygygtttagtygt

SEQ ID NO: 6967 - DNA, 2756 bp, Artificial Sequence
  Description of Artificial Sequence: Synthetic polynucleotide
ygttttygtaygtattaaaagggttaggygggttgygaggttygtygttttggttagatataggaygtttaygtaggygtatygtatygtatagattttgyggtggtttattaagtagtatatygygttyggaaygggagygygttaggaggtttaygttgyggagtagtagtaagaygggagtatagagtaggttggttagttttatgttaaggttgagttgtttaaagtttagygagtgtataatgtggtttgttattatgggttygagygygtaggttatygaataggagatgtyggygatggygtagaygttgttatagattgagatatggygtaygtttattaggaaggygagygtgggtagtagtgttgtgtygattagggttatgttaaaatagaggtygtatagtgagattattagyggygygaaggagyggtaggygggtaygatgtaygagttggygtygattatagttagtttaagygygtygtatagttattgtaggtgtgggtagygygtygttaggygtayggtgaggtagaygtttagtatatgaggtaygaaggtyggtagttaggttatgtttattttttattyggaagtygttatygtatgttttatttaygtggtaatggtgggttygaggaaggygaggggaatgttataggtggtgagygygtyggttattayggtaatgtaggggtttagtatgaggyggtggatgggagtgtttattggtaggttggttygagttygtgtagtygtygagaagggtttggttattgttagtagtaatagygygttaaagagygatayggtagttagtattaagaagggtaygygtttgtyggygaatttatagaggatgttttygaagggyggggttattaggttttygaagttaatgaaggttagygttaygtttagtgtaygattgygtttyggttttttygggtatttatyggygattatggttatgttagaygtgtyggygaaggttgagtttaggttttgtaggttgygygtygygaatagygtggygtagttttyggygaaggygaataggattgtagaggygaatatgaygtttaggtygattagtagyggtaygtygtagtttatgyggtygatgaagggttygtttaaggggtttattagtagttgtaggatagttttggaagtaaatagtatttygatttttaygttttygtttttygtagggtagyggggtygaagggttgagttygttggttaygtagttgtyggggaygtygaggtgttggtygtgtaggygttggtattggtyggagtgggtagyggtagggtgggtttttatatttygggagttygggtggggttttygtygttttygygtatgtgggygatgtagtygggtattatgggtaygatgattatgtatagtatgttgtttagtaatagygttaygtataygataataagtattaggygtttttgtygtyggggtttttgtagygtygygtttatagttttygatagtttggtggtygtygttygggtttggttygtaggtttygyggattttatgtttttatttygatgttttttygaggaygttttygttagggtygagygttggygtttygtagtgtagaggygagggtaygggatttyggggaggttgttttggtygagtagatttttttgtgttttaggtggtygyggagtttatggtttagygtttygggaaaggaaaggatttygttyggygaggygttgtagttatttttagtygatttygggattygyggttgttgggtttaggggyggtygggaagtygggygygtygaggggtyggggtyggagattgggygtatttygttyggggygygtttagagtagttttygtygygttaagaggtygttygygttggtygagggatatgttgttgtygttygttygtttgttygttygttagtttygtygttgygttttttttttttygygtyggtttttgtttttttygtygtttttttttttttttttttttttattyggggttgtgaygyggygagttttagttttygagtggtgttygggttatttaygtygtttatgttaatgygaygtyggyggggygggggtygggggyggggygtggtygggtaggggttygttttttagatgttttagggttggaggtttaggaagggttttyggtgtggaagttttgaattagtttttgggatgggygtttygygtyggtagttggttttttgtttttygttttttgtttgtttttygttygyggttttaggattygyggggttagygttygtttttttttttttggggaagggggygyggtagtyggtttttygaggttttttgggagaggygggagttagaggtttgygattttygttttagtttggatttyggygtatagygagtaggaagttttygaggtgagtygtygttgygtttatttgttttygtagttggattgtggagtygygttyggaggagygttggatayggatatttttaatttttttttygatttygttttttggttttttgtatatatattttygttaggaggggaggggaaggtttagtaattgtttggtttggttttgatttatyggttttttygtagaatttttyggtygygaatygyggtygggagtttgtggggattgagggtagaagttgtygygttttagtyggggtygygaatattagtttggtygttgtygttttttygt

SEQ ID NO: 6968 - DNA, 990 bp, Artificial Sequence; identical to SEQ ID NO: 6738
  Description of Artificial Sequence: Synthetic polynucleotide

SEQ ID NO: 6969 - DNA, 829 bp, Artificial Sequence
  Description of Artificial Sequence: Synthetic polynucleotide
ygtagygatttygygtaggtgagggtattggggagttygtggtttttttygttygtyggtttttttttattagtygttagttagggttttyggygtyggggaagttttttatagggttttaggttatttaagygyggttaaaygtyggyggttyggtttygtttatttgaygtagtygygygttygtttygatttattaggygygtagggttygttttygaaattygygygggttttygtagtyggtygygyggtttttagtygygaagagagygtygygtayggtggygtygttatagtygtgggtygtygygtttaggtagygttttagttgttygtaaagtttttgtagygtygtttygtyggggtttaygygygtyggttagagtagygtttatygttygagttttagattttaggtttygtygtygtttaygtttagtttyggyggtagtygtgggaagtagtgttttagaggyggttatagygtygttggttgtyggygygygtygyggaatttygyggtygagagtyggtyggtttagttgggyggggatayggyggtttygggtttgtgttttagttttagtygggttttttygygtygttgyggttgttgygyggtgyggtygtgataagttatagtaaatttgtttttygygtygttttaagttattaggaagygtaatyggtgtttttggggatyggygaagaggttttttyggagyggygtttagttttttaggttgtygggttgttygttttttatggtygtyggyggtagyggttttagggtttggygggygygggtttgatttygtygtatygt

SEQ ID NO: 6970 - DNA, 4119 bp, Artificial Sequence
  Description of Artificial Sequence: Synthetic polynucleotide
ygggaaaggtggtagtygaagatttygyggttttttttygtttaggtatttygtttygtttttagtttyggttttgtttttygygttttgttggtygggtattygggygtttaggagttttttttyggggtggygygyggygatygtyggygggtttggtagtagygttagtygyggggyggttygggtaattygttygtttgtyggttygtttaygtgygtagagaggagygaagygygagtagtygtttygttygygtttgttgtyggtgggtgttttatttaaggggtyggygggggtygtaattygagttttatygtagggattygtatttgtataattyggttttttttygttttttyggatttagggttygagatgygagtyggattttttttygaggygtygttttgtttatggttagygygggggtygygggattygttagagygtaggyggagtgggttggygtaygtggtaagaaygtagttatttttttttgtttttttttttttttttttttttttgagaaataggattttgtatatttttgttggggtggggtatttattagggtgttaattttgttgygatttttttttatgttttttttatttttaattggaaaaaagygtatagygygagygagaaatttttttaaatgtgttttgggtgatttaagttagagagatggtyggtygttggatatyggttgttttggagggagggggagaagtagygttttagtggaagagtagagggagagatygttttyggtagttttagggttttgatygyggtgygttgggttyggygagagttggygtayggttgtagyggtygaggtaggtgagyggttgaagattygtttgtagygtygygttttttttayggygtggygtygtggttttygttygtttyggtttatattaagttagggtygtttygggttyggggtgaaaaagggataggataggtttgygaggttgattttgygygttatttttggttttygyggttttggagygggaaagggttttggggtagttygtaatttgtataaaygattatgaatgagttatgtaggyggyggtgygttggatttgggtattygggattagttttttgtggggtttyggataggttyggttatttattgygggttggggygtattgggaggtagaagttttgygtttagtaagttagaatttgttgttatttggattttggaaaagtttttaaaaattgttttgggaaygaaatagaagggtttttatyggggtttygtaaagtaaaaygagtgggttgggggatggggatggygttttgaaagtgattagagatgttttyggtygttattgaggatygygttgggtttatygaggtgttttttggggagggagagaaaatatttattttagtaygtgtattttggttygggtgygggtagggygyggttttggattttgggttatgggggttagggggattttgtggttgtagggatyggtagtgaaggttaggttagtgtttttatagaattttttgtttagygagttyggagttygttttgtygtygggatattgttggtaaygayggygygyggaygtagttaatagggaggtgtgtagtgtaaggtgtgtgagygggtgtgtgaagagggtagygggggygggagtgtgtagyggaagtggagygagtgtgagtgtgtgtgtatgtgtgtttggaggggtagggtgagtgtttaagtttttatttggaygtttttaygtagtygatygtttagaygygtygggaagggygttygtttygygtagtagttgaaggggggyggggagygygygggtagaggaaggagggtgttttyggttgaggatttttttygaagttttttatagtaattttgttttttttagggtttatttttttagttttaaggtgtttaaaatatttaaataaataaataatttaaatttgtttygttttygtttttgtataaatagaatagattttttaaaaaagtaataygtatttatttttattattagttatttttttttattaagtaatttagaaaaaagtagttagttttygtgaatgtatgtagtttttttttttttygttgtttttttttgtttgyggttttgagttgttaagaaagtgagtaggggtttgattgtagtgtttyggtttygttyggttttttttygaagtttaatttttyggaatggtttttaaataagggttagggaggyggagtygtyggtatyggattttygttttttttggaaagttttagagaatyggaattttttttygtttygggaggttgagtygtagtttggagtagttygtttttttgttgtggttgtgattgggtttatggygygttttttttttygygatttttgygtttyggatttaggttgtagttagggtygygygttygggattttagygattttygtygtttgygagttggaagtygygagttyggyggagttygygyggtygagttygtgtatgtaaattagttatgtgayggtaaaagtygtttggtttagttttgttttttagtttatatatgggtagygaygttaygggtattgaagatttgtttataaatatttagagtaatatttttygtttaattgagygaggagtaattgattaatagttyggygaggggatttattgattgttataataatattatattagtaatttttggttttttagtagtyggaatatagataggagagagttagtggtaaatagatattttttttattttttaaaaaatagtaatttgtttgttatttttatttttgttgattttttttttttggtgtgtgtggtggttgtttttaagtgtggagggtaaaaggagatattattttaggtttagtttaatttttttttaaaayggtttttttgatattttaggtagygagggagttgggtttttaggttgtgygaggagtaaatgatgatygttaaggtygtagataaaattttagtaatttttagtggttttgtgtattagttgtttgataatatttattyggtggaggatttygtygttaygtyggtgattattttttttaatgtygaattgggaggtttttttgattagatgaayggagtggtyggaggtaagtygygtgttttygtaggttyggatttgygyggttyggaggtggtggatggggtgtagtgggtgtgygggaatygtaggagaggattggggttttaggtggayggtgttgattgtattggttttgaagattggaagtgggtgtaggaggaatttgygatagttgagattagggygygygggtagatgygttaggtygttagtaaatyggygtgygtgygtttyggygygtttagtttygggygagygtagggatgggggtggaagaggygttttttygggtttygaggtttgygtaggttttttggtyggtagtatttygattttttttttttyggggtaggggtaaagtgayggtaaagttyggggttttyggggagagttgygygtttggagagtygagyggyggagaagygttaggggaaagygtyggtagtttttttttgggtagagtygatttygggaaaatttyggagygttttttttttgyggtttggaggygygtttttatttgttygtygttygygaagttgagggggttagtaaggygggggtttyggtyggyggaggtagygagtgggtggtggaggagggygygtaayggygggaagtagttttyggattgtygagggaggttygygggggtatyggygaygtyggtttttttggygatgttgtggaaagtygtttttygyggttttygygtttttttygaggtygggttattggttttgggttgaggyggggaygygyggttgtygggaaaggyggagaagattgggagggtayggaaatttayggatttttttttttatattttttattygttttagtagttttyggttgaagygtagygggagagggagggagaaaaaggtataaggygtyggggatggggagtagtygggaaattatttatttttttttygggtttttttttyggtttggtattattaygg

SEQ ID NO: 6971 - DNA, 1575 bp, Artificial Sequence
  Description of Artificial Sequence: Synthetic polynucleotide
yggtttgggtttttgggygygtttgtygttgygygggygyggggyggttgttatattattttggtygggtttygaaagggaggagtggagtttgttygttttygygagttttygygygtttagtttttttttatttgttyggygtgtttagggygtttttagygttggaagtygggggygtttgttygaggygggagtygttgggttatgtttttgtttattaggtttttygaatttttggtagggtagygtttgttygtgttttygatttttttygtaggtaattygygygaatttggggttygtagagagygagygttygyggatatyggttgaatagtttggaggttgygygagggggygtygyggggagggataaaagttagtaataaagagtatagatttygtttagtagttgattgattygttttaaaatagtygtttttatttgttgtttttygygtttygtttttaggygtagtattygggtttgtagttyggtygttygaaagtgggygagtaggttgagtgttagygagtagagggttagygttagtagttygtaygattttggattyggtagtygtgygtygygtttygttygygtygttattagagttatygtttygggygygtttaattttttagggtygygggtatyggtggttgtygttttgtgggtgygtttygttattattttttygygttttgagaattaataaataaataaatagaataaataaaggygatagtygttgttaaaaggttttatttaaattgyggggtagggggaaagggtttgtatygttggaaaaygttttttttygttgttttyggtaaagaggayggaaaaattagtagtaggagaggaagtgtygaaaaagtataattagyggtaattggggtatatttaggtgagaaaaaagttatttygaagaaygttttaagtttaggaaagttaggggaatttgatyggtttttttttttttygtttagtttttttttttaagtgtttgtagagtagttggtgtygygttgttagtttttttgggygtttygtgtttttygggttagttagttttagttttygggygaaggggygtatayggagggttttatgggtagaggtgggtygtggyggttggygaggagygtaggggtygatttyggygtttttgtaatttgatatattttttgyggyggtayggatyggatgagtaattygtgttattttttaaattaatttttttttttttttttttttttttttttttttttygttattttttttttatttttygyggggtygayggtttggatttgtttatttatgtaaattygtttagggtggggggygtggtgagtaggttyggyggttttagttygtyggttygggagtttttttgtygygtttttygttttttttgaagtgatatttggggttatttataggtaggaagggggtgtggagtggagttggygttgtattttttttttttttttyggatttatatygagggttygtttggttttttayggaggyggtgaggygggtattattttttatggaygygt

SEQ ID NO: 6972 - DNA, 2401 bp, Artificial Sequence; identical to SEQ ID NO: 6748
  Description of Artificial Sequence: Synthetic polynucleotide

SEQ ID NO: 6973 - DNA, 1579 bp, Artificial Sequence
  Description of Artificial Sequence: Synthetic polynucleotide
yggttyggtgtaygtyggtgttattttygyggttaagtttggggttgatattatgtagtatayggygttatttataatgtatyggtttttttttgttatatataggtaygtatatttattttygygttyggagggagtttagggttyggttygtgggygtttaggygtygattttttygatttygtatttatttagaagttgtatyggtygygatttygttttggygttttygggggtttggggttyggtyggyggyggtygyggygagygatttygggtaggatttagttagygtygaataaaggttgygygtaggtagygggygtygtttgtattttygtttygygtttyggyggyggyggyggygygggggttygggygggttyggygttygttygtttygygttgttygtttygagggygtttyggttttygygttttygttygttgttgttygttatygtygtygtygttyggttatygtatygtatatattaattatttatygttygtttttagtttttygggygaagttaattataggyggaggtttygttaatggggtygtygtygtygtygtygaggaggtagttagtygygygttygggygtaagygatagttttttagggayggggatgggtygggggygygyggggggygggggygtayggggygygtyggagaaattttttayggttygygttttgygtygygttygyggattttgygggygtgattatttattttgygtgtgttygygtggggttgggggtttygggggaggttaggttagtygyggtggggggaggggagggaggaggaggaggagygygggaggaagatgaaaggygagtagatttgttttggygtttttagggagtttyggttygygygygtttttttygtttygygagtttygtygttygtatttygttttttagttygtygttygtatttattygygygygtagatygttagtttagttatttygttgygagggagygygagygagtatgaatyggaggtagtttatattttaaatttgtaygtaggggtggtgttggtgtaygtygttgtygagygaaygtaygattygaygagtagtattttagttttygggygggggyggygaygaggtttttttttttttttygtttaggtaattaattggaagtaatatttgtgygagtggggttttyggagygttgtygttygaggaggtygtygggaaggygttggyggtggatgatttygggtgtttttygttttttagygaatttttttaagtgggtatgttaatgagggtttayggyggggagggggtggaggagggagttgaattggagggggtttyggtyggggggaggggaggggaggggaggggagggyggggttaggtatttagattaaatttyggtttaaaggattttyggaaygggttayggggtggagaaggtaggyggttyggtattttatttttttgattttgggtgttttggtattttygggatttttygagygaggggtttaggatagggtgaataygygtaygtaygttttygtttttygatttygg

SEQ ID NO: 6974 - DNA, 919 bp, Artificial Sequence
  Description of Artificial Sequence: Synthetic polynucleotide
yggtttatttatttygygygtttttatataygttttttttygattttttaygagtataygttygtttygygtgttygtttttttttgtttttygtttygattttaygtttttttttttttttggatttygttttttggagygygttygtttttttttgttaygtttttttttttttatttttttttttttttgttygttgttttttygtgygygtttttttttttgtatatygttttatttttgtygtaggttygatttttgaaygtttttttttttttggtttttttttttggygygygttttttttygtaygattttttttttttgtygggygtttygygtttgtaygtttttttttttttgtygygttttttttattttgyggygggtttttatttttgtaygttttttttattttgtygygttttttttattttgtygygttttttttattttgtygtttgtttttatttttgtaygtttttttttttttgttgygygtttttttttygttgtttatygygtgttttttgtttatttattygygygtttttttygttttgyggygtttatattggtttttgaggygygagttttygttgtttggtaaygggaygtygtttttgggtggygagtaggygygtgtgtaggggtgagygtatyggaaaggttygaattgtttttgggatttgtttttttagtttygttgggttyggygggtagaggyggttttgatygttgggttttgggygtygagtaggatttatttgaggyggagagaggtygtttygygtttggggttttygaaagyggttagttgtttttttgttttttttgagyggggagygttgygttttttgygggttgygggagatttttttagattttygggtgggaaaattatattgagygtttygg

SEQ ID NO: 6975 - DNA, 944 bp, Artificial Sequence
  Description of Artificial Sequence: Synthetic polynucleotide
ygttgggygaggttagggttgyggtaggggagtygagtygggagaggggygtaagatttggygttgggygggaygttygggtagggtgygggaggggttgagggtygtttttattgttttttygttttggagttggggttaggyggtyggagattggttggggygtayggygaggttygggttggagtttygaggtgggaggygttaggattagtyggggygttygtagygtaggttgttatttatttgggygatttttgyggyggyggyggyggyggttgggtagagttagggtygggggygtaygtyggaatatttgggtygtygggtatygagygtyggggggttgygyggygygtatttggagagggygtagttatgygggyggyggyggygggggggggygtgyggayggtygygttggygttgttgttgggggygttgtattgggygtyggygygttgygaggagtaygattattatggttggtaggtygagtygttgtayggtygtttttattttaagtygtygtagtgttttgatatttttgtygatttgtygttttgttatayggtgggttataagygtatgyggttgtttaatttgttggagtaygagagtttggtygaagtgaagtagtaggygagtagttggttgtygttgttggttaagygttgttattyggataygtaggtttttttgtgttygttttttgygttygtttgtttygatyggtttatttattygtgtygttygttgtgygaggtygtgygygtyggttgygygtygtttatggaggtttayggttttttttggtttgagatgttgtattgttataagttttttttggataaygatttttgtatygtygtgtagttygggtatttgttygttatygygtttttaggtagygtygtygtygtygttttygygygtttygaygg

SEQ ID NO: 6976 - DNA, 1096 bp, Artificial Sequence
  Description of Artificial Sequence: Synthetic polynucleotide
ygagtattaggaaagygaagttatataaygyggttttttttagtttyggygyggtagtttggaggggatgttttttttgtaaagygagttttttaattttttygggttttggyggagtttygggatygygtaggggtaagtggagtgtyggggaaggggygttggggttggggtgtyggggtaggggtgttttgttygtaygtatttaygatagtgagtagtatgttgtttagtagtagygttaggaataygatgaataggatgagttttygygagyggyggtttttttgtagttagyggattagygttagttygtttagggttatggtttyggggtttygttgygggygyggtgygyggtgaggatttaaggyggtygtggattttttattttttygttttttaggtygyggaagggygggttagggagtygygygtatyggtattyggggatattttygggygttttagtttyggtttatttgtttygagygygtttttaygagagttygygttttttggaaagagygttygygagygtygtyggggatttaatttggagatttaatttagaatttttaggaygttgttttgattttygtygtttttaattgtgttattttttaaattgtaygttyggtttygtgtattttgygttttgygttttgygtttyggttgtttyggggttttygtagtttygttygygtagttttgggggtttttttgtttttttgtttttttygggttygttttttttyggtatygygttttgygagtagggaatyggggtygtgttatttyggggtygtttgygatgtttgttygggtttttygtgttygygttaaygttygtatygtagtgggtttygttagttygggyggtttygggtygtagttttygttttagygtttygtygtygtygtttagtttatttygttyggttttgaygttayggtyggagggagygggggyggggggttggggygtttyggttttygttygttygygtygtygttgygtaggaggggttgtygtttttttgttttygtttyggtygyggtygygtttttttttyggatttagygygtggtyga

SEQ ID NO: 6977 - DNA, 4048 bp, Artificial Sequence
  Description of Artificial Sequence: Synthetic polynucleotide
ygtaygtttagatgggtttttygygttygggtygtagttatttgagttttygtgaggttgaggttgtgtgttagttgttttttttyggygtttattaygtagtgattttttttaaaggygtgttttagttttagaagttgggayggggagaaggyggttyggattygtttgggttttygggttagygygttgtgtaaaaggaaattttyggggttagtgtygttttttgyggggagtatagtagaaattttattagggggggttgttttgatyggagtygygtatttttttygagtygggttggttyggtatygtgtttagggttttygtatagtygygtygttygatttgygggggtyggtggtttttttaagggtttaygaagggaaygtttgtttagttgttyggttyggaaygtygggtttttatyggtgyggtatttaattagtygttgtygtagaggagttagtttttaggtttttgatttyggtyggtttygtagtygttttggygtygygggtttygttattttttygtygggygttggaggtaggggagggagtygtagagtttggttaggggattggygtttataattygaagaaattatttttttttttttttaatttttyggggaattttgatttayggtggaaaggyggygggttgttttttagagtttttatggagatttatttttaaattatttgttttattgttttttyggaaaagtatagaggyggggygagtygttgaagttygatygggatagaaatttggtyggygggtgtgtttggttatagtygttgttgtttttygygaattgggtttyggggttttyggttttygagaattagaagagaaaygygagygaagggatygaaattyggggggttatygatttgtagatatygttaggatagtttgtaaygtaggaagattttagyggtttygggtttggtgaggggattataagtatgattgatagygaatgaggaagggtagttttaaattttttaagtaaagttttagagttttgggtttatttattagtataggaaatygatttatygaaaatttaaataaagaaaaataagtygatagtttaggtaggatgtaggtaaatttagttygggattaagggtaaaaggttttttgggtttttttttttttggtttgattttttaaaatatggggaggggggtgatatttattygattttaggtttyggtaggaaygtaatgggttaatgaatggataagtygyggagtattgatyggttgtygtyggaggtaggttttttattgattttaattygtaaattaattatttttttttttgaagttttaatttttttttttttatttygtatttagagaaaaataaataaataaaaaatatygtaagaaatgaaaatataygaatagatatttttttttaagatagttttttgattaggttttttttttttttttttaaagaaagaaagaaaaataaaaattagatygaatttgttttttygttgtggttgttyggygttttaattaagtaggtygyggygagagygttaagttttggagtttttttttygtaygggttttygtttttttttaggttttygaaaagtaggaaagaaaaaataaattttatatttttttttyggggygygaggattttttygtttttagaagagggtggaagattaagaagtygygggtttggattgaaggggygtaaagtgggtggtgaatagggtygaaygtagtygaaagtaagtttggyggtygagttttgttygygtttttyggagttaggayggttgggggtattgtygagggtattaggagtttggggatttygygggttttgggtttygyggygtygggtaygtatagtttagtttgttttgattygagygtattgggggataattttttygttygtatttttttttaaagggttaagyggttygtaggttattattttaaattagtygtagtttyggagattggggatygatattaygttyggtttygygtygtttagttttttaatagggygygttggttygygagtyggaggaattttygtttaggttttgttaagygtttattyggagtaggtygggggtagtgaaggatgyggygggagyggygygttgtagtttygygaygtggtaygtattttggaagygatgatttagatatyggtagyggtggatgagttaggggtagaaggtggayggatttygttgttgygaggygaatagggggtgtggygagtgygaggagggtagggggtgggyggttagggygtgyggyggyggtatygggtgtattggtayggyggggttgggygggtgygagatygtttyggygaatattaagttygggttggagtagaygtttttatyggyggyggyggyggyggtygagtggaagtygttgaggaayggatttatggggttggagttagygtagttgagtgtygygggayggatggggttttyggagygygaggygggtaggggattgtttttggttattagygattygatggtgaagtagygtttgggygtyggttggaatatgttgygtygaggagygggygttttgggtttttagtttttggygatygtygtaygttgttttygtygttygttgttygyggygaggayggaygagaattggggattygtttgtttggggtgggggtgggggtggggggaaggaaaggaagaaagaaaggaaaggaaaggaaaaaggaaaggaggggggagggagagggagaggtaaagtygaggatttygagaattttgtattaaaygygtttaatttgaagagaggggggaaaatttttttagaagaatttgtaggygtggattggggtaatttttttttttttttttttttttttttttttttttttttttttttttttttttggygagatggygtggggggatyggagttagaggtagggaggagaaggggggaaagttttygggggaggtaaaaaaaaaaaaaagtttttttttttttgtaaaaggygggtagggygttttaagtttaaggataatttatggaagtgttygtttttttataagttgtgtaaaygatttgttagtttatgagtttaattagtgyggggattatataaatagtttttttygaagtttggtaaatggtttgatgattggtygttattattygttttgaggtggaaggggggagattttttaaagtgygttagagggaggtgagygtttgggaattyggaggtttggattygggtygagagtggaayggagtyggygtygtygtttyggttgagttttttgtygtttatygggyggtygggttttttygygttttygtttttygtttttagtttattygtttttgyggygttygttgyggtttttttttttttttygtttttttttttttttttagttttttttttttttttttttttttttttttttttttttttttttttttttttttttttttttttatttatttttttttagttatygtttttttttttattagtattatttttttyggggtatttyggtttttgtagagtttttggtyggygtygttttygttgyggttttttgaatttygagtttgtttygtttaagttggtaggatagaaggatagatagatttttttagtttagygtttygtygttgttgttttaygyggtttygygtygggagaattgggatygttttaagagtatygygagggtaagygggtaggggttggttttygggttaaaggygtygttyggttatattaatttttatatttagtaaaatttttagyggttttttaggttaggagggattttggagtgaggggtayggggtttttttattttattaattaygtttagtttygaggttttagggtyggtgygttygygatttttgattyggttygttygtttgygagttgagatygggagttgtygatttygtyggagtagtgggtttttaattttttttttttttygttttayggtttttagygt

SEQ ID NO: 6978 - DNA, 3292 bp, Artificial Sequence
  Description of Artificial Sequence: Synthetic polynucleotide
ygygtttaagttttagtttttgaaggtygttggatttttyggygttttyggttyggtttagtttttttyggggttyggataaggaggtygggygtttttttttttatttttttggggttttagatyggtygtagtagyggtayggaagagattatygggtgygagtagtagayggggtgygggaaggtgagtagyggttggttgattggtatyggggttttygyggttgtagtygtygygttttyggtygtygagttttygtggtagaggatgggtattygtaygatgygttgygtygyggtatggtttaggttggtygtttttagtttygtygttagttgtygtttttatttgttgyggyggttttggaattagattttgatttgygtttyggtgaggtgtagggaygyggttaggtyggttygtttygagttgtttagatagygttttatgtygaaggtggattygagttggaagatttggttgygygagaagattgtgygygttttttttttgyggtaygtyggttttttttttggatttttagygttttttttttagttttttgygttyggagtggtygtygtygtttttaygttygtttyggtygygtttggygtygtttygtttttttttttgtttttttyggagtygtttttttttagaatgatttygttygggtttttggagtttagttttttgtgatyggggtyggttttgagtagtggtttyggagagtygyggtttgtgtyggaggygggggaggagttttttagtaaggtttttttygaggttggggagatagatagayggaygtatatatatgtatatygatatagttttgagygaggttyggygtttggggayggtaggtttaattygygtyggtttttaggttttaggttatgaggttttattattttygygggttgtttttttttyggttgggttagagaagggaygtygagttttgggattttttttttttygaggataggtaagtagatggtggtagygyggttatttttttttatttttttagttttttygttaggggtyggtagaayggttttttttyggtttaggygtattggaattattttttttttttaggtygtgttttaagtttyggtygttygaagtttttttatttaygttygaggttatttttttygggaagtatygtgttyggggttttaattttatttttttttttattaagtgggattggattaaygggtagygtaatttagygygagggtaggttaggggtygaaaaaaattgatygagtagagggtttgygggtgttggggttttagaattgyggagggaagtagygyggggyggggayggggygggygygtagggggataaygaaagtttaaagagaggtyggtatttttaggtygygggaggtggtygtyggygggggttagggtgtaggggtattattaggttggggagygttttaggtagtgygygggtagggtaaatttttgygtygggattttaaagygagggaaagttaggtygtttatttgygagagygygaagttygyggygttttttagggtttttttggtygttgyggtagyggtagyggyggyggyggyggtagtygaggttggygygaagagygttygtgggggyggttgaggtttagggggyggtyggtggtggttttygttgagtaggtttttgatggagaayggggattttttgggagygggtggggggggyggyggyggttggggttgtgygttggyggtgtyggtagygttyggttygggtttyggtatggttttttttttttygggttttygggagggagggagygggataggygggyggyggggygagtaggygagaggtyggaaattagattataaayggaatttaattayggggygtaaagtygggggtygtttygggygtaaatttaayggygggagggyggagtgaggatttagaygggygggttygtatgagggaggggtgyggaggggyggggagyggttttgtygyggtatygagggatygaggyggttyggttgyggttgyggttttygyggaggaggtagtaagagtagttttyggttygaggttgygttaattyggygtyggatgttaatgatgaaattaaaatgttatttaagttaaatgyggggagtatayggygattgggygygtataatggtaaatgggattaggtaggygaaggtttagtygagtttyggtttygtagtygttttygttatygtttttttttygttttttttyggattttggygttttggtttygggttataagagttygttygttattggttttatatagtttaattaggtagtaaatgaggataagtttattagtataaaaggatattggttttygttaaagaggtattyggagygtttttgygagygtaggaggygagygagggaygyggagtaggyggygtttttggtygaagygtattaayggtygygagttyggagatygygtttgttttttttttttgyggygtagggattygtttttygtygttaggtttgygggaggggggaggggyggattaggttttttygggttatttyggggttatttgygttygtagttgtygttttttygttttttggggttggataggggttygtygtttttaygtagttggagagttaygtagygtyggtttaagaggtaggaygtgatttyggttttyggagaatttattatttttttattttttggggttyggygatttyggtattttttttaaagtttgttaggaagggygaggttaagaagagagggatttgggttttttatttattatttagtygatagtaagggaatttaggtgtaagttttygtattgygttttyggatttagaaattygygtggttttggtttttagttttggaaaatygaagagtgagttttttttygggattaggagtgggtgtgtttgtgtgygtatgygygttgattyggttaaaattygygygttattyggtggggttgttggggtaatagtttttyggtatygayggttgttttyggaagggtatttttttgttttggtygtyggtgtttaaggttygyggattaatttygagtttgtgatttygaygatagtatttttttttaggaagttttttyggttagttggygtttggagttgtttaattaaygttttaatgggggtaaggtgaatygaaggygtagyggygtagtttttttygtygyggtaagtagyggtattygttgygygtttygayggtagyga

SEQ ID NO: 6979 - DNA, 3753 bp, Artificial Sequence
  Description of Artificial Sequence: Synthetic polynucleotide
ygyggttattttttyggtgtagygtttttttagtttttgygyggtygtaggtgttagggygaggaagttygtgggygttttygtygygygttaaggttttatttagagtaagyggtygygtgttagtyggtgatttagttataygttgaattaatgtaaattattaataataaaagagtgtagggaagygtttttgttttttttattttttttgtttggtttygggtttyggattttttttgagtygtagaattgttttatygygtttagtttttttttygygygagatatataattttgttatyggtygggtagttgggygtagygataagttggtygygttaagttygyggygagtaaagtggaggttttattaggtataagtagygttatygtttgttttatatttttggagaggaagtgygyggtatagggtatgttatagygggagttgttgtggttaagtttaaggygagtttagtgtygggaatatgtygttgggtatttagttygtttgtttttagaaggtaatygtttaaatggygaggtttgttttttagtttttgttttttttygygyggatttttgagttggattttagtyggggtgygttttagttygygygaygattttgggygttaggagggagagtgggygggtagttttagttaygtgtagtttgggyggygttaaggtttygatttttaatttttgatttyggttttattttttaygtggagygagttaaatttttatagatagaygtatgtaagtttttttatygaaaaatttgaaaatttttygtgygttattatgtygggtaattaagtttattaaagttagtaaagatgtttaaaatgttttatttttttttttttttaaaaatatttatagatttgaattttttttttttygtttttattattttygggatgagggaaaygaaaagaagtaatttagtaattgtttaaagtttttgagggtttggtttggtygagygtgtatgtatgtatatatatataggtgtatatatgggggaggagtgtatttggttttgtaggtgtttttttgatttttttttttattaattatagtttgtttggttaaaatttttttttttattattattygagaatattttatttygaatggtttttaaagygtattggttyggtttaggtaggaagtaggttttttgatttagggaatgttaataaatattygaaataattaaaataaaaagtagggtagagattataaataagagttaatgaatatatatggtgtatttttttatatttttggaaataygtygttttgtttyggagttttgtttatagtatagtaygygttyggttttgygggtagttgggggyggygyggggyggygggtyggttagtagtygagtttgttgtataggttgtagagaggtaaggtygagaggttgtttttygggtagtagagyggygygggaaaggygagygagygyggtatyggtaygygtagtagygaattgtttyggaatattagyggtatgtttattagagtttgygtygaygygtgygttatgttggtygtttttagtttagtygagagttgtygtttttatttgttgyggyggttttggaattaagtttttatttgggttttygtgagttgtaggttggaggygaggtaggygygtttygagttgtttaggtagygttttatgtygaaggtggattygagttggtatatttggttgygygaaaagayggtgygygttttttttttggtygygtyggtttgtygtttagygtygtygtttygyggtygttyggatttyggygagggygagttygygggtaggagttttttttttttttttttaaagttygagtgygaaggagagaggaaaggygtgygttttaagtygttygggttygagttttygttgtttttgggggtatttgaggagygagaatagatagaaaggttatggagttggttggggagtttyggagatygttagttttttttgggattaagyggttggtaagygtttgtagttttggttttattttattaattttttttttttattttttttattggttttttaaatttagtatttygttttttaaaagygataagagagggatttagttatttggagtatggggtttttgtgtttttatttttatgaatgggttaggggtaatagggagaggaggtttggagggggaaatattagtatggttttaaaaggygaatttgtttggtggtaattgagttggaagagtttttygagttttatagggtggtattattttataggtygtttgtttggaaattaygttaaggattaaygtaggattttttttygttaaatgttgtaaagaggaatygtttttgaaatgtattattgttaattattttggagtgttaattattttaaggaggagagagagagaaaggtagagatayggagygagtgaggaagaagatttagaaagagattayggtggagatagattgtttagattygatttgtagatttttatttygtgttyggaaagaaagtattagatgtgtagtgattgaggatagtygggtgtaaggtyggtygygtgtttttttygttgtggtttatttttttaataatttaattttttttaggaagtttaagtyggtaygggtttgtgttygtttgtttttaggggtttatygggyggaggaggtattatagtgygygttttttttttygyggtttygaattttyggttgtygtagttttggttagagggggttyggygygggagttttggyggggygtttagttttttttttttygygttygttygttgttatattggygaygtgygatttttatttaggtaaggaaaagggatggggggatggtgtttggggttttgttttttagggtygtgttggtttgggtagaagtaggygggygttttttagtygtygttyggttttttttttttygaggatayggataggttgygttttttggttggttagtygaygggttttygyggtgttttygaggggttttygtttaggatggattggatggtgaagttggagaygttatyggtygtyggatattttttgttygtattttttttgttgtttattttgggtttataagaaatygaaggaaattaagaattttttttagagaygatttgggtgatttgggtggaaggtggtgtagtaggtaggtagtggggaggggyggggaggaaatttagggggagggggygtygaggttggtgaggygtttttttygygttagggatatgtaggtatyggatggttgygtaggggtttttgttygtttggttttgggtgygttygtttagtttyggtgtaaatgtttttttttygttygttaattygtygggttttyggyggygyggaggyggygyggttttatttgtatagaggttattygaaygyggttaatygtagygtygtygagyggtttyggaaaattttaaaaygtttyggttaggtatatagtatyggtgygtttttagagygygtygagggtttggygggtattagyggygtttaattaggggtagttagggttgaaagtagttgtagattttagttygggtttttggyggttgyggtaatttygattttttggattttttggatttttttttttagaggtaggggyggtgygggattyggagttggagtggttygaygttttygtaggygaygggttttygygt

SEQ ID NO: 6980 - DNA, 829 bp, Artificial Sequence; identical to SEQ ID NO: 6969
  Description of Artificial Sequence: Synthetic polynucleotide

SEQ ID NO: 6981 - DNA, 1328 bp, Artificial Sequence
  Description of Artificial Sequence: Synthetic polynucleotide
ygggygagagatgtttttttgggygtttagggtygggyggggtygygygtygggttgtgggtygyggtggagatttgattygtatttygagggtttttagagagtyggggagygagtagtagagttatygtttttagttttagtttgaaaagttggatygtgtygtygtatgtgygtttggtagtygggygtttygggttttgyggttatattattttggggyggggaygtgtgygtttygggygttyggaygttattgagttaygtttgagtygtttattttygggggtgagygagtygyggttyggggygggattttggyggggggattygagyggtttttaggattygygggaygtygttaattggygggggtgygggggagataataatttgtttygyggtaataagaayggtgattgttggtygtggatttattttataggtttgtttttttttattaaygttttttttagttttygggttaattyggatagtttgtttatttattgtaayggttaaggttggtttgtgttagaayggygygygygygygtaygtaygtatatatayggggggaaatttttttaaaaatgaaaggttagaagagtttagyggyggygygggygttgygygagggtttyggagttgattygtygaggtaggaaattttttyggtygygaygttyggtttyggttyggygttygygtgggatggtgtagygttygtygtygggttygagagttgttgtattgaaggtyggygaygatggtagygygttygttgttygtgtttttygttygygtttttttgttygttttggtyggtgttttgttygygttttgygaggttygaggtaagtygtygaattagggyggttygttgttygtttygtygagggtatygtaygttgygtttgggygygtygaggtttagggttgtttygaggggygaygygtttyggygtattttyggagtttyggggtttgygtttttagygyggygagatygattttttttttttaggtgttaattttttggggaagggygatatttggttygtagttttataggagttagtatttgtttyggagggtatagtttygggatygttttttygtttttatttttttgggtgatatttgtagatgtttttgtattttgatatttataygtgttattygggaygatgygtgtygggtttttttgttggttttatttygtagtgaatatttttattttaggtttygggttagttttttattaggttttttttttagtttygtttttttygttaatatatttaggggggygygtagyggtttygt

SEQ ID NO: 6982 - DNA, 2957 bp, Artificial Sequence
  Description of Artificial Sequence: Synthetic polynucleotide
ygagtygttttyggttttgygtttttttttagggtattaaggtttttaaygttaataygtggggttgttattaggggaaatyggaggtttgagtttagtatttttggattygtattyggttagtttttagtttttttttaaatttyggttttttttyggttgtagaggaggtgattgaggyggaagtyggyggtygyggtttggtggttaggggygaagttaggggaggggttaagggtttggggagygtgggtggygattgtyggtggtygtttttygaaagaaaagtygttygttaggttttyggggaaggtgttaaggtygttagttagagygtttatagtagaagygaaatyggagaagtaggtggyggtttygggtgyggatggagagggygaggtttgtaggtttaggtaagtygygttygggggttttagygttggygtttyggttttttttaygtttttggttttygagygtayggtygygttggttttagttttttttttttttttttttyggaagttttygttgttaaatattttttygtagttggggtttagggtttagtaattgtttttatttgtagaagaagaaatagtttagtttagaaggttygagttttgaygggtygtggtgtgagttagygaggaggttagttttagaaagattttttgttggtttttatagagggtttgagttttygtttttattttatttttgaygggtattttgtattygatgggtttttatagtaggattgggaagaaagtgataatttagaaaggaggaggaagggagttttgggaaaggtygagtttygttaaggtgaaggaaggtttgygagatgttaatggtgggatttygttagtygttttgttaaggatagygtagattaygttaggtttttaggtaggttttagagttttttaaaygggtattttatttgttttgtttatttttggggtaggygttgttttttttattttattaggtagggtattgaggtttagggaagttgagttatttttaaggttatttagtttgttggttttttygttttttttttygaaggagygtatagagattgagagtttygggatygtygtattgtaaaygygggtttgtggtgggtttagtygttgtttgagaatttgtttatgtttaagtattttttttttttttttttttttttygggtatttttaatygygtagggagaaattaggttgtttaaggtgtttttattttyggagtgttygyggttyggygggaagatggggagttttggayggagygagtyggygygtygttgttatttgggtygttttygtygyggggtatttttttgaagtagtygttgagygataggttgtggyggatggagttttgttagttygttttgttgygtttgtagaaagggaagttattagttaygtattggtagatttggttgagygttagttttygtagyggygygttttggatggttatggygatgagygtygagtaggagtagggyggtygtattagttttagtagtttttgttggtyggagaggtttagttaggygaggtyggygttygttaggtygttyggggygtygaggagygggtygggagtttygtagttyggggtygygtagggyggygtaggttygggattygaagygtaggatttggggttgagygttggygygtttatttataggagggggttttygtttatygygtttagattttttggtttatagttyggggggtgygyggtggtttgggtttggtygggyggggtygaggaggggtttaggtygtygtagtaggtggttatgtttagtygygttygggtttgggttagyggtgtygtatygaaatttattggygatttatttagtttggtygttagtagygttygggtgygattagttyggtttagtttttygttttttaaatatygtyggggttagagtttatggagagtgayggtggygagttttttttttggtagttttggaggagygaaatttttgttttygttttggtgttagtttttygtttygtttaggtttgataygttttggatyggaygtttttttgatttttttttttttttttgtgygattygtttygagtttatagtygttygyggttttggttgtagggattttaagttygtagtttygtttggttttaygggtttygtagtttygattgttttggatygtattaygattttttaaggtttttagggttgtggtttgggagtttygtttaatgygyggtttttttgttyggttygggatatttygttttaaagaaattygtttygtyggggtttttgggttattygggattyggggttagggatagagggygattatattgygtaagagatygtaatgaagttygtagatttttaggttggagtygtagagygaggtggygaggtggagaaygyggggttgggtttggatagyggttttggggtygtttggagttttygtttttttaattyggaaggtagyggattgatatttgygtygaagtygygygtattttayggagggtygggattttggaaatttygaaygttttagtagtttagggtagttatygttttttttaagtyggggagttyggggtttygttaggttttttygygttgtgatttygggygygtagagyggagagygttaagttttttgttgggtgtyggaggaygygtygaaaatagggaygtttttgtagtgygttygatattagttttttagttttgttgtygttyggggttgttgtagttygggttatttyggttttttaagttgttyggttttyggttttttttgtttttygygttgtggggtggyggaggatggatttaggttgaygttgggttgggtatttggaaagagggttygtttttyggatttygagtygggtatttgtgygaaagaggyga

SEQ ID NO: 6983 - DNA, 1860 bp, Artificial Sequence; identical to SEQ ID NO: 6755
  Description of Artificial Sequence: Synthetic polynucleotide

SEQ ID NO: 6984 - DNA, 1422 bp, Artificial Sequence
  Description of Artificial Sequence: Synthetic polynucleotide
ygyggggagtagaggtgtttagataygyggtttgttttyggtttttattttatagagttttttatttyggtattgagttyggaagttyggttattagttygttattttataatttttttagtttgggagtttttataygggtggtygttttttygtagyggtttagtttttagttgtaggattttygggattttygtatttattatgagygttgtaaagttgyggaagygtgagygtygttggaggaggygtttagggggaggygattaggtggygttttgtttttygttagtttttatggtttttggaaggttaaagttttagayggyggttaggaggtygygttttygggtttttggttttagggtgatygyggyggggygggygtagttygggagttgtttttatttgtgaagatagyggyggttagyggggygggyggagggttttygyggagggtagttygtagtttygatttygttagggagtagtygyggtttttgtygttttttttttttygygggyggtttgggggttgygtttggggttggyggaggyggtgtyggtggggatyggtggggggttyggatygaaygygttagyggtagatgygtttttttttttatatttaaaaattaatttgygttttattttyggtttyggagttaaatttaattatttygggttgtataaagttagaggygygtyggggggtttgtatygggaatyggtatygagtgattygttygttttagttyggtygyggygtttgttttgtttggatgtggttygagtttygggtygggygygyggggygggggttttggattattygtggygtttttygttttagyggagtygaaagttattyggagttgtttttttygyggttagtgttatttyggggygygagtttttttgtygagtygyggtttygygygtttttttygtygtttagattygygygttttttttatttgttgtggtygaagyggttgtyggggyggtygggtygygttttyggagatagaygygttgygtttttttygtyggggattygttttttattygygagggtagyggtygagttgggatygagttattaatagattgyggggttgyggygtyggtyggtgagttatagtttygygtaygagyggtttagttyggttagtagygtygtygtttttgygygtatttttygyggygatagyggggattyggggtyggaggtaggygygtaattatggggatyggggygggygatggyggygggygggtttttgtygtagggtggggatggtttttttagtygggyggtygtygttatattgtagagygtatttaaagagatatttygtttygygttygttttttagtattagattttygttygaaaaygtygtygggyggattgtayga

SEQ ID NO: 6985 - DNA, 1479 bp, Artificial Sequence
  Description of Artificial Sequence: Synthetic polynucleotide
ygaygagtttaygaattttatygtggtyggyggtagtygttggtygagtttagygtttaggtttaggttatttttatgtygtgygattygtygggaaygggtttaggttygtttgtttaaggttagaagtattttgttttyggtttaaygtyggatygygtttygttttttttattttatattaaggaaaggaattagaygtttgggagaaaggatgagtagtattyggtgggattyggttttaattyggggtygtttttaatttttaattttttagagtttttttyggtttygtttttttttttayggtttygaggtygtygyggttttttttygttttgagtgtagatagttygggaagtggagagygtagttyggagttagggagtygtttttaggagttttggygatgggagygtaggtggygggygtggtttttttaattttgttttagtygattyggagtyggttttygtgtagtagttatygttygggttttygtttggttatagtattaggttatagtgygttggtttttgattatttttttggttyggtggtygtttttygtttttttttagttygygtygttgttttgttttaggtttyggtgyggttttaagttttagtttagggtttttaggtttttttaggyggyggtggyggtatttatttgggtygyggagtyggggtttggtayggtttygtaggtggtaaatgaaattttggtagttgtygtgttttagggttttaygggtatagagttyggttagtagttgtagygtttggtgatagagygygtttttggtttygggtatygttttttygtattttyggatygygtygggtaggygggygtaggagatagtttttygtttgttagtttagagtygtygttttygggtygttygygtttatygttagggatttgtygagaaayggtgygagtttgagttygagttttagatttagtyggttyggttttttatyggttgtatgtagtttttygttagtyggtyggttaggttttttttttttttygttyggttttttygtttttttttagatatygaggagaggyggtgtygtatagtttagagygtttttttgtttgygtttygttygttattygyggtygtyggggggyggggttaggttaggagtgygygtygtagggtaggatagyggyggttttagatyggggatttggggtatttttyggtttttggtygagygygagatttggtttgggatttygygtttagagyggtygygttttggtttggggagtgtgagtgagtgygygtttygggygttttygttattttattttttatttttgatgtaaattaagtattygtttttatygtygagtgtgtttaaagtaygtttttggatgtttagtgygaaggttataatttgggtatattygttagatgygtagaatygagtttttgtttygaatttggaaagagtygt

SEQ ID NO: 6986 - DNA, 446 bp, Artificial Sequence
  Description of Artificial Sequence: Synthetic polynucleotide
ygtgygtttygygtattttgtttttygygygaygtygttygygtygttygyggttyggtygggagyggtagttygtgtttyggtttyggtttyggtttyggttggygtttgtatttgygattatygtgagtagttatggygtattttatagtgtagagagtygttttggtttttgggtttgttttggttttgtygttgttgttgtttaaggtttttttgtttygygggaagyggtaggagtygtygtygatatttgaaggtaagagtaggttagttttttttgagtttttyggygtygaagagtayggagaaygttgtttgagggaggggtgattttgagagtttgtagtttttatygaaatatttattaaattgattggagagggygggygagayggygttgaagggttaatgtttayggtttygttgttattagygggtggygg

SEQ ID NO: 6987 - DNA, 2991 bp, Artificial Sequence
  Description of Artificial Sequence: Synthetic polynucleotide
ygtttgtygtttataggygtygttgagggatagttggtttagtttgyggattttttttyggattttatatttatgtttagggaaagtyggagttayggyggtataaattagygtttttattttgattatttgagygagygttygyggttygttygtttgyggtataaaygtataaattttttgtagtattatatattatgttttagagataaatatagttttaggggtttttgttttggtaaagtaatttttatttataggaatagattataaaagtattataaaaagtggttttgaatygggaaaygggttgggggtgggttayggttatatttgttatatttgggatyggagtgtattgggttttaygtttttttaaataatyggtgtatttyggggtagggtttaggtttgygagggttttatttttatgggggagggygygagaaagttgaatttagttttttaaggtttagttttggtttatygaggaatayggagyggttatygtaatgggttttygagaagggtgttgygtggaaaaaatygygttgtgtttttgttttgtggggygggggyggaaattttagttttttygttttttttattttaagagaggtygtttttaaagygttgttgggaggggggtatttaagtttaattttttgggygygagggattttaggggtattatttttygggygggtgggyggttattatttttttagagtatttggtatatygggttggggttygtattygtagggtattgyggggyggygttyggtgattgggtggggtygtygttgttttttttttygttgggggyggtagttttttgtttgygyggaggygatttagaaggtaygttygttagtaggagggygggygtygtagggttttyggtggagatgygttttaygatgttggataggtagtttaggttygatatygtygtatttttttygggtttgggttttgygyggggagggttyggttagtaagtaggggtggggtygygataagttttttattttygggtttagtattttgagatagattggaaattgaggattttagttagagttygggataatttaaaagatagggagttatttgtttagtattttattttttgtattattttttaggatataggygtgtgtgagtgggggtgggagygttttagatagaggttaggatagttttatgaaggaggaggagygagtagggagaggttyggaatatttatygttgggygtttygttgtagtaggygttttygtagtagtttygtygtygggygtygttyggggggtygttgtagtttatttgtaaatagtaagggygattgagttaggttygygggayggttygaggttygaatattaatttttgtagtygttttttttttaattttagtttaaggttttagtttygggtttagatttgttttggttgggggggtaattaygggtgggtaggagatgaggtttgtaatatgtagggttaaattaagggyggatagttattaaggggygtaaatttatattttggaagtagggataagtagagaaaaagatttttaygttygygttgtagtgttttaatagygtttttaatggggtagttygaaygtttgttygtatatttttaaaataggttattttagtgatagttgtttaggataagggggttttttttttygggaaggattttggtttaaatttttygtaaggttagtttttygttttyggaaaygygtttttgatatttygagygtygttttaatttttttattttttggggtttyggttttattatgtygtyggagtagttggagygygggttggaygygtyggagtygtygttgtagtgttygtygtygyggttygggggtagygggttyggygtatagaaggyggttgyggygttagggggygyggygttttggtygygtagtagagtttgtaggttttygatatagyggatggygttgygtaggatttttattttgggtaatygttggtttggattgttygaygtgtagygtttgagtgttttaaaggttttatttattttgtttaggyggygtygttygygtatggtggyggttttgyggyggtyggygttggtggttttgygtttgtaygttttgtaggtttatagtaggtagyggttygtttggtggtgttygttgggygygygtatatgttygtttttaygtgygttyggggtygggtgtatygtygyggggaagtgygagtgtttttygggttttaggagygygtttaygtgtattaggygygggtttaggttttygaagaagygtaggttyggggagtygaaataygggtygttatagaagtygttygttgtggtaaaggagtagagagagtygtygggggtygttaggtttaygtygyggagyggtggygatagtagttttatattttggyggtggygyggtayggttttggtttygtttaatttaagyggtagagagtggtyggaattttttgtygttygggagtttyggttgtagatagtaaagtgttggtagtttgaatgtttatttattgttttttattttttttttttttgttyggtttgatttgtggttaaggaaagyggyggtagygttttagggtttttttatttttagtttttygttaggygttttgggttatttattygtagtagtttaaaygtttyggagtttaggygggtagttgggggagggggagttygaggttaataggaatattgyggggyggggtttgggggggttttyggggtggtygtaggggttygtagattggttagttagttygtttttttatattggygtgygygttaggttttttatygggtagggagggagggagygatyggtagttttaggyggttgtatttggtttttyggtaygttttttttaaatttttttaatattygattgttgtattygygggaaaygttggttgygygygt

SEQ ID NO: 6988 - DNA, 928 bp, Artificial Sequence
  Description of Artificial Sequence: Synthetic polynucleotide
ygagtttygtagtttttttttttygtttygttygttagttttttgttttttttttttatattttttattttaaagttaggygtygggygtttttttttgtygtygttyggtattyggttaatttttttaaaatgygtttttattttgttggttgtttyggtagggagtatggaggattgggggttygaagtttgtaaagggtgattttagygttgtagttttttygaaayggagatttgttatttttttagagggyggggaagtttatattattttttgttttatagtgttygtttygtttygtttgttggtttttygtttattygagatattttaggtayggttygtattggagagggtygygttgttgttgygatygtayggygttyggggtaggaatatgttygtttttttttgygyggggggaaygaaatttttagagtgygtttygataygttttttttattatttaaggtaggtttyggtagttttggttatttaggttyggggagttttagtyggatttgttgyggtttttttygtagygtaggtaaggattttaaattttaaattagggatttygattttttttttttttttttygttttttttttttttgaaagagaaatagatagaaagtttagttttgagataaagaaygygagtgattttttygaaataaatttgaagataaygatataatagtgaatggtaggaygtataaaattttatgggtttaggttaaatggtattagttataggttttagtygtagtygtygygtygygtagttttttgggttatygyggagtttgaaaagaygygtttaaggagattatttaaagtaagattttttygttygattttttgtttttttaggatttatttttttttttaygggyggttagttttygttttttygttttygt

SEQ ID NO: 6989 - DNA, 1267 bp, Artificial Sequence
  Description of Artificial Sequence: Synthetic polynucleotide
ygygggattttagggttttttygtagttttttgttttygtygtatygygttttttygggtttyggtygygttygttagtyggaagygttttttttgygggtgygattttygtagttatttttttttagtttggygggggtyggygagagtggtttttatagtattttataagttygggaattyggggtaygygggttygttttgttgygggtttygattttttgggayggaaagtyggttattagtagtaagagggtgygtttattyggtygygttttttatttttgygtttttgaggtygggttttttgagaaggggtatttaayggggatatttttaagttygtgagtttttatttttattttgttatttygagtagggtaaagagattttaggaatyggtttaygttatygtygttttttagattagygtaaagttyggttttaggtttttttaygtygtygtggtttgtgggtatttttatttttyggatttttttaatygttatagttatgtttatttgttttggtagtgtatatatagaattatataattaaaattaaatttatyggtatygttttygagggttttygtttagtagggggtatygaagttaggtggaagtaaatgagtttggattttgaggygygtttggtttggagtygttaaatttgttagygggyggygggggaggtggttyggtagygtygggtgttgygttygtatatgygttygggaaggtagtttyggtygtttygtttttagttygttttttatygttggygyggyggyggyggygtggggttyggggttyggtttttygttgyggttgygttygtttgggagttygggtaggagygyggggtttggttattgtggtttgttgygttttttattgggggtygatttygttygtttttttygttygtagaattgygaggatttggattgtaggygtygtagtygttattattyggagtatygaagtyggagttttaggatttgyggtygaaaygagagagygggaggygtayggygtttttayggttttaygygttttagttttttygagtygtagtygttaatgttgttttttttattttygtatygyggtgggggttgtygaagttgttatagtttattttygtygagtygaaaagtygtygagttttygygggtgggtattttttttygggggaatttagatygaggyggygttatygagygygtayggattttttyggaaaataattattygggattygt

SEQ ID NO: 6990 - DNA, 1225 bp, Artificial Sequence
  Description of Artificial Sequence: Synthetic polynucleotide
ygtyggtygttttttggtgttttyggggttggtaagygygtagttgaggaaagggtataaaggtggygagttttgygggagtagttgtgtagaatttgtyggattttagggtttggtyggtaggttygttttyggyggttgggttttttttttggagtttagattttttagtygtaggttgtttttygggygggttttagttagggygygtagttttgagygtttgtygttgyggttyggttggtaggtttygaggggygyggggtygygggtyggtyggtagggttttgtgtygttygttttygggtgtgygygaggygyggagtatttaaattgatattatatgtttttttattagttgtttygyggtygagttttaggygtataattatygttagtgggygagagygttagtagtttttagggaagggatataatgattgaggtttaatttttgaaggggaatttggagttgygttttttttttgttatttygatgttgggagtggygttttggttttggygttttttgggtaagtattagtyggyggtatttgyggaggtggttggtaygttgttattttttgaaatgagtgaggagggaggtttagatttaggyggttttaygygttygttttggtattagtagattgggaattgtygtggttatgttygaagtttggaaagtttttttyggtttttttttgggatagttttttttttttygggaagttttttgtgtttagaggtggggttttgtagttggaggggtagatggaatttgygaagtaaaggaaggtaataaaaggaagttaggagaaatyggaaaygtgggttaggttttgttttgttggagaagyggtgttttygtaaagtttttgtttgygttggtttyggtyggagtttagattttttaaaygtttgttattttttatygagttgaggtttyggtttttattygygttttggtgagggtttttttttagttttaagttttyggttattttgaaaaygyggtttttttygaaggggaaataagtgtagtttaatttygtttgagtgatttataaataaggayggaaagggtygttttattayggtttygtttgtygtgaygatgtaatttttyggagyggagtattgttataaagtgataaggttgttataagygtttygattgatttttttaattagttttttatgtatgattyggagygattttygt

SEQ ID NO: 6991 - DNA, 1627 bp, Artificial Sequence
  Description of Artificial Sequence: Synthetic polynucleotide
yggttgtyggygygagyggyggttttttttyggttgtagaaygtttttygttgtyggagaaggggtttagtaaaattgatttttttttatttgtttttatttataattgatggggagatgagaaygtaatatattttagtatygagtttttgtygtttggyggagattttgtttaagaygttttygtaaagtatttttagtyggggaataaagtayggaaagttgttgggtagagyggtygggaggagatatygggagtygggtgggyggtggggtggtyggtgggttgtttygggttygggagttygttygtagygygttttgttagtaaggggagagggayggtgggaagyggtygtttttygggtttgggtyggggatggggatggttaagttattygagttttygtttttygtyggtaggtattattygggggtygtgtaattygggygtttattgataggtattttaygttygygaggggttgtttyggttttaattgyggygttgygttttttttttaggaygtaggttaatgttygttygttygtttttagtygggygtagagttgttagatttygggygttttagygttygttttggggttaaygggygggagggggyggttaagttygtaggyggttttttyggttttggtttagtttttttyggttggtttttggagaygttgtgttyggtagagaagtaatttttgttaattttagttatgtgygggggaygtygagttggttttgtttggtaagaaatttttatttgatgtttttttygttttttttttaagggggtgtatagtggaggagggtttttaagtttatttgtttttttttttaagtygttagttttgttagttttgaygygttygttaaatttttttagttttttgygygttttttgtayggtaggtagagagagtagtttggaaaataaattaattgtttagtggtaatatatatatatatatatatatatatatatatatatatatatatatagygattygggattttaggtttygatttttatygygygtatatatatatatatatatatatatatagygattygggattttaggtttygatttttatygggygttataagagtattagtaaattgttgaaaayggttttattttattggggggaggttggtaagaaaaaagaaaaagaaaaaaaaaagtttgttaygygtaaggaagaaagaaaataaagaaaaatattgtaaaaatagatatttttttgtttttttaggttttggtttttttgatagaattttgaaattygttattattttttgtagtagtagtagtagtagtgggatagagtaggagtaaaataaatygatgtayggtaaatggtgtaattygatttatttttaagttaatttattaggygagtyggagtttggttttttttaygtattyggtagttttyggygygggttttattttygggtayggayggtaggaggygyggtyggtygggygygttygttttygygggtgaatygtggttagygtygtttggaggtttttattttggygtygyggttttgttgatttttyggtggttttygygtttttttttttyggygttttgttgygt

SEQ ID NO: 6992 - DNA, 1857 bp, Artificial Sequence
  Description of Artificial Sequence: Synthetic polynucleotide
yggyggtygtatttggttttatagtgtaaaatgtgtttggygaggaagtygaggyggygttgtagtagttgagygtgggggtttgtaagggyggttagttyggggaagygaggttygtggygtyggtagaggygtagtagtygggtygyggygttttgttygyggtgtagttttaggaygygtygygyggttygttygyggaataygtatattgattgtaatagyggttygttatatttgttttatatgtttgttattyggtagtygtgtattaagttygttttattgtttagaaagattagygtttygttyggatygyggtgtaggttgttggtggtaygttgtatgaygygygggttttattgtaggttgaagaggttgtttaygagtyggtygaagttggtygttaggtagtygaaaaggattaagtyggtttattgtattaggtttattagtttygtttggttgaggttggttagtttattttyggtatttyggagggggygtagayggtygtttttygagygttagggygygggtattattaygttygtgaggttgggtagttagygtgttaggtttattaygttgttttyggtttagtgygtagygygtagttttttttgtatttgygtttattgygygtttygagtttttattygagttagtgttagyggyggtaygtggygttggaggtttagtaggygygttagatagtaagatagggtttygttttgaatttgtttygggttgatgtygtagygtaygtaggygygggtgtygtyggtaaaaygggttagtyggttggagttgygttygtaattttygygttttagggttattattygggygtygygagtygtttttagttaygtygtygtttgggttttygaaaagttygggggtatttgtttttttaggtygyggttttagaagaygttttygtgtatygyggygttttttttyggtyggggttgtttggttgataygtgttatttgggttygtttygggattgtyggggygggtygttygygtyggtygttagggtgagtagygttyggaaagtttttagggagtygtygygggygttttaygttaggggygggggtagagggaagygaggygygggygyggggtygtygtttygggtygggygtygtgggagtyggttttygggyggtygggaggygggtagttyggttygyggyggtaggagttttttttatagygttagtagygagtttagygttagtagttagagtttygyggtggyggyggygtttygtatttttttgtttatgttttygyggttgtgtyggtgygtygtygtygttttaagtygagtttaggtattygggtttyggyggygaggygggttyggtagtttgtgggtttyggggtttygggygtttyggttttatygyggtygyggggygttgyggggttttgttyggygtttygttyggygttgggaattygagttttygtygttttttagttgtttttgtatttygttgtgagatttttyggtgggygygatttataggygttyggattaygtgggagttagggggatttttttttttttttttygttttygtttttygtttttygttttttygttttttttttttttttttttatttaaagyggygatggtttttttygagagggagaggyggttttatattyggttygggatttgggggtttggaggaagtyggattggttgygttygygtyggggygtaggagggggtggygtagagtyggagtttggggtttggygggagggaygygttttgggttttygygggggtgttttggtygtygggtttttttgtttaggtagygygg

SEQ ID NO: 6993 - DNA, 2423 bp, Artificial Sequence
  Description of Artificial Sequence: Synthetic polynucleotide
yggagygtagagaayggttggagatatagyggtygyggtttttttygtagygtaggagygttaggtattgygttgggttaattgyggttagggagttatttgttygygatagygagygygtatttatattttygattaatttaggttggtttttagtttattttygggttttaaygtttaaatatttygtattgttggtttygatatttttttattygtygttaggaattagygtagagggagatgygttttttgtggygggtgyggggygaggattttgattttagttttgggaagtgaattgtayggaggagagagttttttatygttagttttgttttygttttttttgyggttttattttagttyggatgtyggygatggggaatagattagggaygtaggagtatattggatygggggtggatttatttggggaggtaggtaatygattygygtatyggtggygtaatttygtttyggtgatygaagtttgtggaggtagttttattttyggttttttggttygatatttttttgttatttttttttttattttttygagttttgggagtttggatttygaaggtgtaaaaagttaagagtttggaaaattgtattgtgtaaatatattgattttatttgtttttttttaggagttttatagatatatttaggtaaaaagatygttaaataaatgtttttagttatygtaatgtaaaaataaatattaattttttagaygtagtagtagtygygttgygtttaaagttttaayggttaygtttaataattataaaagtgtttagygagagtgttggygtgagtgtgaatgggtgtgygttggggggtayggtggagyggtgtgtaaaatyggagttgtaaattatyggataagggtatggagtggttattygtygtygatttagygygggygygttttttygtatatatttatagtagagttygtattgggaagagttaaaaaataaatatttataaggaygaggaaagyggtttygttttyggygttttygggttagggygagygyggygaggggygtatygatyggttygtagyggggygggagttygagygygygaggagyggyggtttygggtttttgygggtttttygggagtagggygygggtattttyggggtttataygtyggttttygygyggatygyggaygygygygtttttttygygggyggygttttttatagggtygagtyggagtygttggagtttaggttgttttttagtttgtagttgttgagttgttttygttgtagygataggttttgygtgttgyggygtaggtattttaggttttgtaggaaygattttttggttttttttttttttatgggggatattttttttttttttattttttggatttygtygaaggttatyggttgygttttgaagygagattggygyggtygtygtagtyggtttyggtttttgggtagtttggygggtygtaygggttgygggaattygtyggttaggtataygaagtgyggtattatygtttggtaattggagtagatgtttattagttygtygggtttggyggttatggygttttyggygtttgyggggtygggyggyggggygtyggggtttttygagggyggtygttgygtyggggtttttygggaggtagtagtygggggttygtygggygggggatttaaatttgttgyggggtggyggyggttttygygggttygggtyggygtttttygggagggygggygggygggyggattygtyggggggtayggggttyggggggygttgtttygtygygtttygaggygttygtygtygttgttgtygtygtttgtttygyggyggttaggttygyggtttatatagttygyggttgtttatayggttttgagttyggatgatagygaatgttatttaaagygtgygygtttygygttttttygtttgaygtygtttygtygttttgggaaagtaayggtttttttttyggygtygttygtttttygttaatyggtttyggaaggtaggtttygttygygggggtttygggagaagtygyggtttyggagtaygyggttggttygagttgygttyggatagggatttttaatygtygygattgggygggtattgttttttttgggatttttaagtttgtattaatygggttggtygyggggtygtaggtttttttttttygttttttggttttagatgtatatatttgaggygttggttattttatygtyggttttgygyggggygygaggtagtttttagttttttttgtagtttggygagtttgagygttyggttttttagagttgagttyggaagaaggggtgggttttttttttggatttttgttattttttttygtaggygygygygygt

SEQ ID NO: 6994 - DNA, 1146 bp, Artificial Sequence
  Description of Artificial Sequence: Synthetic polynucleotide
yggtatttgggtttttgygygtttygtttygyggtygggtttatggtattgtgagtttgtaagggagtttygtttagygyggggagygttyggttttttttygttttatgygttygyggttttgaagtttgagygggggtygggggtygggyggggtyggggtygtygtaggtatggygttygggagtyggtggyggtygatattgtygtygttgttgttgttgttgttgttggygttggyggygygygyggayggtttggagttyggyggyggtttygggtagtgggttygttaygygygttgggygggygyggygagtagyggygagtttagttttagtttgygtattaaygttaygygygygttgttgttttatttggaygayggyggygattgygattttttggagttgttgttggtggayggtygtttgyggttgygttttaygttttygtgygtygagtyggttaygttgtagttggataygtyggtggtygaygatygttggtatatggtgttgttgattygygaygygygtygtayggygttggyggtggayggygaggttygygtygtygaggtgygttttaagyggygygagatgtaggtggttagygatttgttygtgggyggtatttygttygaygtgygtttttyggygtttaygttgagtatygttaagtaygagtygttttttygyggttttttggttaatttgaagttgggygagyggtttttygygttgttgggtagttagggtttgygyggygttatygtygattygttgtgygygttygygygtaatttttgygttaayggyggtttttgtatygtgttggttttyggygaggtgggttgygattgtagttataygggtttyggyggtaagttttgtagygaaggtgagtttyggggagyggtygttyggtgtttgggygygggggtgagggtttggggygtttygtgggggtyggagtgtgtgtgggtttttgaggtaygggggttgggtaygagggtttgtgagtgggtgygagygttttagggttgyggggaygygtgttygggygagggygygtggggttggyggtgggyggggygagtgggyggggtyggtttgggygtggttagygtgagttttgyggyga

SEQ ID NO: 6995 - DNA, 577 bp, Artificial Sequence
  Description of Artificial Sequence: Synthetic polynucleotide
ygttttttttattttgygygttttaygtgttttttgtaaataagagaaygygtaggygtygtaaattagygtttattggtyggygtgtygtygtttygttggagggaggatttaggtttygttggtygygggttyggtattyggtgggtyggtggagygtttgttgggttygggtygtyggtttygttttygttatggygttttggttgtagtttttgtygttgttggggttgttttygggygtagtggtygttttygtttagtttygagtygttagtttttaggtttgggggtygtygttttyggagttgttggygtttattygtttygygttggagatgtttaatygyggtygggttgyggggaygygggtygtgttgggttttgtgygyggtygygttygtygggtgaggaygygtygggggygggggygttaggttygggtttaagggataggagttttgatttaatattgggatggggtttgttygttggaygaatygatttttggtgatggggaatgggtagygtygtaygggyggggttttgggygtygttaagggtygattgtgttygt

SEQ ID NO: 6996 - DNA, 1721 bp, Artificial Sequence
  Description of Artificial Sequence: Synthetic polynucleotide
ygtgagttttygaaaggygaagggtaggtagtagtygttggtttttgygtttattaggagtttyggatgttygagttagggttgygttaaggyggtyggagtagagagggagayggggayggggataggtagggataaagtgtaagaggtaaaattggttgaaaagtagaagtgtaggagtygttaaggggygggaygaataggttygtgggtygggyggagttaagggtgggggtyggggtttttttaggtggtattygyggygttagtttttagtttttttttttttttyggttttgattggtaggyggtttgygattagtygygaaygttatagygtttygggygtttaggagaaygygaayggtttttygygggagygggygagtaggagggggygtygggttatatatatagyggttyggtttygggygggtttggygtttagggaggygygtattgttttttagagttttagttttagtygygygtttttygttyggttygtygttttatgtagtyggggtagagttyggygttygggggtttygtygtttgtttttygtattttttyggttgygtatttttgttygaggtyggtygtgygttttygygggaygttataggygtagttttgttttttagtttttygggygtattgatygtttgatygaygtayggttttygggtygggatgtyggggttygggayggtygyggtagygttgttttyggyggttttgttggttttgttggygttttgggygggtygagggggygtygtygtatttattgtatttaayggtaygttggaggtygagttggagygtygttgggagagtttggtggygttttygttggygygtttgtyggtggtagygtagtttaaggaggyggtygtttagagyggygtyggygattatttgttgggtattaagyggttgyggyggttttattgtaaygtgggtatyggtttttatttttaggygtttttygayggtygtatyggyggygygtaygyggatattygygatagtgagtggygyggttaggygygaaggggygggggyggggggtaayggtygtygggttaattygtttagttatattttgagattttyggygggtatttgttygggggtttygggaatyggggyggattygggtttyggttttttttgaygyggggttggggaygtagatatttttggtttyggtagtttagygtaatttttgaggtygggygtygtttttygtttttagaaattygggtttygagygtygaattttagygttttygttygtgggtatagggygygyggtgtagttatagggggttygagataygygtttyggtttggtttaggttggggaatygttggggtygggttygygtttgaaggttygggattgggtgyggtygtygggggttttttatataggtaagttaatttgagttagygtaggtttgggtttyggaggttttagagggtagtttgggttttggaggtttttgggggyggttgygtygggaattttggttttttatttttaattttattttagaaatagggttttyggaggygaataagtygaggggyggagtgggttagggattatttgtttygtaatgatttgygtttygtttttaggtttgttggagttttygttygtggagyggggygtggtgagtattttyggygtggttagtyggtttttygt

SEQ ID NO: 6997 - DNA, 1721 bp, Artificial Sequence; identical to SEQ ID NO: 6996
  Description of Artificial Sequence: Synthetic polynucleotide

SEQ ID NO: 6998 - DNA, 615 bp, Artificial Sequence
  Description of Artificial Sequence: Synthetic polynucleotide
yggagtttygggtaygtatygtygagygttttattttgagttttttyggtattygtagtttygatagtttagttttttttatttgaaagttttatttgaggttttttttaattttgtttttttgtatttttggygtygyggggagttaggggttaaatttygtggttygygtggtttttttttttttygtagttttttygtttttattyggygtygygtttggagygttygtttyggagattygtataagagaggaggggaaaaagtgggtttgtttttygggtggttaatttatygagttygyggtgttttagaggaggygttagygttaggttagygttaggtygggttgtttgtttttygyggtaaagtataaatgygttygagygyggygtttgaagtttttggygagtatagtyggttygygtttagttttttttygyggtygtygygtygtygtygttgttgggatygtygtttygtygggttttaggttttygyggttygatttygagtttatygagtagggggygtyggtygtttttagttygygygttygtaatattygttggtttygygygtttygttyggygttgygygttyggtagaygtygg

SEQ ID NO: 6999 - DNA, 1542 bp, Artificial Sequence
  Description of Artificial Sequence: Synthetic polynucleotide
ygggayggtygtygygygtttttttttttygttttttgtttataagatttaatgagttttttygggaggtagygtagygagttaggttyggaattagtaggttgygtygygygygtygygtyggggygggagttgggtttgggyggygggtaggagttggygggggygtaygggtagygttgyggatagttygggagtygyggygatggyggtgtaggyggygttttttagtaygtattttttygtgtttttyggtttygggggtttttyggaygggttagggggygttttyggagttttggataagggttgttgtttygaggaygatgagatyggggtttyggygggtgygttgttgtygggagtygaaggaggggaygtgygygaggttattygygatttatttagttttattgattyggygtttagtaatattaagttggygttggataagtygggtaagtygaagyggaaggtgaattatygtaagtatttgtagaagtagattaagygttgtagyggttttatgggygtygygtttttyggttygtttttttygagygtygtygataygttagttaaayggtygttggtygtttttagygtttygatagtygyggtttyggtttayggtaaggttgtttttyggygggaggygtygtaggtygtygyggtygttagtttgtaaagtygaagtttggtygygtttttygattygttgygttaygttttygggggtgtygagtyggyggggggtgaggtggttgygtyggyggtygggttaggaggtgygggtattgggggygygggaggggaygtggtaggtttygygggggttayggygattttaggggttaggaaggtttygttgygggtaygtaatttgttttygtttttttttayggagtygtttygggtaggyggyggygggtgtggttygtyggggtyggaygtgagtttgggygatttggagaagggygyggaggtygtggagttttttgagttgttggggttygattayggygtyggtayggaggyggtagttttgtttgtygtygagtttttygaygtgtttttygtyggagttttygtattgyggggattttyggagttggagttyggtttttttgagtygtygtyggtagtggtgggaaatttattgtatttygagttttggagygtttygggttgtttttygattaaaaagagttttttgattgtttttygyggyggtttgattttgaaygagtttttgagttttttgtatttygtygttgyggattttttyggyggggaggaygggyggggttatttggtttttttygtttttttttttttagattgygttttgttttygtygtygtygttttattaggtgttttaygattatagygygggttatagtygtatygtttattttagtttttggagattygayggggtttgggaaggggygtygggggaggagggggygtatygggattgatttygaggtaygtttttttttattagagayggttgtggagagygtygygttttygt

SEQ ID NO: 7000 - DNA, 1542 bp, Artificial Sequence; identical to SEQ ID NO: 6999
  Description of Artificial Sequence: Synthetic polynucleotide

SEQ ID NO: 7001 - DNA, 1768 bp, Artificial Sequence
  Description of Artificial Sequence: Synthetic polynucleotide
ygygtttggagtgggttttygatatttagggtaagtgggggyggtagagtttttttttyggtyggtatagtagtttttgtygyggtttyggtttgygaygygtttagttttagtttttyggttttyggygtttgttgagtgttyggygggagaggygtagggagygygttatygggaggygygggtagyggggattggttttttttygggttagggttttyggggtaatygtttttagygygtatttttggtgtaggtggaatagttttttgtttyggtagggttttatttatygygggagaggttaatttyggatttaaatttygtagtygtagagygggttaaaatygttattttatttttttttattttttttttttttattttaagataaaaagttttaggtygggtaggatttgattatttttgtttttttttattgygttaattttgygagygagaggtttygtatygaggyggaggttggtaaaggggagtggaaagggaggatggatggggtyggggggtggggtggtgatgagggygaygaaggagggggtgttattttttttttttttttttttttaaaaaaagtatttttttygygagaaatygttgygyggaygatatttgaagaggtggggaaaggagggggttgygggagtygyggtagagattgtgggtgttataagyggataggagttatagttgggatagttgygagyggagtygagtagtggttgtagyggttaygattgggagtagtygtygtygttttttygggagtyggagtygtygtttttttagtgggtgtagtyggggtttygaygggggtygggyggttatyggggttggagttgyggttayggaggtttttgygtttgygtygygtygagggtagggatagggattggggtgaggggttgtttyggaaygtttatagttggygttggtttttttttgtttgatagttttttggttyggggtttttggtgtygggtttygygttagatgttyggggggyggtggtatygttyggagtyggyggggayggygyggttggtttttagtttggyggagagggtaggttgaggagtggggygtttagagygygtatygygygtaattygtgtygttaaaaaaaataaatttagagagttygttyggggtttaggatygttggggatatgggtattttgygtygygtttttttggyggggttygggaggtygagggatyggtyggggttgttgtygtygggggtttgggttttttagttagttgtggattaaayggtttttttttatttaaattaattgygttaygygtaggyggygtaygggttgggtttgggaatggggatygygaggttttagtatttygatgttttgaaagttttttygtttyggggatttgtttttgtgttgtagttggtaggggtygtttgaagtgggagtagygtttggagaaggygggaggagttyggttygggggaygggyggygggatagygggatttyggyggygyggtgygttttagggygtagyggyggtygtagatygagtttygggygyggtaagaggyggygggagtyggtggyggttyggtattatgygtygagggygtttgttggagatygttttgggatttatygtgtttttagygttttataygagttatggggyggaygttaatttggaggttgggaaygtgaaggaaattagagttagtygggttaagagaagaggyggtggaggataygaygygt

SEQ ID NO: 7002 - DNA, 2656 bp, Artificial Sequence
  Description of Artificial Sequence: Synthetic polynucleotide
ygtataggaattttagtygtttaagtttygggtgggygygtygtatttttttaggtattgtttagatagttygttttttttttttgggygttttttttagtttggttggggtyggggygggttgggggaggttttygygggtttgtttgatatttgtaaatggaagtgggatttaatttggaaaataaaygygttagagtttgggggyggagaggagygggaggaggggagaggggggaaaaagattttaattattatygyggttttagygtttttttttttygtygyggttgttgtaggttygtttaaattygaagttgagttttattgggygygyggyggyggygggatggagttggagttttyggtygaggygttaggagtttattagatttygygtgttagagttatyggtygtttaygtttygggtygtaggygttattttttttygggagttttttttagttttttayggagatttygtagggttttygtagttttttygttttygaygtttatttyggggatttttttttatygtttggtttgagtttattattttagygagttgtagttttaggatgttatygttagtatatttatatttygggagtatttttgttttttttatttygagtaatttaagyggtttttttagttygtagttaaatttyggttatttttgtatttttgttttaagtaygttttygttatttttygtttataagaggagaayggtggaaagtgaataaaagttgtttttygtaaagtttaattatgtttaatgttaaattatttyggaaagtatatgtgataaaagttaaygagagaggagaggagggaatttagattatagtatagttaaaaatattygggttygttattatgtaagtyggggggttagatgtattttagtttagygatttttattggyggaattttygygtttatygygygtygygttaagatggtttaggttatttttattgttttttygttagygttttttagttttttatatttgttttgtatatatattggtttgtagaggggattygtttygaatygttygggagtggggtttgagttyggagttggtgtttttggygttttygtttttaattyggagatagttttttygtatttttggggatggttagattygygttgttttttttttaaagataagtagtttttttataygttygttaaaaattatgtattttygtaaagtatttyggttttttttttttgttaagatagtagggatagtttttgtttttaattatttygtaaaggatgtygtttttagtygaagagtygtygtygtygtttattatattttattttgattataagtttygtaagttygagttaggygtggggaayggattygtagattggtaatttttttttttttttagygaaagtggaggttgggttttttttttgygtygygtttygtttagygatgatttaatttgtatttyggggttttttaagtgtattatttatyggtatttgaatattttttattgygttygagaggtatyggttgttaagtaggttygttatttgaatttttttatttatttgtaggggyggttgggagtyggggatgggtgtattgattygtaatttttttygtaatttttttttagatttttagttttaaatttggttaatttttygtgtaaatttttyggttttygtygyggggttaagttattttttttttttgtttgtagyggtagtaayggyggttyggggttgygyggaggttggaattttataaggtgaaaagttttttttaygygtttygtyggttttygtttttttagtttatttygtagtttatttgtatttagtagttgaggttgtgtttyggtaggygygttttagtyggtgtattaggtagttaaattattaygttataaatttttaygtatttttgttttygttggygatttayggttttaygaggygtttttttygtggttttttttattyggtgttyggygtttttgtttygggygagtyggtttttyggttgttgtygtygtagygtttatygygygttagtygggattgaggtygygagtagaagygttttgygttygggaygtygtygtygtygtygtygggggttygtaagyggaggaggggagtygagatgaagagaatagtagygggaggagagggaygggaggygygagattttaattygtaggttagtttatagygtagtttgyggggaggagygtyggtttttttgtttgtttygagttgtagtygtygtygttattgttygtygtttggttgtttygggttttttattatagtygaygtygaygtayggttaagtttttttttagtttttttttygygtttgtttttygtagttttttttttttaaatygygagygaaaagggygagggggagaggagtttyggyggyggggatgattagygatttaggagygtggygtaggggagagggggygygygggagggggyggyggaggaggygyggygaattggagggtattttyggygtygggtttggaagyggttaattttagagttygagtttttttttagttttttggggttttaggatgatattaaygtatttttttgtygyggggagagygt

SEQ ID NO: 7003 - DNA, 623 bp, Artificial Sequence
  Description of Artificial Sequence: Synthetic polynucleotide
ygatattaygygagtgtgtaygygttggggattgagttttygaagygaagttttgtyggaggagttttaggygggagtgggaayggttgggygtggggttagtaayggygttattyggtagggtggggggagttaggtttgttagagttagagygygttatygtygtygygagagaygtygygttgtttaataggtagaggygttttttagtagtttggtgggagtagagatataaaagtgttttaataaattyggagttggygtgtygatygygggttggtggygggyggygyggtgtttygygygttygggttttttggtttttygggayggttttgtatgttgtgygtttygtatttyggttgygygtttygattttagygggaggggaygttyggttygtaggtttttaggggaggggtggtttttgtaaaatggttttttattttttgttgttttgttttttttttttggtgygagttatygagttttaygagggtygggtygaygagtagagygyggaggyggttttggtygtgtttaatgtttygtatttttttttttggaataattatatttttttygattggtagaattttgtgggtaggaggygttayggygt

SEQ ID NO: 7004 - DNA, 1967 bp, Artificial Sequence
  Description of Artificial Sequence: Synthetic polynucleotide
ygatgatggaaaggatygttaggygattttttaaaaggtttattaaatattygggttttattgttaygtttttattygggggygaggatgttttaaaaatattttttttttttygttttatgtggataggtygygtygyggtatttaygggtatygyggaaaggggtataatyggggtggttttygtttaggtggtagyggagatttagggttaggyggattaggtttggtttttatttttttttttygggttttgttayggtttygtttygtygttagtagagttttyggttygyggtyggtyggttagygtaygygygtaggtgtgtttgttaggatgtttttttyggygaygygtttaggttyggatttygyggygygagagtgagygttggygggggyggtgggatgttttaagtyggygtgaaagaggygagagtgggygagtaygggyggtyggattaggagtattttyggtgattatttagtttttattttattttttyggaaattgtygggtaggygggggatyggtygtagggyggggttttttttggyggtgagtgagygagatygttaggttgaagtatygggagattgttttggtagtttttggtygttattygygtygtaataaaagtttttygyggtttttygtttagttagtttygtattgattggtygtygtgggagggattygagttggttggaggyggyggtygagygttgtttttgtgtygttygyggagggggygtattgggtgttttttggttygtttygtgygttttttaatygggggtyggtygtttagggtaggtataayggtatttggagttgygatygygatatatagttttttygttyggtttttttygatygttttttagtataygtttttygtttagaatgttygtttaatttatttagttttttgyggtttttgttttttttttttttttttygtttattagagttaaagygtaaatttttgggtggaggtggggggatgatagttggaggggagggtgggtaygtatagaagaattttttagggaggtygggatggaaatagttaaaatgaaatgtatttttttgtatattgtygaggttttttgggyggyggygtaattttygttattygyggtagtattattattgttttttttttagttttttattgtttatattttgttaggatygggaatttygtttaaagaaaggagatagggygaggtgtttygggyggttatttgttatttttttttygtttygtgtaatattgggtaygyggygygtgtaaagatataygygygtataygygygygtatatattaggtagttttaattaygtttttttygtttttygttttttygtatttttttttgttaaaaygyggygttygatttttttattttttagtgttygyggtygagggtaggttttgtaattaattagtaatttggtaaatgaaaaattaaygttatgtygattggggtgtaataayggttatattaataataayggtygtgygattttgtttattttgttttattttgtaaatygttatttttttggggygggggaagtaaagtagygattttgattttattagatttaggaatataaygatttggggyggttgttttagttttattgtttatttttttyggagtyggggttgataagttatttttttttyggaattygagttygtgyggyggtattattygagtygygatttttttygtttygtygttygtttttggggaaggagygttgtttattattagygyggtygttgagtttttaggagtyggtyggttttgtttttatygtygygggygtataaagtgggaagggyggaygygtyggaggggygtygggygttggyggttyggggaggtagtttygtgtagygtagttttggagggagyggggttyggttgggtagtaagggygaygygt

SEQ ID NO: 7005 - DNA, 2558 bp, Artificial Sequence
  Description of Artificial Sequence: Synthetic polynucleotide
ygtttyggggtggggayggaggtygttaaggttgggatgagtatttagtygagtygagttatygygtgttttttygtagatatyggggtttttgagaattaggagggaatagttaaaagaatggaagtttggygttttgaaataagttttttgggttttgagggaaatttgggygtttaygggtagtygttttttttattygtygttyggygttygygattyggttggygttggttgtagygtttagttaggyggygyggggaagagtyggygataattygttygagtttyggggatygatygygtttttatatttttttagtttttagygatttttatygagatttggagaygattttagtaaatttggggaagtaatttttttygaggagttagatttttgaaagaaggagagttgagttagggaygagggaaagygaaagagayggggaggaayggygatagttygggygggttggatttygyggygagagyggtaggggaggyggattygtttygyggygaaggggaagtataaaagtttygtagygagttgtgggaggaaaggygagaaggggtttgttygtttttttttttygatttagggtygtgattttttgggagygatyggttgggttttaggtttttggttagyggygttagyggttagygygttyggtttaagtayggtgygagygtttyggggaggyggygagygagtyggtgyggagygtttygtgygttygggtggtttygygggtyggygggatygtgygtattttaagygygtgygggagtgtgygaggygttgtgygagttagyggygggygygttagggtgggaaaggtatttygaaygtattaggtgtagagatyggtatttatygagagyggtygggagygtayggygagtttyggtgttatygtyggtttygtygagagtygaggagggttygtagygttgtagattttttggagttttttttttttttttgtaaaaggggggtggggattaagtttaattaagaaaaagtttattaygtttttttaaagagaaataaaaygtaagtagttttagttttgttttttttygtttttagatttattygttagttttttygattttagttttttagtyggtyggygaataaatatataaataaataaattataattttattttgygttygygtatyggttygtatatataagagtatttaygggttttgttgtttygttagtttttggyggtataaagttttyggattttygatttttttgtttaygtttttagttttygtatatygttaygttttttattttttatttygatygtgttttgaagaggaagggttggggaggtagttgygtttaggttgatagtyggggtttttttttttagtygatttttaatyggtggyggygayggttgtagyggtaggaagggaataygttaaataaaaaaggtataagtttagyggtygagtggtygaagygagygygygttttttagatttttttagtttygggaagtttyggygygyggygttygttgggyggtgygttttttttyggttttttatttatygtagtygagtygggtattgtggggtgggtgtgygtgtttgtyggggggtgtgtgtttgtgtyggggaggggtgttgttggggaattgttgtttttygtattayggyggtagygatagtatygttyggtagttygtagtattygtttttatygtttttaatttttttttgttgygaggttagtaaattattatyggttgttgygttttygtygygttttaygttaaygtygagtttttttttttgtaaggtttyggygtttttttatttttagtgttggyggtygagttyggttttttgtttatagttgtttttttttttttttttttttygygtygttttygggtttagttygtttattatttygtattggtygagttygygygygtttttygttttatttttttttttttttttttttttttttttttttttttttgygtttygygtttygggtttygtttgatatttagttgttgttggggygtyggyggtygttttttatyggtygagyggagaggaaggaaggagttagaggataggagtgtatggggatttagaatttttaataggggaattgagggtgaagggygygtagtagtttttatttatttttaagattttaatttgtattggataygggttttgttttttttttttygtatttyggtgtttaagtaygtagttttgtttttttttttaatgtttgttttaatttagtgygtgttatttygtttttaattttttttttatggttyggggttgtagtttttttgatatttgttttaaaaggtygtttttttagtttaaattyggtttttttatttttttggttattgygygtttttyggtttgagtattyggattttaataagtttttygaggtagagttygygggygttagtgaattaggtgttagaaggttygyggggatttattgtygaagygagatattygtttttagttgtygyga

SEQ ID NO: 7006 - DNA, 2558 bp, Artificial Sequence; identical to SEQ ID NO: 7005
  Description of Artificial Sequence: Synthetic polynucleotide

SEQ ID NO: 7007 - DNA, 1508 bp, Artificial Sequence
  Description of Artificial Sequence: Synthetic polynucleotide
ygttttttagatagyggagtygggtyggggyggtttggttygggtygtygtttttgtttttgggtttgtggggttggggttygtttgggtttygggttygygyggygtttattattyggggtgtygygggggggyggggagagyggtygtttagtttagtttygyggatgataggagtyggggagtygaggagggaggagtygtygtygtagtygagygttgggttgaggagtagagagagyggggygtygagtgygggyggttgggagygygttgagygggggagaggygttgtygtayggtyggttataggattattttttyggagaatagggtttttttatggtatgtggttggtaattttttttttgtttttggattttttatataaaggtgagatttgygygggyggttgggyggyggaggyggyggggttagggtggygyggttggyggygaggyggggtgttyggygggttttaggtgygtgggggaatygatyggggtgtaaggtttygggtggggygtagyggggaggggtaggtattttgataggggtygagtgagagttagttttygatygtttygttagttattygygtttgtygttttggggygygttygtaggggtggtggtaaaggagttttttatttttttgttttttgtayggyggtagttttgttttggattttttttttagttttttgttttttttttgyggtttggtggtattgggatttyggagtgtttttygagtygaggggtttttaggtygtgatttttgatttaggagtttttgtttatttaggtttyggattyggyggttgattttttygttatgttygtgygtttttttttygtygyggattttagttttggygygaatgttggygtatygtatggygtttattygygtattggttggaggtagggtggggatagtgagagtttygagagttggaggtttttyggatagtaagtttgttttttaaatttagaggttattttttttyggttttattttatttttttgtttyggttttagtttyggtttggtgygttatygtggttatttygggtagygygttttaagatgygagatttttygttttygygtttggttagttggatttggggataagtttttaggttggggggygtgttttttttttyggagagagggggttgttaggggtgggtttaggtgttyggtatgtttagatttgyggttggggygttgygtatttgattygygaggtagtygggatygggaggttggaagagggtagatattttygattgaagttatttgggtattgagtygggattaggtaggygtaggtagtttgggttttaggttatygtagaggaygtgttttygggygygtagatggygggagatgaggyggtygaatttygygtttttgygtggtggagtatataygttttaataagtttagygttatttgtttagttttttaatttttttttttttygtttyggggygg

SEQ ID NO: 7008 - DNA, 1119 bp, Artificial Sequence
  Description of Artificial Sequence: Synthetic polynucleotide
yggtggygatatggtaggtagtttygygtggyggyggtygggatagttgggygygttggtaggagagtaggtatagygttttttataggtaggatgaygygggtttygtagttygtttttttaygttgtttygtattattgtttyggttttgaygtgygtgygatagatttatygtaaatagtttttagygggagtaygaggtygggataggaggtgggyggttatataggatattttattttttttattttttygtagtyggyggagtygatygtyggaaaagggaggyggtgggygaaaggaaagyggggagttgggagaggagttgtaaataaagagttgtttttgtgygaagttttgagtygggtttagttagttygttttttgtggtttaygtattgttygtyggtttaygygggagtttygaggggygaggyggaggttgggygtagtttttgtagttagtagttattttygygygtttygtygyggtttagttaattatttgttgyggyggyggtygtgttttttagggtgtattagtattttygtygygggygttgttttygyggygtyggtatygatgttyggttatttttaggttygaaygattgyggttgygggaaggygggtygaggggggttayggtattttagggagaggtygggagtygttyggatttyggaggggatggggttttttttgggaggtattygttttttttttgggttttaagattttttttagttttgygtttygattttatttttttygaaaygtyggggaatygggaaaggagggttaygggtaaagygggggygggygttttttgattagtatgyggygtyggttgttygggttyggattttygagtttttttttygygagygtatattaataagtttataaatggaattyggtggygtygtttgtaataaaaggtagaagttgygtttyggygttttaatgagagtattttttttygtaataaggggttggatttagttgtttggtgtygtttgagyggggygagttgttagagtaattaaggtttagygygtaygtggggagagggagttggttggggttttagygttagtygtygtttgygygttygg

SEQ ID NO: 7009 - DNA, 1119 bp, Artificial Sequence; identical to SEQ ID NO: 7008
  Description of Artificial Sequence: Synthetic polynucleotide

SEQ ID NO: 7010 - DNA, 653 bp, Artificial Sequence
  Description of Artificial Sequence: Synthetic polynucleotide
yggaagtaaggygggttagttatygtttygagttaaagtttttgtagttttggtaatttttygygygtttttgtttaggagttttatattttagagaaatttttyggygtttttagtttygttgttttttttaggttttgggatatagttttaagggattgagyggttyggaygggatttgaaatttttggaggattagttaygttygtatagttygtttatgygygttggtattaggattygtaggttgttagyggygagttttygtygyggttttttagggtattttyggagaagggggyggttttgaggaattttttgtatttyggatgttttatttttttygtttttagygttttagggttttgttygggttttggtygygygtggtgttttttttagtygyggagttttgttttttagtgtygttgaaaggaaagagaaagaaaaygttttyggttttggaggttttgtttttttttgaagygatgttattttttttttttatttttttttttttagattttttttggggtttyggtagaggyggggyggttgygtttygagttttttttyggyggtagygygggagyggggttggaaaagagggygtygggagtygtttygttttttatygtttttggttttttygt

SEQ ID NO: 7011 - DNA, 1768 bp, Artificial Sequence; identical to SEQ ID NO: 7001
  Description of Artificial Sequence: Synthetic polynucleotide

SEQ ID NO: 7012 - DNA, 1101 bp, Artificial Sequence
  Description of Artificial Sequence: Synthetic polynucleotide
ygttgygaggattaagggagatggaatgtagygtaaagttttaygtaaaygtgtygtgtaatatgaagttttttattttgagttggggagygggtggtaygygtggaagttgaatgttattatttttgggattaggygtagygttttttagaagygtttttggtgaygggtttttgtttttttttaggaygttttttttagaatgtttyggggttttggayggttttggagaggaygggagggaagggaaggagaygggyggaayggggaygtatttgtttttattgtatttttttygtttttttatttttagttatttgyggaggaggaagygttttyggygyggggaygygttgggtgtggagtagttggattayggggtgttttygtygttggagggygtgatttygatggayggtagttgtaggaattttttgtygggggttaagayggygggtaggtttygggttagttyggtttttaggttttgtttttgtaygttttttatgyggygtattttgaagygtyggyggygaagygtgggggtygaygaattggattagatygggttgttttygggygtattttgyggttygggtatttgtagggygggtagyggtyggttttttattatgttggtygtyggtatgggggtygtygtttttgygttttttttgagtttttygttagyggtttggttygygtttttttttggttgttttttattttyggtttygyggtatattttttaattttggggtygaaggaataagtttttttttyggagygtagygaggaagggaygygaggggaygyggygtagygygtygtygttyggagtttaatttttyggagygygygtttttygggtygttagtygtyggygaggttattygggaggggygggagtygtttgttagttattyggtagtttttttggggtttttttygygygttygtttgtttttttttygttgygttttttygtttgttggygtttttgttttagygggattyggtagttaggggttttagggggyggtgtagtaaatttttagyggtttgygtttagtagattaggttggggagtyggtttggygt

SEQ ID NO: 7013 - DNA, 1101 bp, Artificial Sequence; identical to SEQ ID NO: 7012
  Description of Artificial Sequence: Synthetic polynucleotide

SEQ ID NO: 7014 - DNA, 2341 bp, Artificial Sequence
  Description of Artificial Sequence: Synthetic polynucleotide
yggtttttgtaayggaggyggtttygaaggaygtaggattttttyggaggygatagttttaggagttttggttttggagtyggygtaygtttaggygygaagggygggggttyggggygttagggatttgtgyggaygggggttggggaaggtttttygtyggagaggyggygaggtyggtttaggagtttygyggagtyggyggttttttagygtttagagtygggygattgagtgtygagaggaagggaaagygttgatatgtaaataggggtttttatttggaggagttygtttagatagatttttygatatatttatttgtatttttattttygtgtaaygaggttatttatttattttagggtttattaggtagggattygagttygggygattgtagttttygttttygtygtgtttygtttttgyggagaggaagtttagtgtttagygttggggttaygggagtttygggtgtyggtgggagtggtggatttygaggtttttygtttttgatttygtttygtattttggggtttttyggtttttygtygtttttttttgtagtttyggygggtagygaggtgggaggggggtyggggttttattttgggggttgggatttygggggagggtygtttttaatgygggygtttggtyggttggttygygagtaggattygttattygagygtyggaggagtyggygygaagtyggggygyggagggaagggagagaggttaygtttttygggaygygggtttygtatttattygttygtygtttygttttttyggtyggttttygtygttygygttygttgtttygtygtttattttaatagtttygtttatttggttaagtttgtagtygagttttttaatattttatatattgattyggttatagtttgatttygtagttttttyggattagttyggygyggtttttttggygttttgggttttttttgygtgttttttgygagygttttgtttttatttttttgtgtaygtttgttgttgtagyggagygaaagagatagttaatyggatgaaattttttttttagttaattttgggaagtgattttattttgygaatyggggaggaagttttatttttttttttttttttttttttttttttttttttttttttttttttttttygtttygagtttttttttttttttttttttttttgtttttttttgttttttttttttttttatatttttttttttttttttgttggttttgtttttygtattatatattatataaatataygyggagatgtttagatatatttatgygttgygtatataggatatttgtttttgggagataagagttagtygggaataatgayggggtttaygtttagygttygygttttgattttygaagtttgaatttttttttattatttttttttaaaatttaaagttaaagatttttggtttttttgttttttttgaggyggttggtygaaggtggtttttttgatttatttatttttygtttttttttatagataygtttattaatgttttttttagtyggagataaattttttgggggtggggtagggggggtatggagggagagttggttagggttgygggtaatttagygtttattgtyggggaagattyggaygaaaatygaggtaaattaattattaaaaagtgtatttaataagaatttttttatttaggtttttygttgtygagaygyggtagatttttagagyggtttatttatttatygaagyggattttgggyggtttygggttgattygygttgttagggygyggattttatttygggygtattgttaggagaaggggtttttyggggyggygygtttygattttgggttttyggtgttygtagagggyggagattygyggygttttaggttatttattygtattttttygagttaaatttttagygtttattyggattygayggtttaagtattgatttttaggtaagagtygttttttttggtttttagggaattgatattatygygggaygttttttttaggatagttagtaggttttaggagygtagtaygtaatagygtagagtagatttagatttttttyggggtgagattyggaggttygygttttggatygttttttttatttagtttggaggtyggygtttttyggtttaattyggagattttttygttttttttttgggtygtygygygttttagttggagtagtttygaggggttgggttttttyggtyggatttttttttttyggatatttaaaataggttattttgtttaygtttttyggattaygt

SEQ ID NO: 7015 - DNA, 3857 bp, Artificial Sequence
  Description of Artificial Sequence: Synthetic polynucleotide
ygagtagaaattatygtgtttttgggggtttttygggygtygtggggygaygyggtgtagygtttagggtygtygtaggtygggggtagggtttttagyggttttttygyggttagyggttaygtaggaaaaattygttttttygtttttgtatttgttgataagtygttygaggtgtttgygttgagygtggttatatygatgtagttttttaggaaatggttygggagggggagggggygagtgagggattaggttyggttttttttygttttttttgygtaaatattattattttttttttttttyggaggtatgaggtttttaygttyggtttttygttygtattttygtygattttttyggtttygygttttattygttaggttttttttttgggagtygattgyggtgaagtygtygttagtayggtyggttttgataygtgttttaaygtatgtttgagttaaggttgtttttataggagataygatttggtggygtttttttattttttttttttygttattttttatttttatygygttttttggtgtattttattttaggaggaaggggagagattagygttttgatgtgttggttaagttggtaygtgtagygggtatggygtggttygagttttttgggtatatygaggtygattgagtgttttttttatygagagagggggttygggtaggggygyggagagttagtaaggyggggtggggygygggttgggtgagtygtatattaggttttttgtaaggyggaggaggggagygaataaattagaggtgtaagygattaatttaggtttyggagttagtttttttaaaygagggtggggyggaaggggtggtgggggggaaaggaggggatatygttttaaaagggtgaggaagagtttggggygtygttttttttttttttatttgtatagttaatagttttggggtttttgttattgygygttgattgttatygggtagattattttttttttttttttttttttttttttttagtaggaygygttttttattatattaaaaggaagttaagggagggyggagggagagygggygttggggygggygaaagttggggagaggttyggtygttttygattttattaatagtagygggaatgagtattttattttttatatgtaaagaaaggggagggaaggggygggygaggaaaatgtttaattgttgtggaagttattagtttttaggaagaaaaaaagttygttgaaaaatttaagttgtaaatttaaaatgaaatagtttagygtygyggatgatattygggtygaatatygtgtatattygtatatagtyggtttygaataattatttattggttttagttaygttgggtttttygatttaagtttttgagttatttyggataaggatatttatttatattttaagatttttataagggaattattttaattttatttaagttatttttgagyggattaaagaaagttgtagyggggagaggygagagaaggagggagggygggaggtatttttaaagtataaatttaattygataggtaagggatagaggtygtyggggtttttagtttttggatattatttgatatagttttgygagtaaggttttttttatttygatttygtatattttttttttttyggggaaaggtatttagagttttgggtttttygaagtgggggtagygggggygaggaagaagygggtggtygtttyggggtttagtttatttygaggagaatgtttgggtggygagtttttaygtttygggagtgagtygagggttttttygttttttttttttttttttttttttatttygttttgttttatagagaaattttagyggggaggggggtagygaatgggaggggtagagagggtygyggtyggatgtttttttttttyggygttttttgtatttatggagattygtaagttygggygtttttygygtggtaggttygttttttgaagtttttttgtttattttttttttygattattgattgttttygagygtgaagttygttatygaatttaattttyggtggttttgtagatttttataygtggggtggggygtgagagggtgyggaggttggtaggaatgtttttaggaggtttggattggaaattgagtttttttttttggtygttattttagttatgtgttaaaattttaatgttttgttaaaatgtattttatttagtaygygggaaaaygtatgttgttttttaggtaaaagtgtatatttttttttagtgtagatttyggttttaagaaaaagygtaagagtttgtgttttggttttgaagtttaaattgattatygtggygygggggtggggggyggygggagggggtagattgttggtttttttttattttttttttattttttayggaaaaaaaaatatatatatatatattttatgtaggattggtgataaattttagygaaygttagttttattggatttttatttttttttyggtyggttttttattttttaygttagygttttggagtttyggttggaaagtgtataaagtttggaggtggagggtgtagtagggtgttgggtgtttataggtatttttttgtaggagtttgtagtattaagtatatatatttttaagtttatttggaggatgttttttagttaggtgatttygyggtyggtttaaggttygggagtagygygagttygagtttygtttttttygygtaggggygtttaggttaggtggggagygggtagtgattgagtttaggtttagaaatgggagttattgtttttttttyggtttttttaaagagtggagttgtgtttgtgttttttygtggagggatggayggttaattaaaatygaaaattygattggtaaaatgygaggggatatataaattygaggggatatataggaggtatattaagaggaaggagggagtgtaggtaaagtagaaaaatgyggataaggagaagaggaaaaygtygggaagyggagagtaygggggagtagggtgggtggggaygggtagtgygattgtaggtgtttattygttttygggattttttggtygtagtygygttygtyggggygttgggtygttgygttttggaggggggtagagttygttaggtttgtgtattygtatttttttyggygaatttyggtttggayggggttggattattgaggyggtagatgygataggygtgagttaagaaggygagygtttgtygtttgttatttatttagtattttattttttttttttyggaaaaaaaaaaaattaaaagattygaatttttttttttttttgtttgatttagtttaggataygttttaygyggtygaaaatagttttggaaatatatttgttttataaaagtgaattttttaataagttttggggyggggggygttyggyggtyggygtyggggggttttgtttttygggaggagaaggaatyggtygttttygtttttttttttttttaggygttttygggagggggtygttgggyggyggaatygygttttygttyggggagttattaygyggttttttygyggaattttgaygttatttataygtgggggaaggggttgggagagtaagaggaagyggygggggagggggtygyggttgggagagygyggyggyggygyggygggtttggtattttygyggtgggygtagygtygggtagggttygggttttgggtagygyggtagaggaggtygtgtygyggatttyggagttagygtygygattygttttttttttygtttttygtttttygt

SEQ ID NO: 7016 - DNA, 1439 bp, Artificial Sequence
  Description of Artificial Sequence: Synthetic polynucleotide
ygygggttttttygttaagygggaygtygygtygggygggtgagagaaagttygggtaggagagtatagagtyggygattggaygygagygyggggygggtggagagygttttttygggygtygttgttgttgtttygggtgttgaaaagtygggaatttttygggaagtagyggtatttttttttttggaaggtgggtgtgggggttttagattgygtatttgttaaatttttttgggtttttygggaggggttygttagatgtgtttttttttagttttattygggggagaaggatgggggygggggygtgggggtgagtatagtyggatatygtaagtgggaatttggggtgttttttttygtagttttygggtagtygygygtygygaatttyggtttatttgtaagtaaggygggtygggggtagagggygtygggttgtgygggggaatyggttygygtttygggattggggggyggtggaagagagagygagygggtatgygtagtggggyggaggaggtggygatggtygggggaggyggggggattgttgtttatttgtagttgggttaatttygyggygtaggyggyggyggagygyggggagttygyggygggtttagttgtygtagtattatgttygagttttttttygggtagaygtygygygtygtyggggtttyggtaggggaggatgttagaygttygggagaggttagggtagtagyggyggyggyggygygatggtggtgattatttttgttygaggyggyggyggggatygtatattttttyggyggyggggttgygggttagygtyggtyggggtygyggygttgttggtyggggtaagttgtttgtgttayggtygttttttgtagggygagttygtgtaygaygaygtgtgggygatygtgaataatttygaygtgyggttyggygtttygtttygttggggtatttttattaaygatttttggggtaagggtatggtygagaatattagttataagttttatyggtygttttgygtttttatttttaagtgagttttttatttygygttagtygtygttgttttttttatttttygttygtttttyggatygggagaagttgygggattgatttgggggtattttatttttgtygttttttttttttaygttttttttttttttaggatgtgtatggtattttgtttygggatttattgttyggttaatttgggttttyggggyggttygggaggygtyggttggggagttgggatygagttttttaattgtttgtttttttagygggtttttttttygaggtagggttgggagygggttggtgaaatygttttygtattttttygtttgtyggatygtgattaagtgggattagygyggatttagagggtttyggaggggtggyggtggtggyga

SEQ ID NO: 7017 - DNA, 1288 bp, Artificial Sequence
  Description of Artificial Sequence: Synthetic polynucleotide
yggagagggtttttygggttaattttgggtaaygatgagtattttyggtttyggtaggggygtygggtygttygtttttttttttttttttttttgygagttttttttttagaggaygyggggagtygggtttgygygtttygtygtttgttatttagygttygygtygggttgygattggaygygtygtygttaggtattygttagaaatattagtgygttggggagaggaggggggygtgtttgygagtygagggtttgttttggtttttttayggtttttttttttttttagtattttatgtygggtttttagttttagygygtttyggttygttygygyggygggagagttggygtaaatttygyggtagtygtagttttttygygygttttttttttttttaygtttttygttttygttatggggttaaygtggggtttttaagagttgtyggtttttagyggygtaatttttagttaaagttatygygggyggattatggtttagggygttagaggggttagaggtaygggaagaggaaaagayggttaattgggaaaaaaagagaaaaygaaagaaaagttaaaygatgagtttttataaggaggayggagtgaatagtttgtgttagaaggttttgtatatygttatygagttgtgtttygtyggttaggtggagtgggagaagtgttygggtattttttttygggataggggtagttagggyggaagtagtataggtaatygggagggtttygttygygttttygygtttygttgggatttygygygttaggttgtaagtttyggggttttgygtttttygygtygttttygyggtatatttggggygttaygtttttttatttygttttttttttygtttagtttttgaygatttygagggtggggygtttgggttttgtttttttttgtttatttgtygggttttttttattttttggttygtttttygtttttyggygtygtttttygtttttagtttygtygygttttttygygtttttttaygttttttatttttttttyggagtggagaagtgagtgygggyggtgayggygtygggayggttygyggtttggttgtttgtgggggyggtttatttgtgggattagggttgttttygttygttttatyggtygttggtttyggttttgttgatgggggttaggygggayggataagttatgtttggaygtagaatttttttgtagaggtggttgttttggttttygaggtaattygyggttgtaatttgtygg

SEQ ID NO: 7018 - DNA, 1006 bp, Artificial Sequence
  Description of Artificial Sequence: Synthetic polynucleotide
ygagttygggtttttaygttttatttggtagggggygygygggtttyggagttgtttagtattttttggttaagttttttgygtttttygygttygggaagtttttygygtyggggaagttttttagygtttygttttyggtagggaatttttttattaggatattyggggttttttaggttygttattygtttttattagtttttatttattttgtttagttttatttyggtagtgtagygtgttttggtggttttttttygtaygttttggagggggagtgttttgtatttyggggttgtttyggagtttagtgtaygagtgtatatgggttttttttttttgtttaaagggtaggygagygttattygttttagttttgttttttgtagttgggtggtttttttttttttttgttttttaagataygygttygaaatygaggggtgagagtaaagatygtttattaatttagtattttggatttagagtttttaatttygaaaggaggttggtattgttygggttatygagagagggagggagaagagttgaggttgtaayggtttttgggttttttagatygggtttggtatttaggagatygtgygggagatygaygttgagygtyggtttygttttyggyggttttttttttttttttatttygtttttttyggttygtttttttttttttggaggagtagttttttygygygtttttyggagttttttttattgtttttgtttttataataggttygggyggyggggaagaygggggggtgyggggtygttttagttygggtttttttggggtygttttttttttatygggtgtgygagtttttggttgtttttattyggttygggagttaatttttygayggagtygygtyggggygagttygattttttttttygggtttttttygggtygygttgtygtttyggttttgygtgtgggaatgatgtgygtattggagggtttaagttttttaygygt

SEQ ID NO: 7019 - DNA, 1185 bp, Artificial Sequence
  Description of Artificial Sequence: Synthetic polynucleotide
yggagagttagggttygtttaataggagtaygyggagatattttagaygatagygygttttttttatttttatttygtttttygggygttttaggttagygtttattagattttaygtttgggggattgtttgggttttagygagagtgttayggttttgtayggtagyggggaggtggygagygygttygatttaygtygtttttaygtttatttttttttattaygagttttttttttttgttatagtattatttttattgttggtygygtttgttattttgtggggttggtgatatgaatggatgggttggatatatttttygttygtttagaaaaaaataaaaaataaaaaaaaaattygtttagatttgtatagagagggggaaagatttttttttgygtttttagagtttaygttgtyggttagagaaatttatagttttttttttttatatttattttttttattttttaaaaaaaygtttaaygtaaataaataatatygttttaagttygtygtygtttygggtggttttttttttttgtttggtttygygygttttagttttgygggaggyggyggygagaagttgyggttttgggtgyggtgyggggygttygggygataggygggygtaaggygggygygtagtagatyggttggygtygtattatgttttttagygyggtygtagtttaygtyggtgygtattgggaygttgtggtttttttygygttttttaattttttygttgygttyggttttggtaatttgggtaagagttttttgatygagaatttgttgygggtygggggygttttaaygtttaggttgtagtygttygygttttaygattyggygatygttttggttatygygggygygtagtttyggtttttgtttgttagtttagtttttttaaagttgtgtttygtagtygaataagttagtttygtyggggygttttayggaaygyggtgggttttttaagtgtttagtttttttgyggatagtgygaggttgtygggtygggtttygggggatygagattgtattttttagtttttagygttaggtgagttagtttttttttttttttttagtygygttygygtttttaggtygggtggtttagggatttgggagygtyggyggtgygtattgygtttagggagagtygg

SEQ ID NO: 7020 - DNA, 409 bp, Artificial Sequence
  Description of Artificial Sequence: Synthetic polynucleotide
yggttttggttttaygygggtagygttagttggtyggtgttayggagttttygygtttttygttygtttagttttygyggatttatttattggggttgtttygtagygygatttttttttatttygggggagggttaagggyggyggtggggggyggggtgggggggaagyggygggagggggyggtgygtygtygttttatttygggttygygaattygtagygtttttygtagtatttttttaggttyggttttttttttttttygygtygatggtaygygtyggttygtttggttyggttgtagtggatgttgttagaatttaygyggaggaaggaagagaygtaggtaggttgyggttatttaagyggttattygggttttagggatttttttttygagagaygg

SEQ ID NO: 7021 - DNA, 1813 bp, Artificial Sequence
  Description of Artificial Sequence: Synthetic polynucleotide
yggggtygttgygtttttttgattattgayggttaggayggttttagtttygttttatttgtaagttttattttaggttygagttttygagggtagggatagtttttygggtttygaggtttgattagagtttgaaagtttttgtygggggttgtttygatttagygaggygttaggttgttyggygyggttgggggygtttagygtygggattttagttttgtttyggtygttygttggtttagtgygtaygtttyggtagtttagtttttttttttayggyggtaggagagttttyggtatttgtttggggygggggygggggyggggyggggygggygtygygtttttttgtttgattggtaggaagatagattaatyggaggggtttttyggggggaggggyggtgtygtgtttgagtygggygygggygatygagggagttgtagttattygygtgyggtaygygtyggtygtttgttyggatygyggttattagtgtygyggtttttygattttygtttygtygagtygygygygygattgttattttttttaattgttttttaygattttttttgtgtatgtatttattttttgtttygttttgttttttttaaggyggtggyggyggygatagyggygtaagttygtagyggggagggggyggtyggaggatgyggygyggggttgygttygttaygttygttgttgttgttyggttygggtttgagygtygagtaggtgggtataggtgygtyggggggygggaggygagygttggttagagggaattygtggattyggygatygaggggyggatttggyggtaagggaygyggygatyggtgtygtttygttttatygtttatttttttttttttyggttatygygttttttttgggttttttttttattttygtattttattttagtggttttttatttttttatatttattttttatttttttttagatttttttgtaaaattttttagtygttgygtygttttttttaatattttttttyggtttygtttttagtttttagtttttttttaygttatttttatttttattttttttyggatttygtttttaagttaaggagygggagggggatttattyggtgtttgtyggagtggygyggggggtgtggtyggttygtttttttygtgtttttygtagggtaggttatagttttttagattttygtttaggtggtaaagaagatggagttgggggtygygtttyggyggygyggggttygaaggygaggtygtttagttygtattttattttaygtayggtataygtygtygyggtttttgttaygtatattttygygttgtttygtttaygtgggygtyggggaggaggttygagagatgggaagaaaggttggtatttatttttttgtygggtyggygygttttgggygtattggttttyggagatggygygtaaggattgattttygtggtgttagatattttgtygggygttttgygtyggggttagyggtttygttggtttgygttagtgygttgyggtttygttttttagtttttyggtttttygttttattttttttgttgtgggtttttgagtattyggtttgggtagtttagatagaggtygtttaygaggttggygttttttttygttttagaagtatttygtttttatatattttagttygtyggttttttgaaggttgggttagtttyggtttttygttagtttttgttyggttttttgagttttagygatattgtatttaatygttagttttttttygtygttygt

SEQ ID NO: 7022 - DNA, 1294 bp, Artificial Sequence
  Description of Artificial Sequence: Synthetic polynucleotide
yggttggagaagttttygttagygttgtttgtggttagattygttttttgttttttttygggygtatatataygtttatttagatatttygygygttttttygygtttttgtttgttygttygtygtygtttgtttttttttttttgttttygtyggtygttttttttttttttttttttttttttttttttttttttttttttttttttttttggtattatagagttgttttgaaaatagaagatagagggagtttyggagttygttatttttagygatttttatattgggaaaaaatatggagttagtttyggtagttttygatttygtygttagygagttaggtagtagyggygyggaygyggtygtyggttttagggagatttygttgaattaggaattygttygtaagagygagtygtttgtttyggtgygtagatagagttattttagtattagtagaggtaggaggttggagaggggttggggagggggyggygggagttygggygyggagyggggggyggtygggagygggygttyggggygyggggttyggyggtygygygygagtttgyggyggygtttygagttyggaggattttttttttttttttttttygttttttagaaatgttgtaaatttttgtagttygttttyggtttgygggagtagagtggggygggggaggyggygggaaggttgatagtyggygggtttatttttttggttttgatttttttgtaaatattggaggaaagttgygttgttttaattaaataygtttttttaaaatayggagatgyggggagtgggggttygggaaagaaatttttaaagyggtagtgtttttttaagaaggggtaaaaaaatttgtttatggttatttttttttygttttattttttttttttttgatagtttyggttttggttgttygagtygggggtgtgttttyggttttttttagatttgggyggggggygggaggagtgagygatttgggaagtttygggggtggagagggggygtttyggggtttgggggygaygtggatattttttttggagtayggyggtgygtttgggatttgaaggaagggtygaaggaagyggggtgygggygggygagttgttygttaagttgtttggygggygyggygaggggagatgygtaagtttgtagatygggggttyggagttyggygtttaggttggyggggggygtgtgygygttaaygygtagagggyggyggttttgtggggygttttaygygtattyggagggagygt

SEQ ID NO: 7023 - DNA, 939 bp, Artificial Sequence
  Description of Artificial Sequence: Synthetic polynucleotide
ygtygtaaggttatgggtygaagtggtgtaggggyggygttyggggaagygattggtagagttgtgygtattgggggtgttgtaggygttggggagagtgtggagaggttgygtggagttgygygttyggggtgggggttgtatttttaatgaagygygtgaagggtaagyggtgatgggttttgygttagtggggttgggagttygttyggggttgtatatggggttgygygtaaggtgaggattgygtatgtgggtttggggtttgygygtatyggaggttgtaggygttggggagggtgtggggggttgtgygtggggttgtttttatyggaagttgtaygttttgggaagygtagaggygggggtgttgttygygttggggagtaygtgaggggatatttagggattgttygygygaatggtttttaaygtatgygttttattttatattttatagtygttatgaygatygggaggttygtaayggttgyggggataagttygttgaggttgttaggygagttaggtttttttggatttygtttgattyggttgggttgtgtttgaaattgatttagttttattatattttttgattatgagaaaataaggagtaagtttaaagyggttgtaatttttyggtygtagttagtttaaggggyggygyggggtttttttygttygggagtyggaggtagaggaggagatggaaaagtyggttttaggyggygggaaattgttaaggggtttttggaggtttttttyggggaggatttaaagtttgaaagagygaaaaggtttggagttagaggtggtggttaagattttttttttyggttttttttagttygttygtaattttttggygtagtttygggaaaaggtgtaggaattgtaggygyggyggttttttagtagaattattttyggtatygg

SEQ ID NO: 7024 - DNA, 939 bp, Artificial Sequence; identical to SEQ ID NO: 7023
  Description of Artificial Sequence: Synthetic polynucleotide

SEQ ID NO: 7025 - DNA, 899 bp, Artificial Sequence
  Description of Artificial Sequence: Synthetic polynucleotide
yggtttttgagggttygggtagttattygtattttttygttaygyggagaaagtygagtatataggtygtagggtgggggttygyggggagagggtggaagtagygggtttttygygtttggggtggtygttgttttatttaggttttygtttgttttttatttttttagattaatygttttttgtaggtgttaaygyggtgtttygtattaggtggtaygyggattttttttagagtttttyggtttagayggagttaggttaaggtagaagygygggtagtttyggygttattttatagygttttatttgtagttttggggtttttattyggttttagggtgtatagtagtyggggygyggttygggaaatgtagttgygttttttgagtatattgtttaggatggtgtttaygtygtygttttgtygttttaggtattttttttygygttttagagattyggttagtttgttttgtygtattygagagygtttygggttttggtayggttatygttygtttyggttttygttattttattygttgagyggttgagttygyggagttgggtgagtgtttgyggttgatyggttygtgggagtagggagygtatagtyggttggtgttggagggttayggggatttayggggtatygygggagtygtygagygtagggaagttagtaggtatttgtagtgyggagtttgtaaggttgaggtaggagatygttygaggyggggagggygggagygagygagygagygagygygtgggagayggaggyggygtgttygtttttaatttyggtatygtygtgygtaggyggggtygttttagttttttygtgtttagaagygttagagatagggagttagtgggygygtaattgygttygg

SEQ ID NO: 7026 - DNA, 899 bp, Artificial Sequence; identical to SEQ ID NO: 7025
  Description of Artificial Sequence: Synthetic polynucleotide

SEQ ID NO: 7027 - DNA, 547 bp, Artificial Sequence
  Description of Artificial Sequence: Synthetic polynucleotide
yggygttttggygaattyggttattttagttttttaygtggtgagtatttagggtagygggtygatttttygaggttttatatttgggtttgaggggygyggttygtagyggygggtgtaggggygattgttagtttttatttygtttyggggtgygttyggaggtygatatttggaggaygtttttagttttygygggaygttaygtttgygygttagggattygggataagaagtgygygtygggtttyggttgygygtygyggggttattagtttgygygtagggtttaggygatygtgyggttatggataygttayggggtatyggtattttygtggtgtgggattaygtggtgttygygggtatgttggttatttyggtygttatyggtatttattaygttttygttgggggyggttagtagatttttaaggattttttgatgggyggtygtagaatgatygtagtgttygtggygttgttttttatygttagttttatgttagtygttattgttttgggtatttttttygaggtttatygt

SEQ ID NO: 7028 - DNA, 2505 bp, Artificial Sequence
  Description of Artificial Sequence: Synthetic polynucleotide
ygtttygtttygtatygggggyggaatttygygttttyggatttgggatagtattagtagygtgaaataygygtattygagtgtaggagtaaataggtaattttttgttttggttatttttagttyggtygtttttttagyggtttgggatagtagygygtggttgggaagaygygggagggggaygygaggtaaatttgygttaagagttggttaggttaggtgagagggagtggtattygygtagatatttatygttggygtttttttygtagattaggtgttggtagggttgtaggagattttagattttygagtygttgttgatygtgtgttttagggtttttayggtgaatttgggygtttygtggagygtatggtggtggtgatggtggtggttggyggyggttgtyggygggattgyggyggtygyggyggtyggyggggygtaatagttgttgttttygttggygttgttggttgygttgtaggygtygtygttygtygtttttttttygggygtttttygttttttattygtygygggggtygtattagggttygagttygggtttgggtyggagttygagtttgatttagggttattgtagtttyggggtatttyggaggttaygattygygagtagatgtttyggaagaggttttttatgtaggttgttaggtagatggyggygtgttygtggatgygtagygttaygyggttgtttattatttagygatataygyggtttayggagaaggtgaggtygtagygggtygatttgtygyggtttaggyggtygtygtyggygttgtttatgttgtagagggatagtgyggttagygtagtygtygtatagtgygyggttaggttttaggatagtaygatttttatggygttttggatttygtatttggtgtatttggygaagygtaggtttaggygttgygtttttttggttatgygtattagygttyggtttattagygtygatagtttggttagygygtttttgggtaggtygtyggggatygtygggtttgttyggggatttygygaaygtagtagtagygtttttagtttttggagagtttaggggatttygtttaggttyggtagtagtygygagtagtgttggtyggygtagtttagtttttyggagttttttattagggtagtgttgatagtgttaaagttgttgtgtyggttgtgtatggagttagttagaggyggttagtagttttygttatayggggaygtygggtgygagtyggaatagtataaagataagttggaggagygtatygagttygtygygttattataattygagtttagygttagattttttagygtttttattaygggttttttattttttttggttatygttgygttattttatgttgtagtygtttgggagttaaagggaaggagyggygaggagtagygagtgtygyggggygyggggagagtygagttygygtygttttggtttatttttttattagtygttgttattaattgttagtattttyggttgtttttyggaattgtygtygttggaatatatagagtagattttggagttattttttagagttygggtyggagttgggygtaatggggagygagttaggtygggaaggaagttttygtyggggtttgttttttttttttaaaataaaaagtgtttagatygtttttttttgagtttygttgggygtagtagttatygggygtyggttayggtgttygtgggattgagattattttagatgtygtygtygtygtagtttygygggtagttggttttyggttttyggtttttagttttyggttttggttygttyggygttagtttgttttgtatyggagygtagtagyggtygtggyggttgtaaattttgtygaattttagtaaatttygggtagttagtgggaygggygtatgtaaagtaggggyggyggagagttagtggaatyggagaatgttaattatttygttttttttttttttttttaaattttttttttttatgyggtttygttttttatataygttttyggyggatatygaggttgtaggaagtggggagtagtggttagggatttggggaatttttgtaagygtagagaygtggatgttgttttttgttgttgtttttgttygtattttttyggagggtggtgggttgggtyggtgatttttttatttaggtgtgttttttatygyggtttataaggtgtttgtttgayggtygtttttttttttgyggttygtattttattttttttttttygtaatatttgaaatatggtttttttttttttttatttttatttygggtaygtaaattaattagtgyggtttttttttagtyggggtttgttttagtatggagggaaataagtttgtygagyggaggttygtggyggtggatattattgggaggtyggattttyggttattygttatttgttattagggygygttaattyga

SEQ ID NO: 7029 - DNA, 1587 bp, Artificial Sequence
  Description of Artificial Sequence: Synthetic polynucleotide
ygaggagtggggygttyggaaggayggggattgggaagyggttaggayggggagaaggygygggtgttggaattatttattagaagaaatttaaygagatttgtyggyggattaaaaaaaaaaaaaaaagtgggtttttttttatttttagattgatgatttygygtttttygygaatgttayggttaaggtaggatgttttaatygttttgttattygtattattttttygtttttgattttygtygtattygtygagattttgygagattttaaggttggggggttttgttaggygygttyggggtatttygggaaagaatagaggtyggagtygygtttttayggtgygttttttgagattttattttttagtttyggtttttayggggttygtagagaatatttttaaatttaggggaggtatatagatttttataaagggaggatggggagaaagtgatggggtttygaagagtygttttagggaaggagagagaaagagtagggaagagaggaaagaaatagaagaaaagtagagaygggagagaggagaygaggggagtagyggggagaaaygtaggaggtagaataagtaaggaaattttttatttaaaagtttttttgggttygagggttgggagttatttgttttgygtygttttyggttttttatygttttggaggtaggagygtaaatttgygagygttygggtttatttttatygttygtttgtatttagatttgggaaggggatggaaggggygggggggtaaaggtaagaagtaagaygaattttaagatttyggttygaggagaagaggtttgtyggygtttgyggttagttyggyggyggyggttttggyggyggyggyggyggttttygggtggyggygygttygggttgygtagttaggygggyggygaaggttgaggtgtyggygagyggyggggygyggagtygttttttygttaatttyggtttttttttttttttttttttttttttttttttttttttttttttttttgttygttagttttttttttttttygtyggagttttagtygggtgyggattggtaagyggygygtttygyggttttttygggygtygygaagttgggaggygygtaaagtgyggtttaggggggatygtygggggttttygttagtagttttttgttygaggtygtagtttttgtttttttygtttttygttyggtygtttggtygttyggtygtttygtygatygagggtttattagygtttttttatggtygyggtagttaatygatgattgaatygaataaagagtagyggygagattaatttttaatatttatygatgggtagygggyggtygagtttyggygagtttyggtagtygtygttygtygttttagggygttygtttgttygttyggggatttttttaatgygtttagggygygttygggggttttttayggtygygyggtyggygttgttygtattaatttggagtygtygtagattaaatygtttttaatattgaaatatygattttatattggyggttattttgggggttatygagaygygt

SEQ ID NO: 7030 - DNA, 5693 bp, Artificial Sequence
  Description of Artificial Sequence: Synthetic polynucleotide
ygygyggagagggtttaagagygtttttttaaaggtttagtttygtttggagagagtgggygggtatygggtttttgggggaggggttgtygtaggtttgggagggaatttagyggggttggtygtagtttgggtaggtygtagtttgggtyggygggaattygttattggattgaagaggygtttggtygtygttgaygtygttgtttttttttygattygttygttygtagtgttattttgtayggatygtagtttgttttyggatttttaggaygtattgtaggaygattttaaagagayggataattygatttygtyggataaggagayggttaataaygagaaygaggagtagaattygggtattaagyggygyggttttygtattattattaaggttaagtagttggagaygtttaaggttgttttygtygttaygtttaagtttaygygttatattygygagtagttggygtaggagatyggttttaatatgygygttatttaggtgyggttyggggygggtatagttttttagtttygttggtttgggagtygggagtttyggaggagtttttygttaagtttttttggttaygagygygtttggttttggtttgggagtagatygtgygttygagtggggtatttgttygaggtyggggattgtgaatygaaagattttatttagttttgttgtttttttggtattgygatttgggggygggttattttatttttttgaatttygtttttygttttgtttatggaaggttgtaagtttttttggggttygggatttttttttatttttatttttygagtagagaaataggygatgttttttttttttttgygtygaagygygggtagataaayggttagaggttggtttyggagtygaggggtygaggygagagtygtgtygggagggaggtttttatagagtygttaggtygygggygagtyggggattaggaagtttaagtttttatgagtygttttaygggttygygaaattttttatttttggttggttygtygaagtttttttttatttttttyggtttaattyggttyggtttygtttygggggagttttggtgyggaagaggygtaaggatttagtaggggtagtttagttagggaagggagaagagggggggagaggatatttttgattttgggtttatagtttttttttttgttttaggtgtggttttagaatygayggtttaaagaaygtyggatgaaatagttgagygttttaggygttyggaggtaygttttttttyggagttygyggygtatgygttygttgggyggtygtttggaygagtttgagatgttggggtttatttygtatatttattayggaggtaaggggygtttygggattygttgtttygtatttgttttatttygggagttgagggygaagggtttyggttagtaygtttttygtygttttagaatatygtttattygttggatataygattatagatatatgtatatttatttatatgttttggatataaaattagatatatggttttatttatatagtgatgtatatagaagtatataygagatatagtgatatatttatttaygtagggtataaggtgtatttatatttgygtttagagattttagggatataygtttagataygatygtaygattaygtataggtaaattttatttttttatatataggtatatttayggagatataattttatagaygygtatatttttattagttatattgaggttagtattggtaaatttatatgtatgyggtttttayggatagaygtatagtttttttgtygttttgtgtttggtgtatttggtatgaggtggatttygagygttggagggtagtgtgaggggaggggatgggggtttggatttattttaagtygtttgtttattagtatygaaggtagtaatttttgttttatgtggyggggtgtgtgygtatagtatttggtagtgttagtttaaatgtyggtagttgttttgggtaggattgtagtttattttttagtttygagatttttggggtttttatagattgggggtataagtgttgggttaattttagatttttatygtttttggggttgtagagagygaggagttttagtttataaagggttttagatggtggtattaggtttgggtttggggtgagttgtttttttgttattttagttttttttttttttattttttttatattggattggtgagttattttaattttttttattygatttttttagttttttattttgagtygtattgtttgagtttattaagtttattgttttgttttttttagggttgagggtttaagaaagtatttttttttttttattttgaagtttttgaatttggagagattttaggattgtttatgtttgagaggtatttgtatttttgagttgtaaygtaggttaggaagaggtaattttttttagaaagtgggtttagtggtagtgttagtaaggtaggagttaggtatttaggtagaygtagaagggaagggaagataattttattattaattttagtatattyggaagtttgaggggggattagattttgagatyggatyggggtttttagaaattgtgggtaaaatgttaggttgtgttttttagggtagagattttaggtagtggtagggtttaggttggagygttttagtygtttaattttggatagttttttaattttggatagatttttaatttyggatagatttttaattttggagagttyggatggtgggygtgtttttyggagtttttatttatygattttttttatttaaatttgtttttttttttataaaatttgggttyggagtagygaggtagtgggggyggtatyggttyggaattttttttygtttggataattaattaaggttttttygaggattatttygttttygtttygatttattttatygttttttttttttgygygttggatgaggtggggagttggatattgggggtttttygtttttygtaatggtggggaagattttttagtttttagygaggtagtttygtttaattygygttgggagatttyggyggtggygatyggtagygggygagaaaggggtygggyggyggggtyggyggtttttygtgggagygyggataaagttttagttgyggtttttgtgttttttttagayggygtttgttttaattattttyggttyggtygttatatgggyggaggyggygygtayggygygggggtagyggttttygttggtttttyggttygtygygggtygyggtygttttttatttttgtttttttggggttttaaatttgtygttttttatttttttttttattttyggggagaattaaattaatggttttaaaaagtaattggtaatygttttagttgttgtttaaattgtttttaagttaygtttttagatattttttatttggatagattttagggtttggagagggaagagggtggtagggggtattaggaattygttttttgattgagattttaggatttagtagggggagtggatttgtagaagagatttaggtttttggattygttggttttttygtygtataaagygggtgtttggtataaggtggttttttygtgaygttttttaygttagttttttagggttttatttggtgggggaaggtaggatatttygaaggttttggaaaaggggttatgtggggyggttagagagttgatatagatttgttgaggtagaatgggtttgtaattyggagtttttatattttttgaatttatgggtaaaatttttatttttgtattttttttgagagagagtttatagttattattagttttttaaaagattttaatgtttttagatgttttagaatttgggggtgttggtaaaattaattyggggtaaggttggaggatygagtttttattttaaggagttygyggagttttggttatgatttagagaattttygtgttttttttttttttttttaagtygttggagtttagtttttttttttttaggttaggttaggtyggtataaatggttttatygggatygaygyggyggtygtatttggygaggygaaggatttggattgggttggtagggygtagggatygagtttagggygttaaggtygtttygttyggtttaatttattagtygtttttgtygyggttyggatttagtttttttyggttaggtygtttttyggttttaattatttygygttttgttttgttygttggtttgtttttgttyggttttttttttygggtttgttagttttygtttttttggaggtttttgggatttatttttgatttatygttttgygttttttgggygtatygatttttttttattttygggtttatttttgattttttygttgtygttttygggggtttttaygygtgtttttaatygyggtygttttttttttttttgygttttttygattttttygygatttttygatgtttygggttttygggttttagtygyggatttygtgtttttgggtttttttttygtttttttttttgtttttttgtygattttttygtttgtttttygttgtttygtatttttgtgttttttatygattttaagatatttaggaattattgtttgtttttgygtttttggtygtttttgtttttttttatttttaggtgttagggaatttgtgattgaagttttygagtttttgtygygtgtgttttttayggtttyggagtttttttygtttttgtgtgtggtttttggtagtttgagttttttgttttttygagattttttattgtttttttttttaatttttttygtgagtttgygaygtttatygttttaaggggygtyggttttygtaggtttttttaattttgggtyggtgtygygygtttttttttttygttygttygggtttttttttygggtttygggtttttygtttatttygtttttttttatygygttttgtttttttttygttttttttttgtagattattaaggygattattaygygtygggaagtaattaygattttttygygtayggttygttttygtaggygtagttttyggtygattttagttttttggyggtttttggtttyggttygaygtygttgggagygttggaatygtygttygtyggttygtaygtygyggataattttaggtttatygatatgatttygtattyggatatatygagtttygagttaggtttgtygggtaygttgtattttatgttyggygaggtatttagyggygggtttagttygttttttttaatgagyggtattagyggttatagyggatttttgtygtattttaatttygagtttaaygaagtygtygtgtggtaaggtygtygggtygtttttygygttyggttttygggggtttygtttygaagtagttttttgaaattaaaaygttygaygtagaygyggtgggagaygtgggtgtttttygggggttttttttygggttygtatttaattggtagttgtttttyggttgggygtygagggggggtygatttttatttttatttygygggttttttaggagttttagtttatygttagtatttttttagtaatygyga

SEQ ID NO: 7031 - DNA, 589 bp, Artificial Sequence
  Description of Artificial Sequence: Synthetic polynucleotide
ygtygyggaggttttagyggtaggtgygttttagtaggtagtagtagtygttattttgggtaagtagtaaatttygtataaatttyggagttattatgtttgttttttygttttatygtyggtttttttgttaggagtagtagaggatgtggtgaatgtatyggttttatygaaygaggtaatygtttyggtagatggttygggaggtttaggagggagttygtyggtygagtyggttggggyggygggaatggyggattttagttyggttttgtattttgtagagtatagtttgtagagattttgygyggttyggagtttttyggtaaatggagtttgggaggtygtygyggttggyggagyggtattgaggtttgtagaagtayggtttggttttgttaaatygtattttgttygttttygttagtttagagtttttygggattttggygagggygyggggtaggatttttttygyggtyggtagtgaatgggagygygtgtaggggygttagttttgtttttttttgttgtgagtaggtagyggggttttagtygtygtttttttgaagtttygagaaygaggyga

SEQ ID NO: 7032 - DNA, 1294 bp, Artificial Sequence; identical to SEQ ID NO: 7022
  Description of Artificial Sequence: Synthetic polynucleotide

SEQ ID NO: 7033 - DNA, 1373 bp, Artificial Sequence
  Description of Artificial Sequence: Synthetic polynucleotide
ygattttygttgagtttayggtttagtttttatatatttatgtygygtttttagtygttgggtgaggagttatttagygtygyggttttttygaggggyggtygggtagygagtagyggtygagyggayggggtgagttaggggygygygyggggygtttagtattgygtyggggaagttygtagttttygtttygaatttgggttygttgaggttgagggaggggaygtaaggggagggaagaagagaagggaggagtgggggttaggggagagggggtggggagggattttggaggtataaagyggaggggaaggggagggaygygygyggtttttattaggaggygagtgggtgtaatyggygttttttagtygygyggggyggyggattyggaggatttagaattyggagygyggyggtygygggygttygggaggaagaggaggagtaygaggygggygggygggtgygtagygygaagaggtagtttyggygttgttyggttyggygttaggtgagtttttgatttaggygtttygygtttttttttygtttttagggtttttygttttygttygagtttttggtgtgygyggaaggttygggttttgttgygygttttaatttggttygggyggttttattttttttttagygggyggttttaggtygggggtttyggttygggggtttaygygtttaggttttaattttgtaagattttagtygttttttagtygygygtttggtttygagttgtgygttggyggtaatggyggagtttttggtatagttygttattttttygygggtagttygggttgggggatgttagtttttggggatygttgtatttgtttaagtttaattttaygtttttttyggtgttygattttgyggtygaatygtaattgygagtygtaggtaatggyggagtttttggtattgttagttgttygyggttgggggttygaggttgggagggtttygttttyggaatatygtttyggtttggtttttaattttgygaggagtttttttgygtttttttttygyggttatggyggggtygttygtattttttatttttttygtttgggygagattggggtgtaagagygtygtttttaaaatttgggaaagttgtgtttttttygtaaaggaggttttagggaggtygaggggygygtttygttayggttyggggttgggtagtggaaggagygttygatgaggttgtttttaggtggttagggttyggagtagggttttygggggatttaatttttagggttatttaggggttttgygttygaggtttyggaaggggttttttygggattgygttttagaggaygttagaygttygt

SEQ ID NO: 7034 - DNA, 1524 bp, Artificial Sequence
  Description of Artificial Sequence: Synthetic polynucleotide
yggggaaaggygtggaggggggttgagygggttyggggttygttyggaatttggggggttgaggggtygggygttgggyggtggagggaggaggtagggggatgyggggagtggtgggggagtttttttaggaagtgagtgtgygygygygtttgtggggagatgaggtagttgttggtgygttttggggttttygattygagttttgtggygggtygtttgttttttttttttttaagtttygatttttttttttttattttttttttttgtattggygggygggyggygggggyggttggggttttagtttttttattttagttttttagttttttyggtagttygggggyggttttagttttagaaatgtygtyggttttyggtttyggtttttyggttttgtygtygyggtygttggggttgttgttatygtygagtygggygtygtagyggttttttttggggtttatatttgtttygttagttygtgttyggagtttttttygygggttatataattaggttttyggtygagtgggygaagtttagtatatttygggggyggggggtaggggagggtttttagatgtttttttagtgttttygaagatatyggaggggagtatttygygtagagygtagttggattttyggggtgygggtttttttttttgttttgttttttagtatttttggtaattgygtaaagttgtttgggttgtaatggtggggtgtagggggygttyggttgttgtatttgttagtgttgggtttaggttgagaggygatttttagtttttataataatgtttygggttttttggtttgggttttygtagygttygattgatygttagygataygaygagaaygaggatttgtyggaygtggaggagatygttagygttygyggttttagtttggaggagaagtttygtagttagttgtattagggggatttygtgtaygttatggagggtaaaggtgaggygtttttatttygggtygttttttgygttgygggtygagygtaygtggggagggagttgtyggtggttgggttygtatttygygttygygttttttattttaggggattyggtgaygaaaygaggtygagtattgggggggtggggtggggtggtgagggaggagggtaggtagtaaggggggtygggtatgggtttaggttyggttygygtttattattagttttagggtgggtagagttagggggtyggyggatagagggatttggagatggataggyggatygagggagggygggagygtygygtttttttttttttygagtyggtygygttttttgygttgtttgaggtgtygtygtttggttggaattgggtttagggygtttttggggtatyggggtaaggttttttaggttygaagtttttttaatttygttttygtttggggtttgttagtgaggaattggtgatgggggygygtygggtgtttgggaygatgtttttttaggtttggggttygtagagtygt

SEQ ID NO: 7035 - DNA, 1009 bp, Artificial Sequence
  Description of Artificial Sequence: Synthetic polynucleotide
ygaagtggygggtygtggttattttttttatttgttgtattttttggagtttyggggygtaaatagtygttgtatttttttttattttygaygggatgatattatagttttttttttagatagygygggtttttgtttygtttttttttagygatygtagygaygattttgttttagggygggggagtagttttttaagtygygggygtttattttttygttyggatttygggyggtgttggtyggggygygyggggaggyggggattagggattttttaggaattagtttgggttgttgtatygttgttagggtygttttgygtttagtygagtttagggygtygtyggttggaygttygttaatttttattgygttyggttttygagygygttyggttggattyggygygttttttygttttaggygtygttaagttttagtattatgygtttttttagatgttygaaagygtttttttagggtagtttatgtttttttgtgtttttttygygaygggtygggtttattattttatatttttygggtttttttatgtttattatygtgtgtttttttagtatttttttttttttttaagttttaatatagtatttttttatatatttttygygtygttttagaggtttttttagttattgtttygtttttttatttttttagtttttttagttttatygaggygygtttttttagtaygtttttatttttttatttttttttygygtttttgtatttttttttygtatttttgtatttttatttygagtttttttgtgattaaatatygygtttttttaagygtttttttttygygtygttttaagatttttttttatattttgtatttttttygtatttatttaygtatttttgygygtttttattyggyggtttttttatttttagattygttttygygatttagygygyggggtattgggtagggatatttttygtttttaygygagtttttygttgtagaygt

SEQ ID NO: 7036 - DNA, 961 bp, Artificial Sequence
  Description of Artificial Sequence: Synthetic polynucleotide
ygtygtygttgtgagygygygaggattyggggttttaagtggtgagaattattygagggatttttyggatgtttttttttttttttgtttttgagttttgtagtatagyggtgtyggtygtyggtagggaaggttgtattttttttgygtygttaaatygtgtttattatygyggtgattgtygtttaggtygtatttttgagtygtattygygygtaggggygtaygggtaygygtatagggaggtygtatatatatatatatatttgtatagggaygagtygggggtttttgaygttygtygtttatttygtttyggtttggagttttttggtttygtaggtgtagygaygtttagttttygtgyggttagygygtygygtyggyggattttgtagtttagagagtttagggagtttagggaggggagyggggygygggyggggtagtgtygtataatygtaggygygtttygygtygttttygtttygggtttattttttttygtygygttttttttagtttatttayggaygagyggattttygattttygyggtagggatattttaagagttttgtttaggtttgygtygtttagtatttygttygtgtygggggttyggyggtttygggygagagayggaggttaygygtagggttgggygtaggggtygtygttygaggattatgggtgggttagygtttygtygggttgttagttggyggggatygtyggygtttgtgtygggtygygttygaggttgygtygttygtgtygtagyggttaatgyggtagtattygygaaygttatygyggygggtttygttggttygggttgyggygtgggggygggggatyggttttgagyggagtttygygggaggaggagyggaygggaggttgggagggattygtaatattaygtaggatyggggtttttaggtgtyggggaaggyga

SEQ ID NO: 7037 - DNA, 961 bp, Artificial Sequence; identical to SEQ ID NO: 7036
  Description of Artificial Sequence: Synthetic polynucleotide

SEQ ID NO: 7038 - DNA, 980 bp, Artificial Sequence
  Description of Artificial Sequence: Synthetic polynucleotide
ygtttttttgtttygttyggtgtaagttyggggtygtyggttggggtggggygygtagygyggtaggtaggtagggttattatgtagtttttagttttttggttttttygtttttygtttygygtttttgggtygttttygtttgttygtattttagagtagttttgattygtgggggygygyggtttygyggggattttgygggygggygggyggtygggygygygyggggygggggyggygygygygyggggagygtgtgggtygggygggygyggyggggaaagttgggygygygagtygaggttgttgtttatttgtagtygygtygtttatttgtygyggagtgygygtttygygttttttyggttygtttyggagttyggtygttttttttttgttatagygggtaattgygtygatatgygataygagtagtttaygygtttyggaagtatyggaggagttttttyggtttgggygagttaaggtgattttttygatgattttttygttttygygggtygtttgttttygtattttgtttgtttttttygygttygattttygttttygtygttagggaatyggtagtagtgtatgggtatttgtttgtttgtttgtttyggtatttttattgtatatatttttttttygtggttttttygattgtttygtgygtayggggggagtttggagtttttttttgtttyggtygggggtgygtttgaggatgtgtaygygygygggggatgygtttggagggtgggagttygatggaaataggygatttaaatattttatygaggatggyggtttttggttygagatttgtygttgtygygtggttttttyggtagtagtttagatgttaaatagttgttygtttttagtatgtaagatgtgattttttaatgtgtatttttagygttgttgtaaatagatygtygygagttygtgtgtgtttgtttygtttaygt

SEQ ID NO: 7039 - DNA, 408 bp, Artificial Sequence
  Description of Artificial Sequence: Synthetic polynucleotide
ygyggygtttttttygaaatatttgagtataagtagtygtaagggygagygtaggaygyggggygtggaygtygggttgggaagagtttygattaaattygygggtggttttgattttttttttygggaggagttttgygtagaggtygtggttygygygggtaagttatttgtggtagtttggtagggtagtttttttyggtaaatagygatatgttttyggtttttgtyggttttggtttggtagagtygtttttygttttttggtttttggtgygttygaggygggagaggagtttyggtygygtggattttagtttgygyggtaattatygygttttgattttaggttyggttgtttagggaaggatagtttagggygygtttagygagttttagggggtaygg

SEQ ID NO: 7040 - DNA, 2190 bp, Artificial Sequence
  Description of Artificial Sequence: Synthetic polynucleotide
ygggtgtattaatgyggtygaaaaagatayggataygtttttttgggatttgagttggttygtagtttttttaaaggtgttaagtaagygttagttttttttaggygttttaggtttagtgttttgtgtygagggttttyggtgtttttttagatttttygggatagtttgaaggggttaggagyggygggatagygygggaagagtaggtaaggggagatagtyggattgygttttagtttttygtgttaagaatatygtygyggaggygyggttagttttttttggatyggatttttygtttttagggttaggyggyggagttttagttttgttttttttttagtttygggyggtttttagagttgagtaagtygggtggagggagtttgtaaggattttttgagygygatgggtaggaggaggggtaagggtaagagggygyggagtaaagattttgaatttgtyggggtygygttttygggttygygtygttagtatttttttaygygygttyggtttygggttattygttttygtyggttttygttttttttygtagtygtagggaagygagtttgggaggaagaagagggtaggtggggaggyggatgaggggtgggggattttttgaygttattagaaggaggtgtyggggtaggaagtgggttggggaaaggttataaatygttttygttttyggttgttttttatygaggttygygggaggttyggagygygttaggyggatatttttttyggttttttttyggtagyggyggyggttyggagygggtttyggggttygggtgtagyggttagygggygtttggyggygaggattattyggggaagtggttgttttttggttggagtygygagaygggygtttagggygyggggtyggyggyggygaaygagaggayggattttggyggtygggtygttggtygyggggagygygggtatygggygagtaggtygygtygygtttattatggttagttattgggatatyggggttttgttgtgygygttgtttagttgtttgttttttataggtgaggygyggttgggggtyggggtttgaggygggttgygatggggyggtyggagggtagagttttygaggttagggyggggtgtaygyggggagaygaggttgtagttyggagaagttggttayggygagaatttgggatattagttgtagygggtaygtttggggtygttgygtttttttttygagggagygtttygaggagtggttggtttggattygygagtattagygtttagatygggttygygttggggttgttygtttgygataggatygttgattttttatttagttgtygggttggggttttattgtygaggttttgggtattaggagtagtaygtatygggatttgtttggtatttagagtttatttttagaggatttggggtaggtaygtagggtttttyggagtygggagtagaggtttttgaaagtttgttaggttgttyggggttgggttgaggtygggattttggtgatattgggtattggtygygatttygygttaygagagtgtaggaggggagtygatttggaggggattygtgtttgygggggagtaggaggattttaggagagggttagygtyggtattttatgattygtttgagtttttaagtyggattgtttyggggaaygttyggygagygttygttttttttygtygttttyggatygyggggttttagtgygttgygtttagttattygggtggggtttttgtygggagtaggygtggtgygyggtttagttygtgtygyggatattagtgattttgatttataagggtagtttagggtttaaatatygttaatttattgatttataagtttagtttttaaaattygagygaagagagggygggygattttgattaaaygatgtggtttgaggaatygatgaggttygttygttatttaagttagttttygttgggygtttgggagaygggyggtggaatagttaggggtygggggttttattagtagttagatygtygttattgaggggttaaagtttygaggaatttgagggttyggattygtagtttttgtttagtggggttgagtggyggagatttgtgtttygtttttttgggygtagagagttagatttyggagygt

SEQ ID NO: 7041 - DNA, 2190 bp, Artificial Sequence; identical to SEQ ID NO: 7040
  Description of Artificial Sequence: Synthetic polynucleotide

SEQ ID NO: 7042 - DNA, 679 bp, Artificial Sequence
  Description of Artificial Sequence: Synthetic polynucleotide
ygtyggtttaggtttygtgyggtaatttttyggttttgttgtttatttygttttatygttttttattttttagtttttgtttagttyggggaagtygygtygtagygttttagatgttatttatttttttttgygaggggtttgtgatagtttagggtgttgtgtattttgtgygattgtttatygttyggtttatgyggtggtttgagtagtttygygtyggtattttaygtatygaatttygggattaygtgagtyggyggagggyggggaggtggygttygggygtyggygtgaattygygtttttyggagtttagygtygtgtttttaggtttyggttttgattttagggygtttaggtggaatggtttygtagttgygygttgttttygygttttygttttgtttygyggaaatygttttygatagttaattygatygggygygyggygttttyggtyggttttygttygatttygygtagggtatagatyggggygtaygygttattygtattyggttattygygggttaggtyggtygagyggttgggtttagggggtatttttaygtgygtagtygttattyggtttggtygtttagaygttttygggggttygygtyggttagtttagttygagtttggygtygygttgyggtygttgttttttattygg

SEQ ID NO: 7043 - DNA, 2013 bp, Artificial Sequence
  Description of Artificial Sequence: Synthetic polynucleotide
ygttaygtagtttagggygtttagtttatatygtygtatatttattgtyggtttagaggtttggtygttgagygttttttggatggygtggtttgatygtttttttttttgatttatttttagtttygagggtygggttttayggyggyggagagggygtygttygtayggtttyggttgtgttatygtttyggattgttttygygtagygaggtttttttttyggggttttygggtggggtyggtygagtygggtgygttatttttttaagttygggygagatgagagttgttagyggtagtygaggttagygygggaygtygttattttagygttaggtyggagttagtagtygyggagtygyggagagyggagggggyggyggggtygggygtggygggttttttygtygtttattgygygttygaattttgggtttygygagyggygggyggtattygttgtaatgyggagaatgtgagaggtagygtagggyggtggggaggaaggggygygggagagggyggyggygagatagayggagagtagyggggagaaygaggatygggttgggtaggtgggataaggtagggaggygtyggagaggtyggattggaagggggggagaagggyggyggygtygyggagggggtyggygtttttygygggagtgygagaagttygagtyggtatttgggtttaggttygggttgggagygyggtygyggttyggttaggtagggtgygggagtygggtygttygyggggtttttayggggagtagyggggtatttaaggtyggygggtttyggaggggtttagggtygygtttygtaggtttyggtygtttyggtagggggtttttgtgagygttttaggagggygagtygggagtgyggagtygggtgtgygygtttgggtgtgygygtgtgtgygygagtgtgggygtygggtagtgggggygygyggtagagattttgtyggtatygtatygtggygagtaggaggtaggagygggaygygtaggggagtygggattttttygygtataygtatatgtataygttgygygtttttaygygtatatataygttttttttgtygygttygtygtygyggttattatygyggagtygagttttgyggagygggaatygaggtyggagyggggatyggaggtagtygagtygggggatgtyggttyggagyggagtygygygyggayggygygttygggayggtgagtgtggtygggtygggaygttgtagyggggttagggtygtaggggygtaggtyggggagtyggtgtgtttgttygtyggyggygyggygygygyggtttttgattgggygggagtttygggggtagyggygggggtggggtgttgggtgygygttygtggggggygtgtaygtttggggttgggagggggygtgttyggtagtttaggtygyggtttygttttatttttatttgtagttgtagtttygaygatttgtagtaagtttgtggagtttttggggygyggygggtygggaggggtggggayggaggygttttgagggtgtaatttyggtttttttttttagagaagagaaygygaggggagtggggygggggygygggtygggtygtttggygggyggaggggtgygtttttagttttttagtygygtagtygttygttttttgggatatttatttaggttygyggygtygygttggagtygtttygggygttagattattatgatttygttagggttaggtaggatygygyggggatagtttttaggtttagggtttgggatgtttttgtaggtaggaggaagatattaaggtttagttgggggagtgyggygaygtgttygggygtgtatgtgtgtgttttygygttttttgttttttaggayggtggttggaagaagggaatttgtygtaaggygygttttattygatttggatttttaggagtttttaagaggtygggggygtttttaggtttgtygg

SEQ ID NO: 7044 - DNA, 1501 bp, Artificial Sequence
  Description of Artificial Sequence: Synthetic polynucleotide
ygtggtttttygtttggtttttygtatttattaggaggaggttgtgygttattaggtattygagtygygggttgtttyggatgtygggggttaggygttyggtggygtagtygtgttaggttattaygtaggggttgtygatggtgatttagtatttgatttgatygtygaagtggyggaagtagagtttygygtaatttttgaagtggtyggttagggygyggttggtttagtygtygtaggygttttgtaggygttggggtaggttttagtggtatagggtgattaygggttgtaygtttagttttygtagtygttttagtaggygtyggtagtagygtagtttttygyggttggggaygttygygttgttattggggagtattygygtttaygagatggagaagyggtagtgagtgatttygagttygygtagygttttygtgtygyggaagaygttgttgtagttgtygttggttaygttttyggtggygggttgtagyggygayggggygtttaayggtagattggygtttygggagtttttygggggtgttagggggtggtgggtgaaygtattttagatggaygtatttttgtygtgttgttgttagtygttttyggtttggtaggyggygttgtttayggtttagaggaagtygtyggggaaggtgttttggaagaggttygyggtttygggggtaggaggtygygagaaaygggtttaggtttgygygtygtygttyggtttygtaygtaggyggyggtygtttaggtttagtagtattagtagtagygatagygayggyggyggyggtygygggyggygyggyggggygttggygggtatgttgygygggagttaggtttyggggtttygygtygygtttttttatgttygygtttygtygygttygttygtttatygtyggygygtttattttygtttttyggygggtttygttggtaataattatttgygagtygggattgttttygttttggtattgggggygggggtaggggygtygagggygaggggtgttygggaggggygyggtagygggtaaggtgyggtaggygtygttygyggaygtyggagaaaggtatttgttttttttagttttygggagtygtgtaggaygtttygtggaygtttaggtttattttttttgtttgtygygygttttttgagagtagttttggagyggtttygtyggggagaaaaggygtygattaatttttttygatttgggggygggattttgtygggttttagyggagygygtygttggggaagtatttgtttttattttttttttattyggaggtttaaagaagtttyggttggatattgttggagttaattagggattggtygaaattttagagggattgttaggtgggatagtygagggggaatttygtygtgygttgaaagggatttttttttaggtgagatgttygyggggagaygygtttattygygtttttttttyga

SEQ ID NO: 7045 - DNA, 668 bp, Artificial Sequence
  Description of Artificial Sequence: Synthetic polynucleotide
ygaggttgttgyggtgggaagagggygttgggagggaggaggatttggggygtagtygtggtgggtgygttttgttaagaagggygggggygayggggygygtaygtggaggaggaggaggaggagggagaygggagggygtgtgagygagtgagataagaaaagggagygygttygtygtygtygtygtygtygtttttttttggagagagaggttggagtgaggttgtgygaagygtygtattttaatgaggaygggtygaggtatatttttgtattagtggtygtaatygaggygtygygttttagtagttgttgtygtttagttyggtttygtygtygttttttagttttgtagtttygtagtttyggtygygtttagttyggygaggatagtattaggaggyggtttttagygyggttataaagattttyggyggygttttttygyggatyggtgygtggtttgttttttttggggaygggagttgyggggagggyggtygggggatttygtagagttygtttygttygtagtygyggggygtygagggtagggygggygtttagtttggtttygtygtttygttygtagtttttygaaaggyggtygttttgttttggttagtttggttygattygggggygttgygtgygggyggtttygg

SEQ ID NO: 7046 - DNA, 1006 bp, Artificial Sequence
  Description of Artificial Sequence: Synthetic polynucleotide
ygttatagtygtagagtttttatttygagttygygtttttttggtygygtygtgttattttgtttatttattgggygatttgggtaygagtatygygatttttygtttygygtagttttttagtatygtggttttagtatatttgtagagtagttaggygtaggaatygaaattygtygggtggtgggygggaagggaaaggtagatgtttaagtgaaggygtttatttttttttttaygtgaatagaagttgatttttaattttaagtgagaaatgatagggagaaaaagtatgtaattattattagaaaaggtgagaggttagtgttgttttttagygaagggayggggtgagatttaaatttatygttyggttaggggagttygtttttagagtatygagaagttggggtgygtgggyggagagagagtagggtgygttygatagttttgygttaggttgtttttaaatttaatatttttttttttttttttggagttattttttttttyggaatatgtaagttttgggtggtttagttttgtygttagatttagtttttaagtgygggggaaggagatgggygtttttagtygygattttttgggaaggtggttatttatttgygttttgaaatagaagaatagggygaygttgtagataatttggtttagttttagttttaggagggttaygaatatggagygggaggyggtagggggttggtgyggygtaggyggyggyggggygtgtagggggttttygtgyggggtttyggggtygtygtttatttttttygagttaygtaggtatttggtgtagtttttgttggygyggygtatggygttyggttttttygtttyggagtttttttttttttttygtttttttttttttttgtttgyggttaatttyggaggttgyggyggagtttygaygtggggygtygatttggagttyggttttgggttttggggygygygggygagygggtagggygttygg

SEQ ID NO: 7047 - DNA, 867 bp, Artificial Sequence
  Description of Artificial Sequence: Synthetic polynucleotide
yggaagtaaagttygtagtgaggtgggttggaagygggttttgtagtagtygygagttygggtttaggtttttaggygyggttggagtagaagtgtagggatygttaygatttatygtygyggtyggtttygtttygttagaggagatttygtaygygtagtygattggttygggttgatygaggggatttagaygttgttattttttttttttaaggtagttttygtggttttgtatgtaggaagtgtttygattaatttttttttyggttttygtagagattttaaattttgyggtttttatttttygttgtatttttttttygtttttttttttaatgtttttgttagtaaaagtttttatttgtagtatygggtatgttgttygtttaaygygtttyggggatttgttggttygtgtttttaatttaggggtggttataygtttygygtttttgtttttgggtagatttttttatttgtgtattttggtttttttatttagtaaagagatgtgygaagtgtgygtttggagaygagtygtttyggtgatttttattygttygtagyggtggttttggtttttyggattygygttygygttttgygggtttttygygtygtttttgttygtyggattattygggtttagagggtygttygtttttagygtttgygagygtygttttygttygggtttggggagygttagygygttttttttaygtyggattttgtagagtatgtttagtgtattttatggaattyggtttttttggggttaggattagattttygggttttygttgttgtygagggggygyggaggaggggaggttgggagatagttagygttttgtttygygt

SEQ ID NO: 7048 - DNA, 1072 bp, Artificial Sequence
  Description of Artificial Sequence: Synthetic polynucleotide
ygyggagaagattgtttggtttygtyggtttygttaaygtgayggttagtttygtygagygttygtattygtttatatttatgattattygtatattygttttaataygtgttaaggygygatygyggggtttttggtagttttygttgtatttttttttttataggggtatttatagttgttatttgtatagggggtaatttttttygatttagttgtggtygtygttttttttagttttttttggtttttygtatttttyggtttgggttygygtyggtyggttttttttttttttttyggttttttttttygtygtttttattatatttttttttggttagtggygtaygtygggggaygagttagagggagygggtygygggggtgtgtatgtatttttygttttttttttgtagygtatattgtatatggtagtgagggggygagtaaaggtggtatyggtttttyggttgttttagygaaggyggyggttgtagtttttgygttgtttttygttttttagygtagyggygattatygygttgggatttygtygaygttgttttygygtygagttygtygtygtygyggtttttaattagtatttgagaggtttttgtatttttttggtagttttatttttayggtgtttgtagggtttttttttgtattttttttttagatgyggygtataatygttattagttggaattttttattatygatattttttggggtttttgggggaaggggggggygggtagtaatygygtygttttatgtttgtggtttgttttggtagttyggtggttttaaaaaaaatttygagaaagttgygtttttttttygggygtygaggaggtggtaaygyggtaagtaatatygggtttttgagatagttgtttyggagygggtgtagggtttagtttagtgtatttgtttattgtygygtttttggtgygagttaagttgtagtagatatgatgggttyggggygaagygggygttyggtggtygatagatggtagtygagggygaaggygtttttgggttagggyggygtaatygg

SEQ ID NO: 7049 - DNA, 1633 bp, Artificial Sequence
  Description of Artificial Sequence: Synthetic polynucleotide
ygataygttttatttatagagttttagagaagttyggattyggttggagttaagagtyggaaaataagtatttagattgtygygtaagttgtyggagattaagtgttatatatattggygtygagagaaagggtgggygtttttaagtttttggtggagtaatgttagtggtygggtatgygggggatayggggttttygaattyggattygaatttttagttgagttattygttaaagttggttgttygttggtagaygaggtyggttttagatygggtggtagggtgttttygggttttgagtggttaatagtaattggggaagtattgaggaattttaaygggaaagttygttttatatttgaaataggtagttygtgaagtttttaaattagttttgaaaygtyggygtttagaggttaggttttyggygagggttttttttagttttgttygttttyggttygagygtygggygttttgtygttygaaggayggataggggagagaggggttgggggagtttttygygtttttttatygtttttgtyggygtaagggygggagtggagaaggygttatttagattgtggygttgggtaaattgyggtygtagtttttttaagtttgttygaattagaaygyggagtgagygttyggttyggtttttygtttgygttttgtagtygtttyggagtgattygggttttttggttagtygggtttgagttattaattaaggggtagaagggygygagagtagygggaggygggagttagggtgttttygygtgtgtatataatgaggyggyggagaygtatattttttttygtygaagaagtygtaggagtattygtygtttaatayggagaygyggagttttatagyggtggtagaaagtgagtattaatttagtaatagggggaaggaaggggaygtygggyggttagtgggaygtgyggtagtygagggttgtagtttgtttttgtagygygttygygtttatttgygattttttggtaggggatgttygttaggttgaattttttggtatygtaygtttggyggattttttygtagtttygagtttttatattygtttyggyggggagggagagtagtagttttaagaggggaagaattatagtttygatttaagaaggtatggtgtaatatataaatttagttyggtaaattttayggtyggtgygttttttattttgttttttaagtygaaagttygttagaggtagyggygygtttttygtygttgtttagygttatttttttttgttagtygaggggaygagtagygtagttttttggattgygtttagtaaatttttataagttagatggaygatggtaagttaataagggttggttgggaaggttgttgttttgtttttttagtttttagatggaaayggtgtaattaaaaygaggaagagaaggaaaagaagtgtttaaaaaattattatgggggtttagagttgtaattygagtttygagtygtagaattttggagygttgygggttyggttygtyggagtgtgyggtaaaggtgggagygygygtyggttttttygggagggagatggataagygagagygagtgtgtatgygygygt

SEQ ID NO: 7050 - DNA, 1143 bp, Artificial Sequence
  Description of Artificial Sequence: Synthetic polynucleotide
yggtatygtgtatagtttgattttaygttygtaygttgggttttyggttttttggtagtgtatttaagtgtatttygygtgtgttyggyggattttygtgtatatygtygtygtgttgttgagtaygaaagattttygagaggagttygtagatgagagtttagttgttgttgtgagattgattgygggtggtagtyggtaagaaggaattgttagtatygattttggygttttttattaattgyggygtagttttttttgyggtgttygtttttyggtattattgtagtttttgtagtaaagttaattttaaaaatttaaataaaataataattttttaaaggttygaaaatttyggtttttattttttttttagtttgttyggyggyggyggygtttagtgagtgatayggygagygtgagtygyggttttagtygggtygagygygttgtttgagttgagtygtygtaggtgaggggttygygttttygttygttttgggygtygygtttggtattgattttgtyggtygtttattgtygtygtygtygtygttygygggtattatgatagttttgagygttggggttataggttggttatygtygtyggtgttygggaggttgyggygyggtyggtttygtgttttgygttygaggttygygatgygygttygttagttttttggtyggttygggttaggayggtttaggggygttggggttgygagaggggttgttagaggggttgygggygggggtttygygygggggaggggtggggaggggygtttttattygagagyggggyggtggggtttttgtyggtttggtyggggygygggagtygygatgygttttttttatttttgygygtgggtgtygggggygtttgtygygggatgtttttgggttggtttgggaagtttagggtyggygatatttygggtttgtttygtttgggtatttagtaggtgttggggggtaggtggttgaggaygaggttattgggtattattatagygttgtatttgttttttyggtattagggtygttgtttgggtaaatttttgggttaaygygygggtggggaggtgggggtgggtagtttggttttagtaggttttygygggggtttygygg

SEQ ID NO: 7051 - DNA, 1143 bp, Artificial Sequence; identical to SEQ ID NO: 7050
  Description of Artificial Sequence: Synthetic polynucleotide

SEQ ID NO: 7052 - DNA, 1371 bp, Artificial Sequence
  Description of Artificial Sequence: Synthetic polynucleotide
ygttttttttayggygttygtttagttyggtggttttaattttttgygggagttgtataygtttyggaaatttgggatagaaattgagttttttttttttttggtggtggtgatagtatttgtttagatttggtyggaygtygtyggtyggagtatttagttyggyggagaaggagttygttyggygttggggattgggatttggagtttttttttttatygtaygtaygtttygtttygygtaygttygttygttygttygtgtttggygtagttttatttyggatggtttttgttttttygygggttygagggygttggaaatttagyggyggygaagyggagaggagtttygygygttttygttygtayggttttaggtttggggtttgygttggagtygygyggggagaggtygtttttgygatygtygygttygttttygatygttygggttygyggttagttyggttattagttatgggttttggttygttttygttgtttttggtgttgtygtygtygyggttgttgttgttgttgttgttgtttttgttgttaggtaygygtataggygttagggtttyggagggaygggygttygagaaggggygyggggttyggaggggttgtyggygagaatatygygygggygagyggagagggttggygtygtygtyggggattyggaattygygtagattggttttagttyggyggygatttgggtggggtggttttttttttttyggtttattttttatttttagttattattaaatttgggagttattgagygggygttggtaygygtygggtgatggggaggtygagatygggtttttygttttgggygtaggagttggggattygygttttygygttgttygtygttttgtttygygtattggtttttaaattggygygtttaagtttttygttttatygtttgtatttygtttatttttttatttgayggagatggttgaagatttggttaaggttatttygggaagaggggagtygtttygggattggggttggagttggagygttagtttttttttyggttgtagttttttagygtttttggttgygtygttgagggattttttatygggagagygttttttgtttttttttygttttttagaggagtttgttgggggaagtyggttttggttygtygttgggaggtttttgggtgtttgggagggttggtgggtagygagagtyggggatygggtaaggttgtagggaatttttggagggtttaggtyggyggtttgtygtgyggttgtgagtttagagygtttttygttttyggtgtygaggtttgtattatttagaaygttataygtttttaatyga

SEQ ID NO: 7053 - DNA, 1545 bp, Artificial Sequence
  Description of Artificial Sequence: Synthetic polynucleotide
ygygttgtgagagttaggttatttaaatgttaygtttttygtatygtyggygaggggataaatgattattttgatggattyggtagtttaaggaaattatygttttyggagggatggyggtagagtaggtygggtatgttgtatttgtttgagttggatygygtgtgagygagtttaygtttttygygggttaggtttagttttygtgttttttgataggtgaagttgagtatttttattaaattttygggaagaataaygattttattttatattaaygtgattggaaattttaatttaagaattggatgtatyggtyggtttatttggggtttgtttagttttttattttatttygygtttttgatgtgttaggttttttgtatagatagtttatatatttaatttttaaaatatygttttttgaagygatgtttaattaggaaaatttgttttaaattgtatgattatttttygtggttttttttttygaatttttgttttgtttattaggtgyggtttygtttygtattygtatatatttttttygtygttgttttgagygtagygataagggtttttatattttygyggttygtaatgtttyggggttaagtygaggtagggaggygttttygtagtttttgattttataattygygygygtgtgtatygagtygygggtatatygygaatatatatatatatatatatattygtgygttttygtttttygttyggttygggtttttygaatttattttygaggygtttygggygtagggttygtttttttttgygggtttttagyggttgttyggtagtggttygtayggttttygatgtygygttttyggtaggttttagagttagttggttattgttattyggtagttyggatttygygtttagggttgtatttygyggatggagygattttygttttygtygttygagtttaggtttgygtttataygygyggygtttataygygyggygtttatttggttgtagtttyggttagggttagygygtygyggttgaagggggygttyggatttttttggggyggygygtagtygggatagtttygtatgaygttygygttttagyggtttygggaygyggttttatttttaatttttggyggttttagtttyggtttttgtgtttyggtyggygtygttaygttatgggtttgtaggttgggagtagygygggtygggaaygyggttggggagagttgggttgggtttttttatygtygttygttyggggygtttaagttggyggggygtaygggtagtaattgagygtattttgggggatygagggggyggtttyggggaggggygyggygtygygttaagggggtgttttgttagaggttgyggyggaggaaagtgggagttagagygtygtyggagtttygggaaggyggtgttygttyggttttaggtygyggttgtagygtygaggggaaagygagyggaagttgygygttggagggagtttattattyggagttattygyggggttygygt

SEQ ID NO: 7054 - DNA, 1545 bp, Artificial Sequence; identical to SEQ ID NO: 7053
  Description of Artificial Sequence: Synthetic polynucleotide

SEQ ID NO: 7055 - DNA, 1027 bp, Artificial Sequence
  Description of Artificial Sequence: Synthetic polynucleotide
yggtgygtgtataggggygtttygggaggggtggtgatyggtagtyggttttttatttttygygtttattttttygtttttgttttttttttagttggtggygggtagtgtggtgatggtttttgaggaggtttgttyggagygtatygatttgatttataaaaattatyggaaattttgtaatttgttgatygaygtggaggagtggggttaggtggttattattagtatgtttattygttaygttygtaygtagtttttgagttttatttagaaygtaagtgggtttagtttaggtagagygggtygaagtgtgtttyggggaggygtttatagattygtyggttttttygtttaggaatttttattagaggagaaygyggaaaaagttttttayggtttagaggaggaygaggttaagggygyggggtttgaggagayggtygtygyggtygttttttttygaaagttttatgttatggatttygattatyggttgttgttgygtaatattaaatttttgttgtagagtygtagygtygyggtggtgatggyggtggygtagttttatttttatttggygtttaaggyggaagtgggygttatygttaaggygttggtgygtttgttgygtagttataggtgygtttygtttttagtttygttttttttttygttttttgtttygttttaygggttgttyggtttygtttttttaygtttattagtygtttttatttttgtttattygttttatattgatygtagttttgtttttygtattggtttttttttygtaaygatttgttttattttttttttttattygttgatttttgttttaatygaggggttyggggtgttttgattygtttttttygtagtgaggtgtagtaygttgtgttttagaaygtggttattatgtttattaagygtygggtgagtttgygayggygggttgttttygttgttygagggtygtttttgygggtattggaggygttgtyggggttgggatyggggtygg

SEQ ID NO: 7056 - DNA, 693 bp, Artificial Sequence
  Description of Artificial Sequence: Synthetic polynucleotide
yggattygttttatttgaggatttygggtttatataggygatygtttyggttttagattggaagygatattttagggattaaagtttttagttygygttyggttttagtttttgttttygttttagagtygtagygagtagggttttgyggtatygtttagagattggtttaggaggttttagtttttagygttagtatatatttatyggttgtagtagttttattagttttgttttttttttygggtttyggttatattaagagtttyggaaaygtygagaattttgygggtttagaaygttygygyggaygttttttttayggygtyggaagtyggygtygagtttgttatygggtatttttttgttgttttgaygayggygggygttgtaagagtggagaagttgtaggtgttgaggygyggtgaaagaaattttgggagttaagagtaygaggagttggtgtttgtgttatatttgtatttgygggtaagaaatygttggtgtagyggygggttagggtttgggagtygatttagggtttaggtgtayggagygggtttttygggaattttgagagtggtygtttttyggagatgaagggaygagggygtagygattttygtatttatttygttttaygaatattygtttygtattygtyggttattyggggataaaaygtttgttygt

SEQ ID NO: 7057 - DNA, 1496 bp, Artificial Sequence
  Description of Artificial Sequence: Synthetic polynucleotide
ygttttygaattyggagaaagtagttygttygtttttttattyggtagttagtttagtttattygagagttgagttygagaagtyggtttttgayggtgttggygtggygtttgttaaaatatgttttttgtattttaatttttttyggttattttttttgtaygtatagttygttyggggttatttyggttttttagygtagttttttygatttttgtttttttttttttygatttatgtttgtttaaggtygaatgtaaaatttatttttaagaaagygtagygggtayggggggtatttagygtgttatgtttygtagtttttttttagttaagattagagttttagattttagattayggaaatgagtgttatttagattaaggattgygygtttgyggtttyggttttyggttttgggtgtttttttggggtgtttgtgygtttyggtatttttygtygtygttygtgagtttgygttttttatttatttaggtttgggagygttttttatttaaggtttgggagtattttttaattattttygttaygtttattttattttttatygyggttyggattgtagtaaaatygggtagygygagggttaaaaagtggaaaggagagygttttttygtgtygtgtagttagttygttaattttttttttttagtttygattttygtaattttaaatgtaatttttttttttyggtttyggtttttttygggttgyggttagygggygtygygttgygaggygtggagygggygggttgtygygaggttgygggtggyggtgtyggttatagtygygagttggygagtgggtgggtgggtgggtggggaggagggagaggataggyggggagagagaygggtgtggggaggggagggagggggagatttygtttttttgtygtttttagttygggyggggggyggggggaggaggtygygatgagggaggggaggagggagggaggaagggagggagggagtygaggaagaygtttygataattygtgygtttygtaaggttyggagtatttgtatatttttgtagtygygyggygagttattygyggyggttgttgtagtttttattgtatttttttttttttttttttttygggtttygggtgtgtgtatgtgtgagagtgagtgtgtgtgttttgtaggtgygtggtgtgttygttttaattttgtttagtaggtgggatttggtgattttagtattattttttttttttttttttttttttttgtttttttatygtttgttgtaattttgtaaagtttyggagtyggagagygygtttygtttttagagttttyggattyggygagttagygatygtygagtyggttattatgttyggtagatygygttattaggygtttttygyggtttttattyggyggyggyggyggyggyggyggygttygygatggttttagaygttgaaggattttgtatttgatygttyggygt

SEQ ID NO: 7058 - DNA, 5820 bp, Artificial Sequence; identical to SEQ ID NO: 6811
  Description of Artificial Sequence: Synthetic polynucleotide

SEQ ID NO: 7059 - DNA, 699 bp, Artificial Sequence
  Description of Artificial Sequence: Synthetic polynucleotide
ygtygyggtttttaaaggtygttgttgtgggtgygtatattygggttggagaaatttyggyggttttgtatygygyggtttygtttgggttttggagggygtattygtttygtttgggttgtttygyggtttatggttaagygttttttgtttagttyggaatygggygttygagttagygaataggtyggttygttttagttggtygagttygattygtygygygttygggttaggygagygyggygyggyggattagttttgagttygtagtttygagggygyggggygggygygtttggggtatgagggyggggygggyggyggtygygtttttaatttyggygttgygtgtgggagyggtyggattagggaattagygttgtaatttyggattagtaaygttygttaaatgagtgtttaatttygattttttatgttttttagygtygyggttgagttttaggaggttttttggttaggtttttttygygttttggttttatttttygggaggttyggtygyggtyggtagagaatttttyggtttgtggagattyggttttaggtygygtygtagttttttttyggtagygtattttattggttygggtagaggtttatgtagttttatagygttyggagttgggagttygtggattagagaaaaggaagtttyggatgtttygtttattaygg

SEQ ID NO: 7060 - DNA, 1845 bp, Artificial Sequence
  Description of Artificial Sequence: Synthetic polynucleotide
ygtaygyggygygggattygagaagagygtttggtagagtataaattttatagaagaagagattttttgttttttttgagattttattttttttttgtttagggttaggaagtttttttygggtttttttagaatttyggttgtttttttatttgtygtttatygttttttggaggtttyggagaggggttyggttyggygagtygaaggttgyggggyggggygygagttttagtttttgggatatatagtyggtgygtttygygttttaagtgygtattttaggaagttyggagtygggaggattygggttygyggttttattttatttttggygaggtygggagaaaaaaagygttagatygttygtttgagggtttagaagtttatygggyggyggtatagattttttygaaatgttttygttttygygttgygagygtataggaatttagggtygtyggggttgtygtggtttggttgaaygtttaaagttaggygagggyggggggttttagtttagttatgygagtttttttttagtggtgttagtttttaygtygggttttygggtyggygggaggygygtgtgtttgtttgtgtgtgtaggggatatttygttttttagtagtttatgtagaatttygtttttygtttyggttttaggaattttttttttagtttagagatttttgygygttttttgtttattttgttaaggygagaaagyggtygtgttggagataaagaaatttttgtttttttttattttyggttttttygttygttygagatatttttyggygttttttttygatttyggygatattgygtttggataygttaggtaggggggtagggtgggygagttygtttttygaygygggttagttgggggtttttygtgaatttygttyggggatattttatagtagtygygtttttatttttttttttttaaatygtttygggtttttgtygtygttattttttgttaaatygtttttatttttttagyggagttatagyggggygyggygtatataaagggggtyggagggtggagagtatagaaggagggagagatttygttagggttygtggtaygggtttgggagtagttatttattygatttttttttygatttttgagatgtttgygaagatgaggaagattaygagtagygtgagygyggttagtatttagtttyggaattgtagttgtatggtgggttygygttygtygggatttaygygggtyggygygaggagtaggggtyggagggygtagyggyggaygtyggagttttygygygtygygygtagttgggtagatattttgygtttyggaygagttygggtyggyggyggtagyggtagyggtagyggtagygataggtaggggttgtttaggygyggygagttygttygttttttttyggttttygtttgtttttttttttttttttttttttttttygttttgygttyggtttygygygtagtttgatagttttgtttygygtttttgttygtttttttttattaattttagygtttaggygttagtttttgtttttttygtttggttttatttagttttygagggygyggggatgtagtyggaygttatttttggtttagagagattgggttttggttatygygagygatygggtayggagttgagtttagggaagtgygygtatygttyggygtattttttaggttggtaaaygttttttttygttygttttttgtttagttttttygttttttygtaaagttttttygatataaagattaatatttggggatagtttttagygygyggygagaaggygg

SEQ ID NO: 7061 - DNA, 1844 bp, Artificial Sequence
  Description of Artificial Sequence: Synthetic polynucleotide
ygattagagattyggygtayggagyggagtttttggtttttatttgtattaatttagttygyggtygtagtttttgttaaagaagtggggtttygtgtttaaggttygtaygttygggtgtattyggataaattttagtayggttygggtgttttttttttttaygtttataatgagggtttggggtaatygtttggtatttagtttgggtgagtyggagtggttggaatyggagaggygaggggygggtayggyggyggygggygygttgggagygttgggttygttgggygtyggttyggagggattataggggygggatttttggagaagtttttggtygttygygttggggtygyggaggtagygaggygygtygaggaggyggtttygatttaggtygtygtagtagtataggaagttgtaatataggtaagtgtaggagagygagagygtgaaggygaagagtagtttgygygtttttygyggttgaggtggtttygygyggtttaggattttataggttatggttttatgggttygygtygggggttatggttttygagggggtatyggyggttgagttgttgtggttttgyggtygtttagagggttygygtggygttgttayggttaygygggtygggygttgggggygtygtttttttygggggttgttgattagggtgygtatagtgttagggggtttygggggtagyggtttttyggggaataggyggttgtatttttagtatttttyggttttaggygatggggtttygggtagtygggyggttygggygtttttaggtttttaygtgygtygggttyggagygygtttagygttygaagttttatttttgattttyggagygtygtttaygaaaygttyggyggyggygyggttgtgygggttggygggtggatyggayggtggygttggygtyggtygygatttggtttttygggaaatgtygagyggagygygttgtyggttttatttaaggagtggtttgaygttagtygygygggtttttygagttygygtygygtttagggatttggttygttttttgygtttttatttttttattttttttagaaatatagtaygygggttttttttatgtaggttattttttayggagttttaggttagttttggggyggtgaaaygaaggtgttaaggtatagtattttttygggaggttggatatttttattaygttggtttttygatatttagggataygaatttaggtygagatygygtygatatgtagattagatagatttagaygtagaygtaggtattttgttttgatgygyggttttattattttgattygtataygtaygtataggtatagaagtataygygttttagttyggatatatttttatatttaygygggggtggggaggagaagttttttaatttgggtttagatatatygataaggatatttttttygttttygatatttygttaaatggatatatatagttyggaatyggatatygagygtaygtaygttttggattgggataygygttgtagaygggatgggtggaggagtygagygtgagtgagatttygtgattatttatttagttttttagtttttagygygttgatttatatttyggyggttygttttgtttygtatttatgaggtaygygygtattttaatttattgttattttattttttttygggtttgtyggagagygagtttyggagyggtagatttygygttaggagggttttttttttagtagtygtygtttagyggtagattgtttttyggggagttgtttagggtattagagggtygtyga

SEQ ID NO: 7062 - DNA, 1480 bp, Artificial Sequence
  Description of Artificial Sequence: Synthetic polynucleotide
ygttttyggygggttttgttgttttaygttygtygtggggatttttttttaggagygttttgtttgggattttttttgygttttagatttttattttggttyggatttttttygggggygtttttttatttttaggttttygttygygttyggygtggyggtttttttttttygtgygggygggtttyggaatagtgtygtyggtygtttgtaggtgtttttttayggaggggygygygtttttgygtygtggtygttgttaggygttagyggtttttagtygaggtgtattygygtttygggtttygggygygtygtagtygtttttttatygtygttygtttygttagttygtttygtaygtttttygygtygygtttttatttyggggttggggggggtatgggttygygtygygttygtygtygtygattttaggtattygagtttyggggygyggygggtagyggtygttgaygyggggygttagttgttaatttygygygyggagtttttyggyggtgtagtttygtttyggyggygygggyggtatgaagattagtygtygyggtygagygtttttggtygtggttttgaatttgttggygttgttgttygttattatygttttttttattaygtattggtgttagggtaygtagygggtttttaagtygggttgyggttagggygggygygttaattgttttaattygggygttaaygttayggttaayggtatygtygttttygtygtygtygtygtygtygttatygtttyggggaayggtttttttggyggygygttttatagttgggagatyggygaygatygttttttttttaggaatttttatatyggtatttggtattygtgygaggaggagtttagygggtttggtgagtgygygygggyggyggttagttyggtttyggttttttyggggyggygyggttatygaggttygagtttyggattygttygtttttttttygtygtttgggtttagtttttagygtttygtttggttaggggygaygtttyggggtagggggygygygtygtttyggggtyggggattagtatggggggaygtgygggaygtttygtygtggagaggtgtaaggtagagtttttattygttgyggaygtttygyggttttggggaygttttygygtttygggaaggygtttattttygttgtyggtyggaggggygygygttgtttttygtttttgaatttatttttaygttygttttttttttttttttttttygyggggtattagatgtttttatttatttyggaaygtttttgggggtgggggtgatgtagggatttttgttattagtygttttttttgtygtagatttatagattygggagttttttatttttatygttaatttaygtygaattttttagaygggagtggggagtgggggagtttygygggttttyggaaagtygtattygt

SEQ ID NO: 7063 - DNA, 5065 bp, Artificial Sequence
  Description of Artificial Sequence: Synthetic polynucleotide
ygttaagygtttttttygggtgyggttttttttygttagtgaggtygygatttyggygtagttgtygttttatttygggttatttttattygttattgyggattagtttttaagtattaggttttttggyggaatttgtaagtttaaatttygttattyggattttttagtagttttttttttattttatttttatttagagttaggagggtgttatygtaygtagagygygtaggtttttggggtgagtagggygygtggagggattttaggagtggtattttattttygttygtygtttattttygattygtataaaaataaagaataatttttattttgtttttgtttttattgatgtatttttttgtatygyggtaygyggagtttygttagygttttgatattgtagygttygtattagygaattayggaatttgggatygagataatggttygtaattgatgtattgttattaataataaagattaattttttttttttygttatttygattatttttttttttttattttttttttttttattttttattttttttttyggggttatygagggaaagaaaataaataagaaattagygggggaygttaagygtagatygaaaygttygtttttaygtygtygaggaygtaaaaaaaygaaaaaagttattaaagtttggattttttaatttattygtttttgttygtttatttttaattaagtatygygtagttgtttttygtatgtttatttygtttggttgtttgttgtggtgtttttttggggggggggaattttttttttttttatatttaattttaaattataygtagattaagtaataaataygtgtgaagttattttygggagttttttgttgygtaygyggygygtattaggagaaaagttttgygggatygttagtttygttaggtttttggttgtatgyggtgttygggaggttyggatttttaagaagttaagattgttagagaaggatgygggyggttttaaataygggtatatttygggaaaggagtgtgtaagtgtatataaaygygttygtgtatttgggatagtgtggattggtgggtgtgygaggatttttgtttgtgagatggaggygggtgygggatttataygtgttttygtataygtttttyggggtttgggagatgygagtygtttatattttaggagtgygtagatttatttttgtygagggatttttttaaatatttagtgagaaataatggtatttgaagtattatttatggaaatattattatttttattttttaatattagttttattgatagtttygtttgtttttttattaaaatttattgtatttattaggatttggygagaaygggagagygaggyggagagggtgtgaatgtgtgtgttagggagtgagygagggtagaagataagtaagagaaaaggtggaaaayggaygagtagggagagagaagggagaagttatattaataaaaaaaaataaagttagtagatgaaaaatagaaatatttatyggtatatatatatatttatattttaaaagaaaagatttaagaagttaagagaaagggaagggttttttatyggagygtagtataggttyggagtataygaagtyggttygggagatyggtgtttatttygygygaatygatygtggtatyggttagatttaagggygttygygaattggggygtttttatgagttttttttttttttgatygtgagatagggtagggattgtgtatttgtatttttttttttttttattatttagtygaagtttagtttagtttagtttttygggygtaagatttygagaattttggagygaggagatttygaggygygaggggaaagagttaggttgagtygygtatygagttttaggttygygggygtttgagttyggtagagggatygggtttttggttttgggttttggggygagggtagggaggttgtattttagtttgagggagatggtgatagagygaaaagttygggygtygygttyggtaagtgtttaaaaagtggaggygagtttyggygtygttaggtagtttyggatagaatatttttttatygttttttttttatttygtttttyggttttgygtygttatttygtttyggaaggttggggygyggttttttttttagggyggggtgtttaggggttttagggattggtttagtttagtgtygggttygttygggttgtgtttttttaggtyggtgttygttgttgygtttagtgtgagtygtagtttttttttttttttyggtyggagttgaattyggagtttaggtyggttttygtttttygttygttyggggttttgyggygttatygttgtygtygttttttygyggagtgaygygttttgtagttaatyggggtagtygggggggaggttygggaggggttttgggyggagtygggtygtttttttattttaygggttyggggttgtttttttygaaaattttagttttaattgttttgggaatgttygaggtagagaaagggagygagggagtaagtaagaagttggaggattagtgtttttggyggggaggggatggggtggygggagaattgtttttttttttagttataaatttattaggtttttaaattttttttggattttttttttygygttttygygagttygggatttaggggatggagaattyggggyggaggagygtygagttaggygggagggaggtygagtygtgggygggaggyggatyggygtggggttggtttttttttattygtttatttttttttttaatgggggtgggggtgggttgttttttggtagtttttaaagaaaygaagaaatatttaygaaaygggaygtttttttttttgatttygtygygggatttttttttttygygggtyggygygtttygttttygagttgggaagttygtagygygtyggtagttygggtttttagttttygtygttyggttttattttttattyggggyggtttaatttyggggagggtatgttaatttgggtyggtttagttygggattgtgggggggggygaaggagggagggaagagggaggggagagggagagagyggggggygtttgtyggggygtygggttygtagtggagaggaggtyggttttyggyggtygggtygyggagtttygggyggtygtaaagagggttaatttagtgtygggyggygyggygygtagagttagtttygyggtyggtttattgggttagygygyggagagataggggtttgtagtaaattaygaattaattgattaaggygagygggtttgaatagygttggttyggtgttaatygttttttaaagagtttttttatgattaatygtaatgtattattgataattataattatagtaggatatatgygygttgygttyggggtyggggagtyggggagggggygggygggtyggygggyggggggagtygtygtygtygtygtygttygattttygtaattttgagaagatttttttttagtaattttttattttgttttagttgatgtttgagttagtatgtygyggaggaagtaagygaagttttaatatttttaattygatttygaagtggtttygttttttyggygagatggtgagtgtttyggttygygtygtggatatatatataygtatttatatttaygtatattyggatttatttataygyggttggttttygygttttttattttatygtygtygyggtttygattgttttttttattyggygtaattttttttttttttttaatttttaatgtgtttttgttgggttttttttygttgtttyggggaaagygagtatatttttyggtaggattttttyggagttgttgggttttttygggggaaggagggygggtatgtyggtttggttttttygtttttgttttttyggggattttagtygyggttaagattygggagttttatgaggygtgggtgygggtggaggtygtttyggtttgatygtayggggtttttagygttttyggygtyggttttagggtattyggttyggttttygtygttyggttttgttgttagyggtaaggaagtttatttygggygttgggttgaatttygagygtgggggagttygttgygtttttttgtttttaygtatattttttttyggtttgygaggtagaatygggtgtttttggaggtttagagttgtaagaagatggggattggtgtyggggygttagygtttgattygttggggttgyggtyggggtggagagtgttgttggtygttagttgtttyggagayggtgtaaayggayggggaaagtgtyggggtttggttygtaaaatttattttygtatttttttttataatatttgtattttttgttttttaaaatttttttggtyggtatgygttttttgyggatygtggtgttttttatttttaggggggttagggaagaagttatagaatagttttttaggtttgygggtggttagttagagtggaattttttttgaaataggggtatttgtttttttygatggaggygataattgtgggtttygaaggggttgaataagtttagaataaagtttgtgtgtgggggttatggtagagagtggaagagattygggtagggagttggggtataaagggaggatatttggaatttttttttgtttttaaaggtgttttayggtatyggttttaaagtttttaggtttagygttygaggyggtgtagyggygttyggattygggttttygggtygtttyggtaygatgttggtttttyggttgtgggaggaygtataaggagtaatttyggyggggttttagyggtttyggatgttattygggatgtttaygttttaggyggtattttggggtgtgaaggagggagttgggtttygatagagtttygaagygtgattttgatyggtattttagtttattaagttgyggtygttygggtttttaggttttyggttygt

SEQ ID NO: 7064 - DNA, 2372 bp, Artificial Sequence
  Description of Artificial Sequence: Synthetic polynucleotide
ygagggaygtaggatgaaagaagttaagagtgtygttagggtttgygttagygtygttagattttygggatgggggagttttagggtayggygttagyggatttayggagaaggagaaaagttttattgtygtgtagaagtttaggttygggtgagaygtttgygaaggttgttagtagyggaagagaaggggygtttttygtgttgygtagtattygttygyggtaggtgggygyggagtttagagttgggagttaaaygtaaaygttggygagaagttttagtttttttyggtagtttattygttgyggggaggggttttttaygtttttagtttttgggagattgtatyggaggtyggaagtaagtygggygaggatgaattatttygtttaatttttttttttyggttttttagttttygtaygtyggttttttttagagattttgtagtygygagygaagattgttttatttttagattttatygaattttttgtggtttgyggagaygaggagayggaygggtttggtggttaatgagagtttygattttttgtttttygtttaatgggtygttgtttatgggtyggggygggattaggagggtaggtaggggyggttygggttggygygyggygyggyggttaygyggttgyggtttatagagttagygtttttttgggtgttygtgttagtgttgygygggaaggtattattattatagtygtygtygttggttagggtgttggataagaygggttygtyggttatttygttagtttaggtattygttgtagtygtygttgtttttttttagatyggtttttatggaggagatggaagaggagttgaaatgtttygtgtgyggttttttttatygggagtttattattttgttttgtttttataatttgtgttaggygtgygttygtaatattttggtgtagattttagagtttgaatttttttagagttatygggtygygggtttyggggttttygattatgattatttggatttggataagatgagtttatatagygaggyggatagyggttatggtttttayggggggttygttagygtttttattatttygtgttagaagttttttaayggygttygygtgtttttttyggttatgtygttatyggttatttatttgttatyggttttggtttyggtgtttygtaatttttgtattatttgtttttagtgttatygtagttttattttggatgatygggggtttygyggtttttttaagaatygygtattggaaggggtaattgatygttattagtagagtaaagtygyggtttttaagtgttagttttgygagaaggygtttaaggaagttatygttatgtgygaatagtgygatgttttttattgygattygtgtygtttgygttgttattygtttygggggtttttagttaagtatygtttggtgttttyggtttagggtygtgtgagtyggaggttgagtttaygtaaggtttttatttgtatagattaygagttggagaattatagtatgtattgygtgtaatgtaagatgttygtgtgttattagtgtttggaggagggtaaatattttagttaygaagttaaggttttgggggttatgtggaaattatataaggtgagttttaagaaaatttatttttaattttttgygttttygattattyggttttgtagtagayggttttygttttttgygtatagygtattttagtgggggygtaatgtaggtgttttygatgtttatttttttggtttggtgtattgtaggaggtatgggggaattttaatyggygtaygggggagttgaatgtttttatagagttgttgyggggatgttttagagygggtttttyggggygygttgtttgygagygggatttagggygtttttttttygyggygggtttgtagttagtggtygyggttagtgtgtgggaaagtattgtatagttgggtagagtygygttagtgtttagggtygttaggtaygttygagggtagggygggttgygaattttyggggagggattgggatgggggyggtggggtygygyggayggygggagtttgtygttgttggataggyggatttggtgaggtayggyggagggtyggggagaygtygtaggyggaatattgatgagttyggttttgggttagatttggttttygagttggagagaaygyggggttttggtgttaygtgtttaaaagatagagyggagagggtagttagyggtygttatggtaaygygaygtgtaggtttgggtttgaattttttyggagttgggatttgagattagagtgttaggatyggagtttgygtagtygygg

SEQ ID NO: 7065 - DNA, 2372 bp, Artificial Sequence; identical to SEQ ID NO: 7064
  Description of Artificial Sequence: Synthetic polynucleotide

SEQ ID NO: 7066 - DNA, 2372 bp, Artificial Sequence; identical to SEQ ID NO: 7064
  Description of Artificial Sequence: Synthetic polynucleotide

SEQ ID NO: 7067 - DNA, 2142 bp, Artificial Sequence
  Description of Artificial Sequence: Synthetic polynucleotide
ygtagttggtttygaggttgtgyggtttttagttttgyggagtagtttaggttatygttttygtggtygygggggagggtattttygayggtygtagtaatgggtaagagattagggtttttttattttygygattygtttttttttgtttggtaattaagygggatgttttattttattttttaaayggagyggattatatatagtagtattttatggttttttttgttgyggttttttygggggaaggtatttttagagggtggttaagttttttttagyggtyggttttygggagggggatagaatttaggagttagttttttgttttygtataaaggttygtttttttttagggygtttttgggtggagygaagyggtygaggggattaygataatgtttttttgtttttyggatygatggttaggtttttagagttaggagygttygggattttagggtagggagtaaagtttatatygtaatttygttattygttygygttttgttagtttgttggggttatagygygtaggttagtagtygtattygtygttgyggggttttttttgygttgagtttattttttgtaaygtygttgttttaaattttgygggttatttggtttygggggtggggttttttgggggtygyggggtagttyggatgagaggatgattygggagttttttgggggyggagtggaaggggtagttttaggtagttttggttaggagtttttatttygttagtttygttgttttagyggtygttgttttagaaaagttaaygagaattagatgtggtggttattgtygaatttttttagagtyggtgattggtttttagtygagggttttagttaattagtttgttgggtgggtttggagtttygtttygtttaggygttygyggagatttaggttygaggttggygyggygyggagagtgggttggaggtyggggygggaygygttgtgtagygggtaagygtayggtygagygagtatggagggggatygggtggtygggyggtyggtgttgtygtygttattagtgttattgttgttgtygttgttaatgttgygggtygyggygttgtatttagaygagttttttttatayggggagtygtggggggattagtttttgtaggaaggygaygaygaaagtttagtygtggtgaagttggygaattttttgtatttttaygaagttygatttagtaatttttaygtaagtttagtttttttttggtatttttttygtagttttttttttggggtyggttttayggaaattttgtttttagaggggaggaaatagattttatttttggagttttttagtatttttgyggtggtattyggttagagagygatgtygttgtttgtttygttgttgtaggggagtaagaatgatttggaggggagagtaagaattgttygtagttaygtaygygttttaggtagaaaaggtggygttgttagggyggttagygggttttgtagttaggatygygagaaggttgtgttygtttgyggagttggggtgttttttttttagatttggaggtttttttttygaggatatggggtttyggggttgtgaggggagtgagaagataggtgaaygagttttagggtttttggatttattgtagygyggagttgggatagtygtaaaagttgygtttgtttttttgaatttagattttttggttagtggggaaggagagagaggttttttgtttaagttagtttttttttttttttgygygaaagggtagygtttttgggtttgagygattgttatttttttgtttttttttttttttaggtgggtattaayggtattatttttatttaggatttttttagggaaaygtagtatgtggattatgatttttttatygatttttyggttatygttttttttttggyggatatygataygagttayggtagaggtygagttttgtatygagaggatatttttttygtagtgttgggtttggtygttygttatgtgygygttggtttttygygttttgygygttttatttttatttaygtttttttggttatttgggagtaggtaggygtttaygaggaggttaagygyggggygttgttttygg

SEQ ID NO: 7068 - DNA, 544 bp, Artificial Sequence
  Description of Artificial Sequence: Synthetic polynucleotide
yggtttttagtyggttttgtgttgttygttgygaatatagttygtgggttatygggtagtygagttatgtaagttattttgatttttaaaaggtagaygtataaattygatttagaattygaggygaattttgaatttatagygttaaaaaygygtagtgttttygtttgttyggttygttgaaggttggttttgggtttgggggtagtgttygygaagggttgygatggtaggtttygttgttatayggtatygagggttttttygtttyggygttaggygtaygtttttttgttatatttttygyggggygygtygttagggttatttgtttttttaagtttygttaggtagttaagggtgaggagyggagagggattyggtygttgttgtygygagttagtataaaggtagygtttgaaatygaattttttattttgggtatygyggtttttttttatttttggttttygyggtyggagygtatttattgttagtygttatggtyggaygagggggttgttygayggtygtttaggttygg

SEQ ID NO: 7069 - DNA, 2002 bp, Artificial Sequence
  Description of Artificial Sequence: Synthetic polynucleotide
ygttttygtttygtgttaagygggtttaaggttygaggttttttygtttataatttyggtgttyggaataygttttygaggggtygtgttgtyggggttattattygygattggatttygygtygtgttgtttttttygggtttygagttygtttagyggtttgtayggtttaggtttgagttgygggttttttttgtggggygygttgggagtgagttttatttttaaagtttattttaaygttttaggtatgattaygayggtagaggtyggtygtttattttygttttttttttyggttagagygtttttgtygggagtygaygatygyggtttgatttygggttttatygtttattttyggttttygttttttttttayggttaggggttatatatagyggaygtttygtttttagtygtttttttgatttttgaatttgggagttagygtgttygttggggtatgtattgttaygggtattgggatttttttgttgttgyggggaggagtttygayggtaggtgggaagatttagtttgttygygttttygttttttagtttttgygattygggtygaggtttttagtttttgggttttttygtttygggtttgagggaggggtygggttttygggtttgtagattygttatygygygtgygtatgygtyggtygygagttttygggtgtaggtttgggyggtttyggttygygtatttgtttaggygttgyggtttagygygttttaatttttagttygggyggagagygggggygggattgaagtatygtgttttttaaagtattttttygtygtyggtagttttggtttygtaaatgttttagygygtttaggygtaygtagagattggygyggtagttttygggttaayggtaygygagtaaagttggttggygatttgggataygtagtagaagttgaggttgtatygattttygtygtttygggggaggtatgggttygggtaggtttaggaggaagttgtatagttygaggttygggygggagtggygggtygygggtaagggaaygtatatttggaaggggttaggatttyggttggagtttggttttttatggygaggaagtygattgggaagggttttttggygaggtttttttgttgtgttattttttttyggtagygtygggygyggggaaygyggggttgtatyggggygggggagggggttttattyggyggtttygaggattygattttggggtygggttyggygggtaggtttgtttaggagttagttggtaaatgtagyggattgttaygttattttattgttattatttattgtaaattattgttttaagttttygggagaattygtygaatttgagaggggggagggggatgggggtgggygygtaggaagttttataggtattagggattggtgatttaggatattagtttttygagttttttttgggaatttttagtatttagattgtttttgattgtagggattayggtggggygttttttttttaagtttttttygggatatygggygygtttttttygtttttgggttagygtatatttttttaygygatgattagtatagttattgtgaggttyggttttggtygygtttgttttttgygagtgataataataaaaattattggaattgtaaggaagtttttggtttyggttttttagtygttgttgttttgggtgtttyggttgyggaaagatttygtagtygggttygatttaygagtggaatatygggttgyggatttagtygggtttataggattggygyggggtttyggggataggtttygtagggtttttttgygtatygtttgggaygtygattttgttaatttggaggataatttttgtttttattttattagtagatttttaaaaatttagtygtygttgaaaygtgttttttattygttyggtttgtttgtagtttttgaygagtttyggtatagttttygg

SEQ ID NO: 7070 - DNA, 983 bp, Artificial Sequence
  Description of Artificial Sequence: Synthetic polynucleotide
yggtgtygygygttygtttgttgtttggagtttttaattyggyggaatttaggttaggaygygtygtygttttgaygtgttgtyggtygggaggygygggygttaggttttaaygattagggtgggtggtygyggggtaggggttggatttgaattygtttttygggggttttggatgygggatgygggatgygggatgygggttygattttttygttgttggtygaggagygttttgagagtttttttttygygygygaggataaatatgygyggtttgttagttagtgyggygttgttttttagttgatagggtgaygtttygtttggaggtttggagattggttttttgatttggtttttttyggtagtttaatgggtaaagtttttygttygtttagaaattagttttttygygygttttttttgygygyggygaggtygagaygtttttygyggtgatagygtgtaaggyggagattyggygygtttttagtttagggaaagtttaggygaygygatygtaagttygagtttaggtttttyggagtygttagggygygtygggttgtttgtttttttgtttttttttgtaggaatttttygtygttygyggtygggatttygggtttttttygggygtagattttagttatygttttgggtyggggtttttttttttttgaaattygtgyggaaggatttttttyggggtttttygttttggttttagatatttttttttttagatttygygttttagatgygttgtttygtagttttttgatagttgygagtttaygaatttyggygggagggyggyggyggyggattgatatgtttyggaygyggttgyggtyggygggtagttygygggggygatgagtygttgygatyggtgaggygtygggyggygggggtatygygtattttttttattttttttttttgtttatttygttygggaggtygagaggaaaygg

SEQ ID NO: 7071 - DNA, 947 bp, Artificial Sequence
  Description of Artificial Sequence: Synthetic polynucleotide
ygttyggtgtttattttygggattttgaatttygttttttttttattttttgttagattygygagggttaggaagggttttgggaggaagygggagygtagyggyggggtatggaagaagagggttgggggygygygttatttgtaaaggttttygaggtttttttttagttttggtggtaatttygtttagygtygygtttttttttagatttaaatttttgttgggtttttygggtggyggyggyggygayggyggyggttgttggagttaagttttgtygttygtagygtyggggygygggggtgyggaggtyggagttttagagyggygygygttttttygtagygggtyggggtyggggygtttagttygtttygtttgttttygtttaygttttttayggagttgyggtatygttttttttygtttttygttattatygtttttagggttygggtatgttatttttttttggtttyggtygtygygattttygtttttttttttttttygttttttttttttygtttygttaagttaaygaattttaaaagaagtatagygagyggggaaggyggtagaaagttgtttygyggygtyggagtttttyggatttggaggatttygggattyggygggagagttaggygggttttttttygaygygtgtgtgyggatagttyggagtygggygtgyggygttgygygggggygggygtagggttygttttaagtgttgygttygttyggygtgggtttggaggttgtttagattatattattgttttaattygaygyggtygggttaatgtaggygtygyggtttttatttttattttttttgatattttyggatatgtttatagtaatgaattygygggatygttttygtagttttygygtttttttttttttttygtttttygygttttggygygtttygt

SEQ ID NO: 7072 - DNA, 1362 bp, Artificial Sequence
  Description of Artificial Sequence: Synthetic polynucleotide
yggttttygggttttgygaagggagttttgttygygaggyggagggtttggtttatygagaagygtattyggaggyggttgaggggygygyggggtaygtagtagagtygtagttyggttyggattyggagygtyggagtygtaggaaggygaggagaaggaaaaaaaggaggttgtygtyggtttttgttttattttttygggtagygttgattygttggtygtygtyggatagggttggtygtygggygygggatttygtgygygttgtttatgttttygtttgtygttggttaggtgtgygygtagtttgttggtttttgggyggtattygggggttttttatgtttygygtyggggttyggygggaggatttyggagaggtagygyggagggaaagagagagagatagtatgagaaygygtagagttgtatttygygggggtygggygttagtagtatygygttgttttatttayggygygtttgtttttygygttgygygtttagyggggygtygagttttagaaattttagtatatggtyggttyggyggttayggtggtygtagttgttttgtttttygagygttttttattgttttttgttttaagttttagagygtagtttattagyggygatygygatygtagyggyggggygtttattyggtygtaagtatagtagtgygtatttgygggaaaggaggaaggggttggyggygtyggggtttttataggggaggggtatttyggyggtagtaatyggygtaggttaaggtattttgggtyggggttgygygygagttaggtggtggtaggtygggattggggagggtttttgygtttttygtttygyggygtygttgttgatgaygygygygggttttttyggtttygygtttgyggagttagtttygttatttagygattygtttyggggagttttygttgaygygygttgygagtygggttgyggtagtygaggggyggggagggaggggagggggagttttagtgyggggagggtyggyggttgygggttaagttttttttttygttttttttttygygttggggagggggttygggaaagaygtggttttygtttggttttggaggatgggaggttttygyggggygggggggayggagggaggtattgagtgtttttgttttygtagtggggatgtagtagtaggtggyggttatgtggtttgtggaggttyggtatttagaggygygyggtgagttygtttyggygggagygtggygaatgtggttttgggygygygggtgtgtgggataygtttttatttaygtggygtatatggggatttggggaygygggtgaaagaggygt

SEQ ID NO: 7073 - DNA, 1092 bp, Artificial Sequence
  Description of Artificial Sequence: Synthetic polynucleotide
ygatygyggygygtygaygtttggygggttayggttataaagygggttttagagttttttttaggyggyggtaaagggggygttygaggttatyggtaagagatagattattggygtttygggaaaatagagtggggaagggygagattgtgtgtttatttaygttygygygggtttgagttggttyggttttggagggtttygggattttagaagggggatagtagtgggggatgggtagaagggggygattygggttgtttaggtttttygtagtttttttgttaaygagaggggttygggygggaatagttygagtygygggggtgyggggygygtagttygttttatttygggagagtygygatygtygttttygaygygtgtattaagtgggggtgttyggttygggataaaggatygggaygyggatygygggygggygttattgtttagttttagygtggagggygagatygtggtttygaatttttttaaatttggyggttyggggygygtgggggggaygtttygttatttgygyggttataaaggagagatttatggtgtygttgtagttagygttygagttttygttgttgtygttgtygttgygggttagtygtttgtatagttggyggggatygggttgagtagygagygttyggagatygtayggygtattyggttgtttttgggtttttggttttagatttttattaggyggagggtttygagtgygggggygggyggggyggggtggggyggggttyggyggayggggygtttttttaygtgattatttttygttttattttyggggyggggttygttagaaattttaagygttygtaatygttttttttygtgggygggatggggaaattgaggttygaggtygtttygttggttggtgtaagaattagtttgtaatttaagttttgagttgttggygtttygtttygtgtagttgaatttaatttattyggggttgtgggtagygtttttttggggttgataygttatttygagtttgaggattaagatyggagtgatttggttttttaygttaaygttttttttagagttygg

SEQ ID NO: 7074 - DNA, 1092 bp, Artificial Sequence; identical to SEQ ID NO: 7073
  Description of Artificial Sequence: Synthetic polynucleotide

SEQ ID NO: 7075 - DNA, 1092 bp, Artificial Sequence; identical to SEQ ID NO: 7073
  Description of Artificial Sequence: Synthetic polynucleotide

SEQ ID NO: 7076 - DNA, 580 bp, Artificial Sequence
  Description of Artificial Sequence: Synthetic polynucleotide
ygtgtttaggggagttygatagagtaygygggaaaagtygggtgtttaygttttygygatttaggttgtagagataagagaaggttaggttttgggaggaygygaggtygtttaggaatggtagggaggttygttggggtttgattttggttttaatggattaaagtttygayggagtaaggtygggtgttygtggtggtattttttattagtggaygttggygaatgattatggaaataatatttaatagtagtgttttttatgttaggtatataatygttttggygtgggttgataattatgtttattttatygygtggtattgagtygatygtatatttagggtttyggtttttagggttygtttattygtttattgygtgaagtatttattttygtaggagtyggagtaggaatagggttgggttttggggygygygtatgygtaggtygtgttttaggaagggyggggtattgagtygagggtyggygyggggyggagggtagggggtggtygtattttttagggtatttgtgyggtgattgagaatygattyggtaattygygggttygggygg

SEQ ID NO: 7077 - DNA, 888 bp, Artificial Sequence
  Description of Artificial Sequence: Synthetic polynucleotide
ygattygttttttggtygtttttttygyggttaggygtattttgtagygtttagatygtygygtttttattygygtttttaatygygagygttygtttgggtygggtygggygttygagattygggagagattaggggttygtaaagtagaagagtagatttagaaagaaaaaaaaaaaagygagaagtgygagaaaaatatattgaatttagttaaatatayggtagatgaaaaaaatattttgtttagaagttaaaaaygagttttygagtygtgagatattgttgygttttygttaggygtgtaggtyggatgttaggggggtaatttygaggttygatggtggtttygattttagggyggatttgygtttatttttagtttttgtaattgygggttaggagaaagggatttgttatggygaagaaaatygaattttttttaattaggtttttttttaaagagagaaaaagtaggtagttgggtaatttaatttaatttgggattygggaygtgtgtttgggygtttttygggtagttggtyggagygtgtgggttyggagtttttagygttggtttygygttgtttttygatgttattagtaaattygtagggygttttggygtaggttygygtttgtagagtyggtttgggaagyggaatttttttyggtttygatgattaggtttttttagggttttggtttaggttgtttttgtgggatagagttttatgaagggatatagaaatagagatagtttttgggyggygttttygggatgtggygtttttgtgtttyggggagggggtattatttttgtttatgyggagygattyggaygttgtaggggtgaygtygggtagygttygttttgattttttaygg

SEQ ID NO: 7078 - DNA, 1483 bp, Artificial Sequence
  Description of Artificial Sequence: Synthetic polynucleotide
ygyggttttgggygttggtagggggaggtttyggtaaygtttgggggttttaggttagtttttttygggttggaaggtatygtataggggttttygttaatttyggttttygygyggtygggatayggttatatttgttygygggggtttgttttttaggtygtygtaggtttttyggagtttaagaggattttataagtagttaaagttagygtygtttgttttttgtagaatattgttttttataagttttgtagattttttyggttttttagaygtttttayggttttygygaagttattttygygttttgaatgttttygaatttttgtagagttttygyggttttttggaagttttygygttygtggagtttttttttygttttygggggtatygygggtttttagtttagttttttygaygttggtygttgttattttttaygaggygtyggtttygatttattttattgtygttgtyggggaygggygygtygggttaggggygattyggyggyggyggyggyggyggyggggygygggaygygggygttagygggggagtyggtttygggygyggyggtttygygtttgattgggttgyggggggtagygggggtttatttttttygggtgggygtyggggtygttagttgyggggaagggtygyggyggyggygattgatagttgggtttyggtttttgttattttggygggygygtgttygggtyggygtgtgygygggygygtgtttgggggtygtygtygggggatgggggggyggggggygagtyggttggggttygggyggygggaaygygtgygygttygtttgagattyggggyggyggtttttggygagtgygygggyggtttygagttttygagggagaggygygygggygygygggttagttttagtatagtagttaagagttagggtaygygygttgttgttygttttatygtttttygaggggattgygygygygtgygttttttygttygyggtygttgaggtgaatgagygygygyggyggttaaagttygatataaaaggygyggggttttatygttygygttttygggagygttgagtttgaggttgygaggggyggggyggaygagagtggyggggttgaggggyggggttttgagggaagygygaggggygtggtyggggtgggggyggggygtygggygggtaygtggygyggtgygttttttttyggygyggaygtttttttagttttygtttgattttagagtttatagaggttatygggggagttagggttygtgttygatggttttatgatttttattatttggttttgttgagtattttgttygttyggattyggggtatttttgattygagggtygtygaggttatyggygattgattttttttttttgtatataaggagtygtggyggggtyggagagttgtagttttggggygatattagtattyga

SEQ ID NO: 7079 - DNA, 3714 bp, Artificial Sequence
  Description of Artificial Sequence: Synthetic polynucleotide
yggygtggttttgttyggaggggtyggtttaaggaagtgttatttattyggagggtggtttygggttygttgattagtttttaygtttgtygtttgagttttattagtttygtgtggtagtggyggtattagtygttttygtyggtygagtggttttgttttgggtyggtttyggygttttygggagtagggyggttgtygtatgggttttggtygggttyggygggtagtttttttyggggggatatttttagtagyggyggyggttygygggtygggtygttttyggttatttgtagggtgtgggggyggaagyggatagtgagtttgggaygttygtyggatttagatttttgygygttttgttttagygtgaygtttttgttaaagttaggagttttgggtaygattttggygtttatttattttttttattttyggaggtttygtttgygggttygttatttttagtaggaggttyggtttttagggatttagygtatatygygagtattttygtygtttygggttttygtygttygtttttttttttaggtygggtygygygtatygygggttgygtagygtatagagggaygtygyggtygattatggtyggggygygggaagagttyggtaggygttttyggttaygttggtttttygggggygtygyggttaygtgattyggtttygaggygtttttatggttyggtttagtygttyggaagttygtagagtttgygagtgtygygaggagygyggtggtttyggtgggygygttygggaggygagggyggggtyggggaagggyggggttygggttttyggggygggyggygaggggygggagtttagagagtgtttygtttttgtttagtgttgggyggygygtggggggggtagggttttygtttttttaygyggtttygygtattttaaggattttaatttgttaggtgagtttttgtttyggggaggggygttgggggyggyggygaggatttagttgygygygygtatgygtttttygtttttttttygggatattagggttgygygttttttaggaggygtygaygtttttttttttataggygggaaaattgaggttgyggaggggaygtttttgtttaaggtttayggygaggtgggtygaggaaggggygggatttyggtttygagatttttaggygtttttttagtaagtttagygtattttgtgtgtygygggttattttaggtttaattgtygygygtgggttagtgtygtygyggtgtgygtttygagtygggtagygatygygtyggygtatttgtgtttyggygygtttgygaayggtaygtgtttttatagtygygygtgtgttygtaagtgggtgtgygygtygtgtygttygggaagygggaggttttgygggygtgygtyggatttgttgttagtaggtttggtagatgggaatttagtttyggaattaattgtttgtttgttttyggttgggaggtygttttttygtttttttttggygattagttgttttgtgtttagtygggttttaaatgtygtyggtattygyggtygtaggtagtttygggttaggtttygggttagttttaaagttygggttaagttaggygggygyggygggygggtttttygtgaygygagtgttttttgtyggtygttgygtatayggtttygagattggggagatagygtygygygttttaggtttgaggygtattyggaaatttygaaggtygtgattyggyggagattaggataygyggttgtyggtatatayggtgaggttttygtagagatttagtaygttaaagtgatttttttygttttgtttatttttttttatttggataagttttttygtttaygtaygtattttttagaaagtggggtgggtgattttttttyggtttttygggtygttgatgattttaggggttygaaaaygtaagggggtatggaataaagtggtaggggttttttattttttttgagattygtaagtttgtagtygttttttatttagtttggggggtyggaagygttttttttattygttttttygtagtttggagaatgaaaaygggygttagtttatatttggatttgggtattgaggataatatttaaattttatttygtattgtyggtagatagtatygtttttygtygttttattgtttygggatatatattttttatatttygtttttttatttatataygtaatatagaagtaygtagyggtygggagtatyggttttgygtttttggttagttatattygtaattttagygtttttatygtygyggygtttygggaagtataagtttatattttatattygtagaatayggggtgtataaggttggagttatttygggggtttaygattagttaggggtttygattttttatttygtttattttagtaaggygtaaggtgagttygagaatttttgygttgygtttttygttttagttatagttttygggtgggttyggttgggatatagttttgaaggtagagggagatttggataaygttaatgggggaaagtgyggtagygagttttagttygggttgygggaygyggtttyggatttgtygtttttttttyggygtagtattttyggtygygygagtygygyggtaaagtaaygggayggygtttaygtygttygtttttttttygatagtttttattttgtttygtygtygtaggaggtggttggtgaagtttaggatgattttygagtttaggtagagygtttttatttttagtaggttgggagttttgyggggygygtygyggggyggttygggyggttggggtagygttatggaagagggaagygyggggagyggtttttagtgtttttygttatygtygtttygttygygygtttattggtygygygttygtygtygtygygtttygtatygygtagggtygttygttaagttttyggtttttygygtttygygttttygagttttgygttygtttygygtygygygttttygygtttyggtttygtttgtttgygtygatagygtttttttygtttyggyggygagttagatattagttaygyggattggaggtgtggggygayggtttygygygttattgggyggaggttggaagttagaatygggtygyggttygygtttatttgtttygttagtttttagaygtyggtgtttattgtygggtattyggtagggagagggtagygyggttgttgtaaaattttttygattggggtataatygtagttttttttttttttaatttgttttgaggatayggygygttggggttttggtttatggaaaygtttagagtttagtgatttgtgtattttatttygtttaygttttagagttttygtttaattttggtttatggatttttaaggtttattttaatyggattayggagygtgygtagygggattygtagtttgygtttttattttaggatttygattgtgtygttattygtggttttttttgtttygatttygattttttgagggttggaagattygggttggttgtygggtaygaygattttatttttagggttygaagttaggggygggggtgggygttttgtttgggtgtaaatttaagttygggtttygygttttttttgtgggttgttttagtttygygygt

SEQ ID NO: 7080 - DNA, 1266 bp, Artificial Sequence
  Description of Artificial Sequence: Synthetic polynucleotide
yggttygggygttaggtagaattttagttygatgttgtygtygtygggggagagggaattygttgggagggatagtygggggttggggaaggaagagygggtgttgggagggtttaatattggyggagttttaggtggygaygygggyggygagagttgtttygaggygggggtttygggtaggtygttttttaygtagtatayggagtagaagatttgttttttggygagggaygggygtygttgatttagtaygtttaggattagttygtyggyggtttttaygygggttttgggttttagtttttygtyggggggygttttttgttgtttatttttttttttttttygatttttagttttttttttttttttttttagttttaattgtagtggtaaggtttggggattgagaggttyggtgagtgttagtttygtaggttgygtyggtgttyggtttttattttagttygggggttttaggtttttygygggttttggggygttggtgttygygtagttttagtygttttygtagttatygtygttyggtttygyggaggyggygygtagygggggygttygggygttgtttttttgaggtttygggggtttagggtggttygtagtgttattggttagggtttgygatttttggggttygtygtygtygtttatygtgttttgtttttygtttatygtygttygyggttygygtygtygttgtttatttagtygtygggatttttattyggygttygygggtagygggggtagtggttyggttygattygyggtttygtttttgttttygggtttttttttttgggttgggaygttttaagtttttttyggggagttygtgtttygaggttgyggygygtggggagtttggttyggttygtygttttttttygtattttggygyggyggggtatygtttygggggygtygagggtygttygttttgggttygggygygttygttttatatgtagttyggggyggygtygtagttttagygagttttaggygggatagaggggtttgggaggagayggtygttagtttygygttattatyggtttyggttgtyggaygygyggttygagggyggtggttaaagggtygaggggtttgtggygtygtygyggygygtattaggaggtgtagtyggagygttggttagtygtagggtttttgggggagaggtyggagygggygattttttttttttygygttttatttatagtttttttygtygt

SEQ ID NO: 7081 - DNA, 1316 bp, Artificial Sequence; identical to SEQ ID NO: 6958
  Description of Artificial Sequence: Synthetic polynucleotide

SEQ ID NO: 7082 - DNA, 10783 bp, Artificial Sequence
  Description of Artificial Sequence: Synthetic polynucleotide
ygagtygggataaaggtttttaaygggagygggatatttgtttatatttygtttattgttygtagtttagtaatyggtttgtatttgtgtttgttygggttygattatttaggaygygtygaygaggggtttgttttaatttgggttattgttatttaygttatatattgggggygaggtagttagggttgtagaaagtygtygagyggttyggggagaggtgtttttatttagygttggtaattygggggtagttggggygyggyggygttygttgtagttgygygygaggaggattyggtgttygygygtttagtttggttygygyggaggagtttaggttgtgggaagattagatttggatttygtaggggtggttttttgtgttttttttygtttttagataaagtttttttttgatatttttttggggygaaygagtattaggtagttaatttatatttttgtattttttttttaaaaaagttttaattagaagaaggggtggtaaatgyggygtggttttttttaattttagygtygaggaggaagtgtaagtttygggaaagtttagtttttagagtygagagtggttggaaattttatattaatttgatttaatttggaaaygtggagygygtatttygaaygtatttaaggygtttaaaaagagattatattaaagaattygygtgggagaagaaaattggggagaaaaygaggtatygtygggttatttagygatttttttttttygtagttttttgggtttttatttaggttggagatataatttttatttttattttygtaatttygtttygtygttttttygttgttttatttttagttagaggttggagagggagggggtyggagagggagggataatagagggtaggaaagagtagggtygtttgtttttttttttattyggggaaagaggttygtagagtttagaggtagtagggttagggttygattttagaygaagttggagttttttatttttatttygtttttttygggatygttygtaaagtagaaagtgaattgygygttttttttggtygtagagaggtggaggyggggggttgggggtgggaggtggggggaggyggagtgaaggaaataaatgagtttttagtaaataaagggyggttggaagggggygggtygtttggtggtggttttggtyggttyggagyggagtttttttttgggttttgggttttttygyggttaattggaattaattatttgttttgttatttttagtatttatttttaagttttaattaaaatattgatttaggaggtttatagaagttgggtttttgttatttgaatyggattttgtttaggtaattattaaygatggaaaggagagattttygtagttyggttttygtttttttttttttttttaaaggygttataaatygttaatttttyggtttgtygggggtgggygygygggggyggggaggtaggaatyggtgaatgttaaagaggattttttttttttttttggtttttgttttgtttttttttttttttttttttatttttattttttttaagatgtaatttgttaaaayggtttttttaagtgtgtggattygygagygaygyggtggttttttgtatgtaaatattgggtttaaaaaaaaaaaggttygtttygtttttgtaattaattgataygttatattttttattttgttttagagggtygttggttgggagygyggagttttttaaaatttataattttatatttgtaaatattgtttttatttatttgatttttaagattygtttataygtggttaatttttgygtttttaatgtttttttttttttttttttatttttttttygttttttttttygtttttttttttttttttttttttttttttttttttttttttttttttttttttttygtttttttaggttygtgagtggagtttagttttatatggattgatygttygggtaatggtttatttttttttygttattagtygttatygygygtygagyggtygtyggagttygagttgaygtygttttggtattttttttggagttagaaattaaggtyggggttygyggygttyggygygtaggtygttyggttttttgygtttattttygygtgtttttaaagaagatagagagaggtattgggttgggttttattttttttttttttatttttagtttttttttttttttaaaaataataattattttaataattaaagttaatttttttttttttttttttagtttttttttttaatttttttttttttygttygttggggtaggggagygttaygaattgattaagtgaagttataattttgygatataaattttggggtttygaattatgtygttgattaatataaagayggggttttyggttaaggatattttagatttgtyggatattaaygatgaggagggttttgtggtygaaggttyggaggaagagaaygaggggttygagttagttaagagggtygggtygttggggtagggygttttggaygyggtgtagagtttgtttttgaagaattttttttaygatagtagygataattygtataygygttggttggttagtatygagggtttttagtattttygtaagtagtaaaatttggttgtygaggtygtggttttttttatttttgtagtygtagttygggttggaygttgggagtgaaaggggaaggggttatgtaagttyggatttttttattyggattygtagaaagatttttaatatttgtataggatgttttttgtttttttttttaagtttttttagtttygggaaagaatttggtttttaaaattttttttaatgygagaagttaaggagaaagagggagaagggttatattttttaggggttggtatatgatgttaattyggatygatggttttagtygtagttttyggatttyggtygttgggagggattggtttggygttttggaggtagttagygagtttygttygggtaygggtggagggtggggaggtttygggtggttygggtataaatagtttattttgttttttgygygattatagaggaygttttgtgtagtgtagggggtgtttagaaggttygaaagtagaaaygaaagtttttaaaaatttgttttaaatggtygagtygattaatgttgggattgtggggtattttttttaaaaatttgtttaygtttygtyggagaggaaatygtttaagggygtyggagtttttaattygygatgatttttagtgttatttttttttttaaatttttatttatattatgtgagttttttgaaaggygagtttttagtttttatttttayggatttttttttttattttgggaggtttygaygttttygttaggygtagaggaaggtaggggttatggtaaaggtagyggggttgggttgttaggygyggaggtttagggtygtayggaggatttagggtgtttygagtttggtgtaggttgygygyggtttttagaygtttgaygygtttttttttttttttttttttagtgtayggtttggttgtyggggygtttttttaggatttaagttttaagttttyggagttttyggtygaygagttatyggataatgataaggagatttygggyggygggggggaygtyggtaagaagygaaagyggygagtgtttttttttaaggygtagatttaygagttggagyggygttttyggtagtagyggtatttgtyggygttygagygygaatatttggttagttttattygttttaygtttaygtaggttaagatttggttttagaattatygttataagatgaagygygttygggtygagaaaggtatggaggtgaygtttttgttttygtygygtygggtggtygtgttygttttggttagggayggtaaattatgttaygygtttaaagtttaggatttggtagtygttattttttaggygggtatttttttttttgtttatagygygtagtygttgtagtatatgtagtataaygtttagtatagttyggttagtattttttagtattygatagtatattttttggtttaggtttagtagtggatttggtgagygtygttttaaygagattygyggttttaggtttaggttttatttyggyggyggtggyggygaggaggtttyggtttttatggtggttattattattattataattattattatggagtygagttgattttyggttttattagggaggygtygggaggttgtttgygtttttttggagtggtagattttatttatttagttttgtttatgtttttttttttgaattttgggagagggttgaattttaygtygtgtttatagaatgtttgygtagtttygtttttttgttttttttyggggggattaaatygttttagygttaatgtygttatttgaaaaygagaaaaagatygattttttatttttgttttygtgtattttgtaaaatatgtttgtgtgagtagygatattgttagtygttttttaaagtaagtggagaatattttaaaaatatagagaatttttttttttttttaaaaaaaaataagaaaatgttaaatatttatggttatgtaaaygttttgataattggtggtagatttygtttttygttgtaaatatyggtggtgattgttgttaaaatgatttttaggatyggtttgtttttygtttgggtttaatttttttttttgtggtttgtttgggtttgttttttgttttgtttttgtttttgygtttttttttgttttttttttttttttttttattttattgtgtaaatattttttaaatatggaaaagaaaattttgtaggtagggagttttttgttttgtttttygggtttttagtttygaatttggagtttagttattyggygyggttttttaatagygtygggygtagaaagttttygattttttaaataagaattttaataaaaattttgtgtttaaaaaagaaaaaaagaaaaaatttttgttttttygtttgttttattgygtygggtyggaggtttgggtttgggagtygggttyggtygttygyggggtttttataggyggtttttttygggyggggaggtygggggtatyggggttttggggygggyggggttttyggtgtaggttttttygattataggttgtatttygygtttaggattggggyggggaggagaaygttyggttttyggtttgygagyggtyggtyggaagtttagggtygtttattttttttygtattttttttggtttygygygttgtttgaatttygggyggtagygttyggttaygggaggaaaagtgatttygggagtygtaaaggygaggagagtaaatttttttygttggtttaaatttatgagtggtttttttagtttgagaagttgttgaagttattatattygatgatttttattttgttatatttgatttattttaygttaagaaagtgggtgggtgggggtttgaggttaagattggttgttttttttttattttttatttttttttaaaatttgygggttggtgttgatttaggagatygttaaggttgggggtgggaayggttagggygygygaggttttggtttagggggtttgggggaagtaygyggggttttgggttygggggagggaggggatattgtagttttttttaggatttttggttttaggaagttagggagygagaatttttggtaattttagtaaattatgtttttttttttttttaygtttttatttttttygggtttttaggttttttttyggggattggatttygggtttttttttttttagygttyggyggttygaattagggtgtgyggtttttttaggttagtttttgagygtggaattgggtggattgttaggaagtagaggtttgggggtggggtgagtttttyggatgggaagtgggtatatagtttygggtaygttygggaagggygtatttattttttyggyggggaayggatttygttttatttttgttgttggaggaagatttttttggtagatgttggygtatatttggttaygygggggagygttttaggaagtttggttaattggaggatgagttttttttttttatttygygggtttttaaaaatatttgggattttagtttagagtttagygggtgttgtagaygttgagggattgaaygtyggygtatttggaaattgtatttttgtttttttygaagttgtattattaaggttggggggttgggtggtagtgaggaggtygggtaaaaggagyggttttagttgattttttygttttttgtagttgatgattaggtttaatttaatatttaaagtaaatatgattattygtgygattaaatttgtgygtygatagtattttgygtagtagtttagggaygygatgatattttattttygygttttatatygtttttggataattgagggttyggaagtttttttaatattttagtaaaggtttttttttattttygggtttattttyggggaaagggtagtttttttaaatgttaaaaggtttttttttgttttttatattagtttggtaatgtttgggggtttatgttttattgtttttaaaggttaaygaattttttttaaatagtttgttgtgtaataattgaaygtttaatttgttttggtattaattatttaatatttatttgtaattttttttaattttaaaatttttttgggaggaaaggtgagggttttaagttttttggagyggagttgttagaaggtttgaggttattttgatttttttaggttttagggtttttagggtgagaatgattataagagatttttaggtttttagagaggaagggggaagygtggaaggtttttattttggtaggtttttattatttgtttattgaggataaatttggagttgtggttaggatygygggtttgtaatttgggtgtgygtttttgtggtyggtygggagttygggaggtggattyggygttygtttttttttgttttygggtttttatggagttaataaaagygtttgyggagttttgtgtggttttaattttagygttttgggagygtattyggygyggggttygttttagtagtttattttygtttaatttatagygggyggtataaaatygtataatgggaaagttgggagtyggagatgttagaggygtgtatattaaaaagggatagagaaaggatygyggggatagagagaggggaagaaggagaaggggttygttttttatttttygttttatttygtattatttagygygtttatygtyggtagtgaatttyggagttaggtagaagtttttttggggttttgttgggtttgttattgggtttttttgttatttaygggttttatgttggattttatatggttagttgggtygagggagygygaggagggattygtataaaatttaaattgtgttyggtttttaaattttgtattgttgtttgtgaaaggaagaygtattaaaaattygtgttatatttattggggaggaggttggaggaggggagaaaaagttatttttgtttttgatggtttyggagggygtttgtttygtttaggtttygtgatattgaaagttggattttttttattttgttttttttttttaaaatttttttttttttttttttttataatttygtttttataatttttttttttatttttataattttttttttttataattttttttttttttttatttttttttttttttttttttgtttttttgattttaaygttgggatgggagttygygaatttgygtttttagggtttggtttatttgtgygtattttgtttattgttgtgtgtgtattaggaaattaatttttgtttgggagttttgtattatyggatygttttggggtttaggaggtaatttagggtatttagggtttgggtgatgttyggttttttaygggtttagyggtttttgggtagatgaaaatttattttttgatttygtaatygatyggtttygaagygttygygygyggagtygtttttttatttatygygagaaaggttttgagaggttaagggtgtygtttagtttygggtttagttagatttgggttgtagtyggttttaaggygatttgygttyggtyggattatttggttattaatttygaagagttaaagaygygygygtttttttgaattatgygyggggatttattttattggttttttggtgygatgggaaattattttagaaattttttttaatagygtttttttttatgttggaggagggagatattttttttttaatttttaatgttttttgtatygygtgtttataaaatttagtattagggagatatagtagggtttttaaggaatttgtttattttttgttttttttaagyggtttaaattggygygaggtagtyggaaataatttgggttatgtttttttttttgtaattgttaggttaaaatttttataagtagtttttaaataaattatatgtattaaataaaaatagtttatgttgagttttgtggaaataaaaattggaatttagatatgttttttataaagttattyggtttttaatgagtagaattgagttggtggaaatttygattaatgggaaatttggatgygtttttttttttatttagtataayggttatatttagtagaattagataatttggtaagagtggaagtttttttttttaatattttttattttagatggggaaataatttatttttttatttattgattgttgggtttagttgagatttggtgtgtatttttygagtttttttaagagtttggttattgaaaagttaatttaatatttatygagtataaggatagtttttagaygtatttattaaggtttatygttaagtgattatttggattgaagataaaggttaggggagggggygtttaggtatattagattttttttatttgggttttttttatttagaattaggaaatygggagygygtttgtgygttgttgaagtttttttttyggtgttaagtggygggyggattagatattgtgttgggyggtattttaggaaatatgtatttgtggttttttgagaggttaagygtagtgatattttaaatygtgtygatatattattttttatttaggatttgtaaataaatttttgattttttyggygtattatagtygtygttatttygttaaggaagygatttgagttttattgtttttattaaygtttygagatatatatatatatatatatatatatatatatatatatttttttttygtattttgatttttaaaggttttattttttttttttygaggtatygttattaataaagaggygaataggttttagygtygttattygagtaagyggggaaatgtgggttagtagtttaggttygygygyggatttygygtaygttttaygygttttttygggtyggagaatygagygtgtgtygygtgttgtygtygttaggaggygttygagtttagygttttygagygtttttgygygygggttygggtagagttygggagtygtyggaggtagttgygtattagyggattygyggttygggtyggagttyggtgagtggtgttaagaggtggyggygagtyggaattttggggagagtygygagttagayggyggygggtgtttgggaggtgygagtygatttgtgttyggttgtggttttttygttatgtttttttttttttaygtgygtattatygttygttttagtttyggtttttatygtgtttgggtatagattatagtygattggtttaggagygttttggttattgggagggttttattaggygttagggygygttgttttygygattttagggtttttggyggygtyggtygygygggtggaygyggagagggyggtgttgygagggttyggagagtgggtgttygygtggggaggyggttygggagygygggagygatgyggaggagggattyggtttggttgtaggttttyggggygggggtttygggaaggagagattttygtttttygttygttttggattygggtttygtyggattttyggtttttgtygttygtygtttggaagyggggtaggygtatagtttagaygttagggagagaygtttygtygatttagatygtggggttagggttygggaggtaagaaygttttatatatagtagggtattttaggtaatttttatttygtgttgaggtttyggttagggtgtaaaggtgttygggaatggaagggataygagggtgtggaygtttygtattttatttaygtttggtgttttttgagaggttgggygtggggtagagggtaggggataagggggtgatattttttaaggttttttttttaataaaagtagggtttgtagttttagtttgattygttgattgttgggtggaatygttttatattaaaggtatygtggttttaaatattgttttttttatttttttaagttttygttttaaaattagttgtyggtgggtyggtgagggygtttgtagtatttaggtttttygyggggyggygyggttggataagaaaaggtttttyggttggggygygtagygtagtttagatatttgygggattygagatgttttygyga

SEQ ID NO: 7083 - DNA, 810 bp, Artificial Sequence
  Description of Artificial Sequence: Synthetic polynucleotide
ygagtgtygattygtttgggygggattttttgagygtatttttttygagygygttagtgtttttgggagaggtttgtttgggtgagggattggaygtyggttttttygtaagtyggtyggttgagggtgggggtygaggyggggtygggaatagttttyggattagggtttagataatttygttyggygtttgttttttygygygtatttgtygggttygggggttgttagaagaggtygtagttygygtttttygggtttttaygtttygtagyggygttttttttttyggyggtayggattggttgyggygtygttttaagttygtttygygttgtyggyggggggygtygyggattagagygygttgygtygttatygtygtygttatygtygtygtygtygtygtygttagtagtatagygygtttygggtttygygygtygttagtttttggttygttygtyggtttygtygygttygttagtttygtagyggagtttyggttyggtttygggtygtygttattaygtygygygtygtatttygygttaagaatggggyggttaagttgtttaagtygttygtygtygtygtygtygtygyggtygaggygttyggygtyggygygggtatggagygttygtagagtygttttagtttgttygtttttttygaggygttygttatttatttttygtgtatgaattttttygaygaygaggaygtaggtaagygygyggttygttttttagattttyggggtgtttygggatttaggttyggtagtttttttttygattygtgygt

SEQ ID NO: 7084 - DNA, 1142 bp, Artificial Sequence
  Description of Artificial Sequence: Synthetic polynucleotide
ygygtggagygyggtttyggggtagyggagagtggggttttaatatttagtatatgtagattttggggyggtgttgttaggggygyggattygggattatyggagtatttgtatygyggggaaagttgatagggygygygattttaggaggttgtygygtygtttggtgygtgaagttttagggtagyggagygyggggattttgaaggttgtygygtgtaggygaaggggtygtagggtggtygtttttgggagagtagayggggaagaaggtaaygggagggagggygtagygygagtagtttyggaygygggtttaggaattggtygygaggagygtaatttagtaggygygttagggttttyggatttaaggtgyggggtttygattgggygtttggaygtttygtgayggtggygtygttgttattgtttygaagygaggygaggttaggygttgygttttyggttgttygtttttttttttygtttygygtttagtttttttttttygtttygttttttgtttygttttttttttyggyggttgttgygtygygttttyggygtattyggagttyggyggggatygggaggtagagayggggyggtygtggtttygagggygggagttgagtygggtttygggatygaagtttggyggyggtttygggaggtagagygggtttttygggygatttttaggtttttttygygttttygtttyggattygtgggtagtyggggggaayggaagtygyggtygggttaatttygaggyggggaygtygygaygggaatttgaggtgggaattttgygygttgtagtttygtygggygttattaaagygygaatyggatttygagtttgtaaattygggttygggggyggttgtaygtggtygtggttttgaattttttgygggggtttygaaattygtttgyggggaggttagggygatagaggattygggagttatygttggtgygtggyggygtggagygygtttgttayggttaaggtgygggttyggtttyggtttattttaaggggttatygggatgygaagttygggaygttygtygtygyggtgatttyggygggggygtatttyggttgtgggtygaggtttttttttyga

SEQ ID NO: 7085 - DNA, 2885 bp, Artificial Sequence
  Description of Artificial Sequence: Synthetic polynucleotide
yggaggtttygggaaagtttattaagttttaygygtttygttgatagatgtttaggaagyggttggtagggaagaggyggttttgtagtttatagagttttttttttattttyggggagttttaggtygygttgttttttattttttygtttttttyggtttgtaaygttygtggygttttttaataggttttagaaatttttttttattttgttttttaagtttggttatagggygtttygagtagggagtgtgygggtttygggtataygttgygtygyggttgtattagagygtttaygattttgatttygattygaagyggttttttagygggatagggtgttggygttggygttgttgttattgyggygygttttttygttttggtttttgygtgtygttagggatttttgygttagggttagatttaaagayggatygaggygggtgtttatttgggaygygtgygtttggtggyggaattttyggggyggtyggaggyggyggtyggggagtygagaagtaagtattagygttttaggatygygygygtygtttygygtygtttygygtygtttttyggtttagagtttttattttyggtttgtgagtttgyggygttggtggagttyggttttaggaagaggagtttattyggttttttttgattggatagtagygaggttttatygggygttttygyggtttaaaatygaagygggggygagggggaggtagagttygttttttgygygtygyggttgggagggagaggaggtgggagagaaggaagaggyggaggaggtagygggygtygaggttttgggattygtaggtaagttagatygaygygtagagtygggagttttatygtagyggtagyggtagyggygggttygggtyggtttygggggttgtttatttatatgagtattygtttattyggygagttttygagtttaggyggygyggttatggtygagtttaagtygttgtygggggaygygtatttggtattaagttayggttaygyggyggyggttgygggtttygtttayggggyggygygagaattygaagyggttygyggttayggtatttygggttygggyggygattttttygyggygtttgtatttygygttttagtttaggyggyggagagtagyggygaatagagyggggaygaggaygaygttttygagtagyggyggyggyggygygggttagggagygyggyggaygggyggyggyggtygygagagtagyggtttttgyggtttagtattaaygygygygagyggyggygtatgtaygatttaaaygaygygttggaygggttgygagtygttattttttaygygtatagttygtyggtgygtaagttttttaagatygttaygttgttgttygttaagaattatatttttatgtaggygtaggttttggaygagatgyggygtttggtggttttttttaattagggttagggtttggtygygttygtaaaygtygygtttttgaygtttttyggttaggttattgtgtgtttttttttygtaggygtygttttggggttttgttttgataagtgygtygtttttttygggaygtttttygygttttgtaaatattgttaygagaagtygtgatygygygggttttyggttttttygtaygygtttttygatygtttttgtgattgtttttttgttyggataggaaaggtttggagggattttgtagattaggaggagggggttygatttygtttttagtttgtgygyggtggatagtttagygtagygggaagygttaaggtygtyggggygygggattgagttygagagtyggaygttggattttgygttygggaattygyggtatttattgggtattgtygggatttagtaagtttaggaaygggggtgggtagagtatttttygggtattgtygttygtttttaaaagaagattatygyggggttttagggttayggygaggaygggtattggttagatttyggataggyggttttggtttygggygtaygaaaggtggagaygaagaaaagtyggatttattggtttttgatttttttgtagtgggtttygygttttygttttagtyggtttttygtgttaaattgtagggtagtgttttgtttttgaggaygygygtggtyggtattttttatttyggtgatttygagatttygtagttttgyggagagtttaygatggtygtttgtagaggagttggatygygggygtaggaagatttyggggaaggttttttttaagtaggagtttgttttatttatttgggaattggaygtygtygtyggttgtttygaagtttgaggaatttgttttttaaatgttttttggtttttttttttygtygttattygttgtttgggaygttygyggggtggagttggatggagatygttttgygggttttttgtttyggggggttgygtggaggagggtttttatagttygygttttatttaattttgayggttaggggagggtttygtttagttttggtgtttagtaaattttttttttatygattttttttttttttygagggaggaggtygggttaygggtgagtaagttgttgygggtttygtgtttygtygggtgtgaayggagatgygttgygtagtgttygttttgygtagtttttagttttgttattattygggatttagggagtygggtagggtgttttyggggatttatttgttygygtyggtttgygtttygyggtttygtygtagtattyggttttattaatttaattttttyggttgtyggtaatgttaaggggagagggtygtygttttgtaaygygtttgtttatagygt

SEQ ID NO: 7086 - DNA, 1460 bp, Artificial Sequence
  Description of Artificial Sequence: Synthetic polynucleotide
ygygtttagttggaatgtagagatygtygttyggttayggygtataggaygattygttygttygtygygattgtgtatgggtttygggatayggggtygtygttgataygygyggtttygtygtyggtttygtygttttygtygygttygtygygttygtttygtygtttagttygtagygtagtttttygygtagtttygagtyggggygttatggttttagttyggtyggtygyggggaaygttaggyggtagaygagtygygtattyggyggtttatgaaygtttttatggtgtgggtaaaggaygagygtaagyggttggtttagtagaattyggatttgtataaygyggtgtttagtaagatgttgggtgagyggygggagggyggtagagaagggggagagggyggggggggttygggtyggggtggggyggggggggtaggggtttygggtygyggggtgygggggttgygttaaattttygyggggygtttygggygtayggagggttyggygtttattygttygayggygttttatttattggygtttayggttygtaggtaaagygtggaaggagttgaaygyggyggagaagyggtttttygtggaggaagtygaayggttgygygtgtagtatttgygygattattttaattataagtatyggtygygtygtaagaagtaggygygtaaggttyggyggttggagttyggttttttgttttygggattagygttttygtagttatygttygagttttttttygyggygtttggttyggttygygtttttygygagttgttttygttgggygtygagttygayggtttggggttgtttaygttygagygttygtttttggayggtttggagttyggygaggttgttttttttttatygttygyggygttygaggattgygygttgyggttttttygygygttttaygygtttatygagttgtygygggatttyggyggttgttayggggtttttttggyggaggygtttaggatygygtttttygyggygtygttygttggtttgtattayggtattttgggtaygttyggttygtatttyggttygttgtygtygtygttygaggtttygtygttggagagygtygagtygttggggttygtygtygatttgtgggtygaygtggattttatygagttygattagtattttaattgtagtyggattyggttygaygttttygggttttygtattaygtggtattggttaaattgggttygygygttatgttttgtttagaggagagtagtttgattttygygttgtyggaygttagtagygyggtttattatagygygtgtattttyggttaggtygtyggygtygttygggtttttgtagygttttttttygtagttttygygatygattygatygygtygttgtygttttgtttttttataygygt

SEQ ID NO: 7087 - DNA, 1560 bp, Artificial Sequence
  Description of Artificial Sequence: Synthetic polynucleotide
ygttttttaatygaatttttttttttgggaatygtagtttagygyggtaattgagttatygtaatygggyggtggggaggaagggtggtttaggaaatyggygagggagaaaagyggtggaagggagagttttttttttggagyggttttagtagtataaagtgttggttatagygtttttttygtttttagattgaygagtagtggygtggagttagygyggaggttgttttttttttttttygagttygtagygyggagygyggtttagtattaayggagtygggggyggygtttttgggatggaaaagggttaaaggggaggagtggggtgggggtgggggttttattggtttattataaaaggatygttyggttgttyggtttttgtattygttggaaagyggtttygagttaggggttattgtaaagttagggtgygttatyggayggagaggggagagttttgagtagagtgagtaatatygtagttaaggyggaggtygaagaggggygttaggtattaattttygygttgttttagtttyggaggygttttagagygttttttgttttagtagagttattttgtttgygtttgttttttagtgtttttaattttgygttggaagaaaaatttttygygygtyggtagaattgtagygtttttttttagtgatttygggagtttyggttgtagtyggttttgygygtttttttaaygaataatagaaattgttaattttaataatttagagtaggttaaygaggttttgttttttygattygaattaaaggtttttygtttygtgygttgttaygagyggtgttttttggggttttaatgtagygagttgtgttygaggggttyggaaggygtaagttgggtagygatatggggaaygyggagygggtttyggggtttyggagttttgggttagtatttaygttgttgttgttygtygyggygttattggtygtgtyggaygtattygggygttttttygaggaggaygaggagttagtggtgtyggagttggagygygtttygggataygggattaygygttttygtttgtaygtttttgattagtagttggatttggagttgyggttygatagtagttttttggygttyggttttaygttttagaaygtggggygtaaattygggttygagaygtygttttyggaaatygatttggygtattgtttttatttyggtatygtgaatggygattttagttyggttgtygtttttagtttttgygagggygtgygyggygttttttatttgttgggggaggygtattttatttagtygttgttygtygttagygagygtttygttatygtygttttaggggagaagtygtyggtattattatagttttattttttgyggyggaatyggtagggygaygtyggyggtaygtgyggggtygtggaygaygagtttyggtygattgggaaagyggagatygaagaygaggaygaagggattgagggygaggaygaaggggtttagtggtygtygtaggattyggtattgtaaggygt

SEQ ID NO: 7088 - DNA, 5118 bp, Artificial Sequence
  Description of Artificial Sequence: Synthetic polynucleotide
ygttttttttygygatagagttttygagtttagygtaggttagttttygttttttygyggtttttggtttttttgtygttagaaygygtyggygttagtyggtttatttggygtyggaggtgaggygyggtaggttgtyggygtttatagtygataygtggtggtgyggyggyggtatttggtatatgttgtaggggtagggtatgtygttttagtgttggaagttttygttygttttattgtygtygttttygttttttagyggggyggtygyggtagtagayggagatttgagtaggtygtgyggtggayggatggagtygatygayggtagttyggattygggtagagaggygttggatatagtygyggttgtagyggyggtagtagtygttgyggyggygggyggtaggatggggtggtgtatygyggggtgatgtgyggygtgygttgttgttgtygggtgygyggtggyggygggtaggggygyggagtgygttaggtygtygtaggtygaygggtggaagttagygtggtggttttygtagatttygtttattagtygttttattttttttagygagttggtgagtatgaggatgtagttgygygttagtagtagygtggygattttggaaagtttgygtatygaagggtygtgtgygtayggtatgatttygyggaggttatttatggygatgttgaggtygtgtatgygtttgygttygyggttgttgattttgagaygtagttgttgtagtttyggttttgttatttgttttttgttttttttggtggaygaygtagtygtygaygaygtagaygaygaggtgttggaygaggatgatttgaagttattgttttttagtttgtttttaggatgygygttygtagagtttatagygtygygtagttyggygtttagtttyggygggtagttattyggggtggaygaggatayggtgtttttagtgaaggygttgtygttgttgtttttatttygggtyggtagaaaaaggttatygggttttggygaygaygggyggttggatattaggttggygttygagtttatggttttaggggaagatagtygtygtagttttygtagggttttttttttttyggattygaaaatttttaggagaggaggagaaaagagagagaatgagagagagagagagggagagagagagagagtgagttagtgagagatagaaaagttgttttygtttgtatygtagtattatagygyggggtttyggtataggtggttygtggtttttygtttttttygttattatttttggttttttttttagttgtaygygggtatttataattaagttttttttattttttttttgtttttatgtaataggttattttagggagygttggtgattttyggggtgygggtggtattttagaggtttygggtttttagttaggtgtgggaaaattgagttttygggttggaataaaygagtgggaagtgagggtttttttttggggagaatggagatttagatagagaattaatgatttggttttttaaayggatttattttatttttatygatattaygtagtaaatataygtataygtatatgtatttagagtyggygyggggtttagagtttatgtgttgtatttggagattayggggagtttattagttgattggggtttgggtagaaagagttgttgtygtttygatttttygtttttggtgagggagatgtagyggtgagtgtggggaggatagaagagtaaagtygttttggagaaatggttygtagagtagggatttagattttttgtatyggagtattttgggttatagtygagttgaggagagtttgtttttgggatttaggttgyggttgttgtggggyggggatatttattttggatgygatttgaggagttygtttygaaaagttttaggggagaatttggtatygggygttggtgtygygtygatttataataagtattygtatttttaggggttyggtyggtttttatagttyggtggtagyggygayggyggtagyggtggygggggygggggyggggaataatgtgygtgttttggaggggttgtttygttaatgagttgggttygtyggggggttgggaagttgatgttattygggttaatttygtttaatgaaattygttaggtygggtataygttttttttttgygtataattaatgggygttygtggtygggagatttttggggagggattggaggagggattygaggaggygagggggaggagaagggyggtttaagggggatggagggagggttgagygygtttgggattaagggagaaagggaaygtggttaaatttttgtaaaaaatayggttattatagagttaggttgggggatgggatggtttggagattttgtagagtttaataaattaatttgatgttttaygtagtygtattttttgggatgygygyggaaaattttggygatttaggattyggggttggggttttttttttagttttttttttgtttggtttttygtygtttgtttttattttattggttttattaataygtgggtatttggygttttaaatgtaaaygatgtttaggtataaagtttttattattttggtgttttattygygygtttaggagatggtygtggttgtagtttygayggtagtyggtagygtttttagttgggggtagggatttgaggggtagagggygggtaaggagggaggggayggattttagaagagtgttttgaaagaatttataatttttttttaggttgaggatggtgtgggtatagggaygagttattttygtayggtaatygygttagtataagggtagggtygtgtttgtagttaaatatttttttatttattagtaggggagtyggatgatagtaagtatttttagtgtygtttttgtgattattataygttttggggtaggggtaaygttggtatttgtagtttaagtagggtttygttgtaaaaggttagtaaagagtttttygttttagtygtttgttttttggaattgtaaagagaagttttaggtttgggtaaggtttttttaygttgtgggttagatagygagatggaattattygygatygygttgggatatgttttatygattgtaggttggttttgaaatttgaaaatttttgaygatgaggaattaagttygaattggagaagtattttayggaggtagttgaggtayggatgtatttatttattttatagatgggaaaagttagagatygtgtgtagtaagtttatagaaaaaattgttaagtttttatagagtagttttgtttggattatagatgttggygttggyggttttttatagtataggtagttatttgttttttttagtttttaatttttttttygagttgaattttttatatttatatatttygaatttagatatttgtttttgtagatttyggatgttagtatttgatattgtgagygtaygygygggtatataygtatatagttttttagggagtgtgaggaaygtygggttattttygttgttggggaatttttattgtgtaagtayggttttaaaaataagtaaataaattagtatagtaaataattggtttttaagtagtaaagttataaaataaataaatataaagagaaatttaygttattgtttttagttttgagatatgtttttttttgyggttttygttagaagtttagttygttttygttttygttttagtttygtgttttttggagtattattttttaattygygtgttttttagttggttttgtagttattygttaaatatgtatttaaaatatgaagaattgaagygtggtgttatgtygtttaayggttataaggatgatttataatygtttaattagtagaatttgttattyggaygaygtagggagygggggggtggggattagaaagggttygggtatttgtagatgtttttttygggtttatttygttaatagtagygaggttatgtgtggtgygygttgtggggttattagtyggggygyggagttgtgygtttgttagtgtagttaataaatattagtaggygtaaygtgygygttttttggttgtagtygttgaggttagtttagtygtyggtaygtgtttyggaattyggtttttttttttgttgttgtttattggtgtttgttttgygatygatttgyggyggtgagagtaagyggttttaggttttttgygygttyggtttagtggttggagttgggagttaggggtgaaagtygaggggttygttttggtatggygygagtttagagtttggaaggtaaagtyggaagttttgtgttgttgttggttttttttttatttggtaggttttttttaatattttttygtygtyggagtagtttgggaggtyggggaggtttgtgtygtttttgggtttttttggttttggtgttaatyggatgttgagtatttttyggtgtgttttttatgtttttttatttygttttaggaataattagaaattagatttyggtgtttaagtttgttttggtgygttttggaggygtttttaggatttgttygggttttgygttyggygttyggggtgggygatttgggygggttttaggtattgyggtttttattagygygygtagttggggtttttttttggggaatggagtgtttatttgtagaggttaatgggtttyggtttygggagtttttggttggttttygygttttggtgttgttggtttttttygtgttttttttttttttttgtgttttttttttataaaagatygggtgygtgtyggggtyggtttttgttggatygtygggyggttygggaggagttygtgttaaatyggygggttttygyggggttttagggygtagattttttattgtttttygggtttttttygggttttttttttgatttttttttttttttttttygagtttttgtttatatttaggttgygtttyggtttggttgttaaatagaaygaygtttttgygtagagttgattaggggtggyggygggaggtaaggttttyggtatygg

SEQ ID NO: 7089 - DNA, 1423 bp, Artificial Sequence
  Description of Artificial Sequence: Synthetic polynucleotide
ygttgygggataggtttttagagatygtttygggayggtygtgayggttttygagggatatgagagaagaggagyggygtttaggtaagttggattttgyggtyggaattygygtagaaaygaaaatttttggaaggggtttagtttygagtttyggaggyggataagttgagttttttggttgtattttttggaggttgttggttgtagaygtygtygttttttaagggyggttgttatygygtgygtyggttagattaggtygyggtgttttyggtattttygygtttyggyggttgtattyggtttttttttaygatygaggtttygggtatygygttttttttttyggaygttttgygygaygtygttttagtttttattagtatygagggtagttygyggttattttataaaygttttagtgtygtaatygtttttatttttattatttttaatgtttgtaayggtttttaatgaggttggaaaaatattatttttygttaaaagygatttygagttaggaggagygygtattttygyggtttttttttttatatttttttttttttgattttttttttttttttttggttttttttttgtttttygtttttttagtagtygygtgttgggttttttttttgttggggtyggattttttttttyggtygttttagtttttgttttttygttttttttttttttttttttttttttygtttttttttttttttttttttttttttttyggagtygttagtygygttttaaattygagtagggygygtagtgtttaaatttgttygygyggttygygtttttggtttygagggygygygtayggataygygagtatatttatatttaygygtatayggataygygygtattygaagattttygygygttygtatttaygygtatttggttaygygygtgtattttygtttaygygtttttgtttygttttyggygygtatttygggttygtaagtygygygtyggggyggtygttttgtttygygattggygggagtyggagtttttttgaattyggygtttatattatgggttgagttygtyggygtygagggagttagtgygattyggttyggygygtayggttaaggtaygygygttggtataygygggygyggataygygyggatatataygtgygggataygttttttttygayggyggygttaatttttyggtaagtttagygttttaygygatttgttyggtttttaygttggttatagyggttgyggggayggggaggaaggtagyggggtggttttaggggtttattttgtagggttttttygayggygtygggataggtggggygtttagygtygggagggayggttygttagtgyggggttttagggaggygygtgtagtygggtgygg

SEQ ID NO: 7090 - DNA, 1384 bp, Artificial Sequence
  Description of Artificial Sequence: Synthetic polynucleotide
ygagygttttttgaagtgayggggtygggaygygtagggaggyggtttaagaagygygttttaggttagtttagaatgygttyggtygygattaggataayggygggtggggttgggggyggttgtygggyggggagyggtttygygtttttagttattttttaagagtygttgtttttttaattttagttgttagaggttttgtgattggttgyggtaygatgattygygtayggattggttgtttygggtyggggggtygggttygggggatagaattygttttygaatttttaaagagggtatttttyggtaggagttggtagatttaggaggtgygatagattygyggggtaaayggattggggttaagagtygggagygygggygtaaaggtattagggttygtttagggygtygygtagtayggttttgggggttttgygggttttygggtgygygtttygtttttagttatggggttygtagygttggagattttgggtttggtgttgtgtttggtgggttgggggggtttgattttggygtgygggttgtttatgtggtaggtgatygtttttttggattataatatygtgayggygtagattatttggaaggggttgtggatgtygtgygtggtgtagagtatygggtatatgtagtgtaaagtgtaygattyggtgttggttttgagtatygaggtgtaggyggygygggygtttatygtgagygtygtgttgttggygttygttgygtttttygtgattttggygggygygtagtgtattatttgygtggtttygggttyggttaaggygygtgtggtttttaygggaggygtgttttatttgttttgygggttgttggygttygtgttattttgttggttygttaatattgtygttygygagttttaygattygtttgtgttygtgtygtagaagtaygagttgggygtagygttgtatatyggttgggyggttatygygttgtttatggtaggyggttgttttttgtgttgyggygtttgggtttgtatyggtygtttygattttagttttttygtgaagtatttagygtygyggyggtttayggttatyggygattaygataagaagaattaygtttgagggygttgggtayggtygggttttttttgttagttaygtttgygaggygttggataagtttggggagtttygtatggatygyggttttygtygggtagygyggygygtaggtttttyggaaygttyggttttgygtttygaygyggtttttggattygtttttgtttgygttygtagttgatttttttttgttattagttyggttttgtttttaatagayggaatgaagtttttttttttgtgygyggygt

SEQ ID NO: 7091 - DNA, 1361 bp, Artificial Sequence
  Description of Artificial Sequence: Synthetic polynucleotide
ygtygaggatgtggttttygtttttygtagtygtygtaggagtttttgtttttaaagyggtaggtaggggttttagygggtttattttaatttgggaaggtyggtgygtttttttatagatttygtagggygttttttttggggattattgaagttttggtatttttaattttagttttttygygttaygggaaaygaagaygatatttttttgaataatttyggatgtgttattatagaggggtattttatattggtttttattttaatttttatttagtatattgtttgtttattttttaaatttygtgyggattgyggtatttagtttygggggattttttagttttgttttttygattygygtaggtgygttygtttatttaagggtagggaggtatgttttttygggttttttyggtygtatggtttgtttgtttttttggtttttttttttygtattaggaggggygtgagatagttaggtygatttttatttyggtagtttgyggygatyggtygtttygagygtagygttagatatttgggttggggggtgttagtttgaygygtaggaagggygtagyggygggagggggttttattttagatttgggaggtttgtttggygtyggttttygttygtttttygtyggtggaggtygyggttggyggagatygttaagttagaggaggggattygaggtttyggttgggygaaggttttggagggggagaagayggtygaggygtggaggggtagtygyggyggggygatttttatttgtttattgyggggtttgttygtggggtyggggtagatttygtaaaggaygygtagtttgtaagttygyggttygygyggygyggggatggggagygtgtgygtygaggagygygygtygagtygggttttygygtttgtgtggtyggttggyggtyggggttygtgtgtttttgygyggyggygtgtgygtgtgygtaygyggggattaygttygttyggagtygtygtygtygtygttattttttgttyggggtygagygtagygttttttttgttygtttygygyggygyggtagtttagtttggtttygttttgygggagaggygtygttttygtygygaagttaggttgggygttggagggaggygatygattatygtttttttttgtttattttataggttggggagggggtgttgtaggttaatgagygttygggggyggggttagatygagggyggtgyggtggggggygyggtggggggygtygggttgtttaattygattttattygtagtatagattggagtaggagttgyggygggaaattttagyggygggggtygggggygt

SEQ ID NO: 7092 - DNA, 1175 bp, Artificial Sequence
  Description of Artificial Sequence: Synthetic polynucleotide
yggagagtygggatttygaagtttttattgtttttgtygaggygtyggygtygttttttgtgtttttgattaygttagttttygtygaggaggygatattttttttygygtttttygatagygagyggtyggygtttagygtggaggggttyggaggggttttgtaygygygygtggttygaygygaggttyggtyggttygggttyggggygagattgggggtttgtygttgtygttatygttygagygtaggaaatygtygttatttgatttygttattaagtttaaggtgttttggatttayggtaagtatagygtygttgtagttggtygtgygtttttattatygtygttaggtttygaggtygygtttagttttagtaagaggaaayggaygtttagygataaatyggygtatayggtygaatayggtagttttyggattygygatttaaygtygygtttttyggggttgttygaggaggygatagttttygttgygttttygtygtttagggttygagygygygtygygtttyggttttttggagtttayggaygtyggyggtttttygygaagygygtygaggttgtttttatgttggtygttgaygtgygyggtaagattygtagtttgggtygygtygaggtggttttgggygygtagggttttagggaaaagtyggygtttttatagaaagttaagygtttygtgtygttagtttygttygttygygygtttttagygatygaaatttyggggtttgagaaggyggygatygatttgttygygtttgagatttttyggaagaagatttttatttagaagtygtygygtaagaagagtygggaggyggygggygagttgggtagggygggygtatttattttgtagtaggttgtggttygttygygygtagtttttttagtttygtagygtygttygttattttatattttttaygttatygggtaygggyggttttttattggtygggtatygygyggttagyggaggttgygttttattggtttaggttttgtagtygtttttggattggagtagtgtgttttggygggaagggtttatttygttggtygaggtttgataggygtttagygggygattttttttttattggtygagttatggagygtttygattagatagygt

SEQ ID NO: 7093 - DNA, 1087 bp, Artificial Sequence
  Description of Artificial Sequence: Synthetic polynucleotide
ygtttgtagttyggtygygtggaggtgatygggyggaatttygagggggygyggggagagttgggygggtttatygttttagyggttgttgttaggggtygygaggttttttttgaagatgtagygtagtatattttgtatatgagtttagaggaagaggaagtgtagtyggyggaygygyggyggyggyggygggggygygtyggggttggagtyggagygygtygggygttgggygtagygagygagagygyggyggtygygggtttyggygagggatagaygtatygatygtyggagggatagatataygattaygyggygttatygtttaygtttttatttatyggygtttaagtttttttygygtygttttttttgtatggtataaatttttttttygggayggaataygttgttttagggagttygygatygygttttttttttygtyggttttatayggtaggyggyggggggggygygatagggtttggggtgtygatyggtataggttttttygtttggttttatggatygggtttttggygggtagtgggaatygygygtggygtttttttgtaggttgttttttgtyggggtttyggagttgttagagtagtattttttggttygygtyggatggggatttgggttgatttttgggaygtttggattttgggttaatttttttttgyggggaaygggtgtaggggagttatttttggagygatgtagggagaggtatttyggagtagtttgttgggggtygtaggttttgtaggtttagaagygtttaggaaggaygtagaggtgggggagtttggaggttataggtgggtttaggatatattgtygttggggttttyggaaaagaataggagggagttggtygyggagtttaggttttyggggtgygygyggtttgggtggggtagggtggaggyggtgtttgattgtttttttgygtgtgttttgggaggtgggtttgttttggggatagaggtgttggaygtgtaggagtagatatgtygygygtttygaggaagygtyggaattattagaagtatagggaygygggtgtyga

SEQ ID NO: 7094 - DNA, 693 bp, Artificial Sequence
  Description of Artificial Sequence: Synthetic polynucleotide
yggtttaggtattygggtagagggatgatttygygttttgygaaaagtaataggyggttgtattttattttgygttagtttygggtyggggtggttgttttattttygtggtttagggaggaggygttgggtgygtatgtttaggggtgtgttygttgttagggttgtagyggtygttatttttaattagttgtaagtygagttgtttatttgggatygggtyggttyggygggtttggttttyggygaaggyggyggygttggtgygyggyggttggggygygggaygtaggtagtgygtggygyggttggygttttygggygtygttatygagygagggtgyggtttygggyggtygtgyggggtaygatttggttygygttgttgyggyggtygttgtagattttgttttaggygtygtagttttgtaggaagagtagataaagataggagagaggtaaagygtygtttgtttagagatgtagtyggtttagttaatagagggaaatygtttttaaatttaggttgggaatgagggaggaggggygaggyggttggggattagaaaaagtagtagggaattaaygtgatagttagagtttagttagtgtttygtyggygttgttttttygtttygyggttgyggggttyggaatggagagaggaggygggggttgagygttggttgtygg

SEQ ID NO: 7095 - DNA, 5065 bp, Artificial Sequence; identical to SEQ ID NO: 7063
  Description of Artificial Sequence: Synthetic polynucleotide

SEQ ID NO: 7096 - DNA, 307 bp, Artificial Sequence
  Description of Artificial Sequence: Synthetic polynucleotide
ygttttgggggygatatygtyggggaatttgatgatgggygayggygyggyggyggygtggtttagtaggtagtttaggagatagagygtttttaggggattygtgagygygtttygggttattagygtttttatygtagygttttttggtttygygygtygttygggggtygttggttyggtgygtgtggtygtttygtygtttggttggagtttgtttygyggygtagggttgygtttygagggttygttggttyggtggtttggggtttgttyggtttagyggtttatggttyggttttygygt

SEQ ID NO: 7097 - DNA, 1563 bp, Artificial Sequence
  Description of Artificial Sequence: Synthetic polynucleotide
yggtgttttygtagttyggaygttagygttagggattygttataattttaagttttttttyggggttgggtttygtatataaataggtagtataaaattaggatttagttggggttygtatttttttttgtttagattygagtygttttagttttyggtygtygygttyggagttygttttaattyggaaagtggyggtyggttgyggggtaggygggyggtatttgtgagtagttttagtyggtgttttagtatttttatttyggygttyggygyggttyggttttgggtggyggygtyggggtagygygttyggtygagtyggggagaggagygygggagattyggagyggagyggtaggagagygyggagygaagyggtaggagtagtttatagttaggagygttttttygtttttaaygtygygtttttttttttaaaayggtttaaaaaaatttattaattgtatggtygygtatttttaaaaaggtattygtygttatttggtttyggtgaattttaggaggyggaggaagggygyggggtgggtgyggtgatatygtgggaggtggtttttygtgttygtygttygaataaagagatttygtygttttygggygtygyggtggggggtygyggayggyggttgggggtttttagygyggtygggaaggygaggaaggagagygggagtygyggggaggagggggygtygttttygyggaggygaaatggggygggagygagtyggtgygggattygyggggttagggtygtgygtggggttggggtygtgttyggggttgggttgggttgggyggggaygygygtagtagtygyggyggygagagaagttggttttgggtttaggggygagggygtygtygatttatygyggagatgyggaygagatagaygygtaggyggggagyggggtttyggygtygtygaygygygggtgtaggtgygggtagttaggagttttttygygtgttygyggttgtaggggyggaggtygggttgggggyggtgygtygygggggygtgttygygtgggtttggygggtgtgggygttyggttygyggggyggtgtygggtttggggttagtttyggayggatygyggtttttygygygtggttttygttttttgygyggttggggtgttyggtgggygggygggagggygagyggggatygygaygyggagtttgggggatatttyggtygattygygttttygtygattttttattygtttygtygygyggattgtgttgggtgygttgygaggttttgttygtttttttaggttttttgtggtygygyggygtygggttttygggggaggggayggygttgtygtagtttttgtttagatttttaaggggaattttagatttgtagagatatttttattttagygtttttgygtttgttgtttygygttattygtygtygtygtttgggaatygagggagaaaagtttttagggtygggaagaattaggggtttaggggtttttggggygtygttttttttttttygttttyggagttyga

SEQ ID NO: 7098 - DNA, 512 bp, Artificial Sequence
  Description of Artificial Sequence: Synthetic polynucleotide
ygattygaggttgtttattyggtttggtatgtttyggygtttttggggtttttgtatttygttggtttttygttgtggtgtttygtagttygattatttttgtgtttttaggagtttattttgggyggtagggaggygttgygtggggtttaygagttttaygttgttatttttattagtttttattttttaggygtttgttttttygtattgttaggttttgttttygtagtatttggtagatttgagttyggtttttgttattttttygygggagttttatagtgattttggaggagaagtagtaggagtttataggttatygygttyggtygygygtgaagtttgtgtagtygtatggtyggttygttggtttyggttttttgtygayggataygttgttgtttatttagaggttgtttygggtyggtttagtygtggatttagtgttttgtttagtttyggagtttggattgggtagggagtyggyggggtgygttgatttgggtygg

SEQ ID NO: 7099 - DNA, 1070 bp, Artificial Sequence
  Description of Artificial Sequence: Synthetic polynucleotide
yggygttyggggttygattggtgggaggggttyggtagaggtttygtttygagattttagtaygtttygtttygttttayggtgtagtatagatttygyggagaaygygagtatggtyggaaattatygtttttattttttggygggtttygagggaaggtygggaaygggygggttttgttggtttagagggygttaggggtagttatyggyggttygggatttttttygtygygagygygggggagtttaggttyggtttgtygggggttgggtgaggttgyggattaggtttttaygtttttygygttygttygygtttgttttaggtttttatygyggttttttttgttttyggggtygttttgttttttatagattttattttygggggtygtttttaggattttygttygtttttttttgattyggtttttgttygtttygtttttttttttygggttttttatttttttttygtyggtttygatttygggggygtttyggatttgtttttygaatatttttagtttygtttttagtttgyggagaaggggtygaggagataggaggaagagagygagagtttaggggaygaggaggaagttatygagaygyggagattygaygaygtygagggaggtataggtyggggaagyggtagtygggggyggagygggggatttgggygggttttttttygttttgtttttgtttttttygtttattttttttttttttttttattygttatttatygttatggygttttygattttaggyggygagtgtagtygtygttttatttttygtagtttggygygtattagtttttttgtyggtgggygggygttaggggtagggtygaggttygggtatattttttttttttygtttatttggygygggaggtttatttttygagagtagttgttttttgtttttttttagggtayggatttttygggttagtygttgttttagtatttgygaggataaagaggaggttttttygtttggtygtttttttggttatayggttygtttttttttttttgtgtttttygyga

SEQ ID NO: 7100 - DNA, 766 bp, Artificial Sequence
  Description of Artificial Sequence: Synthetic polynucleotide
ygggaattttaygtttttgtattagttygggggttyggaygagttygggagtygttggtygttaattatygygyggtggagaggygggygttyggtttyggygygttgggggagttagttggygttgttttttttatygttttagaygtttatatygatatagatagaygtatagaygggygggtagatatygatagttttttaatygtttgygttttagtttyggtttagggagtttttygtattttttggggtgtygtaaattgtagttyggtaggttygygtygggagaagggagggygygtaggyggtyggaggaggggaggttttagygygttttygttgygatgtgaayggyggyggtttttatttggagtygtatttggggygtygagtttyggggtygyggaaagaatgygygtygttygtgygtttygtttgtygygtttggttattygtagtygtygygttygtatttgattatggagtgygtttttttgttygygtgtgttttttyggttgygggttygggttygtygaggggtttggygggattggggygygtggttaaggtaggtgtygtygagyggagtttygagagygggtggtagggggygttygaygttagtttygtygygttttttaygygygatgttatttttttttttgtaggygttttagttgtgttgtttttgttgtgygtyggtygtygyggttttagttagtgatagtagtagyggygttagyggattaaatgatggttygt

SEQ ID NO: 7101 - DNA, 363 bp, Artificial Sequence; identical to SEQ ID NO: 6874
  Description of Artificial Sequence: Synthetic polynucleotide

SEQ ID NO: 7102 - DNA, 2919 bp, Artificial Sequence
  Description of Artificial Sequence: Synthetic polynucleotide
ygagygygtaatatgagttttaaaggttaaatttyggttagttaggagtyggaaggttgagttyggttgatttgattttgagttttttyggagttatttygtataggygttygttttgtttaagggtaygygaygttagygggtagtyggttttygtgaagaatggtttttaaataatttattttatttygttgtaaagagagggataaaatgggttttttttttttayggatgtttagttttttgggtaggygtatggtygggyggygtttagttygtagtttygattyggatattttattgtattttttttttttyggtttttttttygtaygggygttygagagayggataaagagttggggttaagtttgagygtygggtayggttaggtttagggaaggaaggttttyggtagatatttgggtattagagttggtgygaggaggaaaagttgggaggygaatttataattttgggggtggagggtaggtaggggaggggaattaggttaattttagtygagtgagtttttagygagttggggtttyggatgggaggtttgtttygygttttaaagaaaagtaaatygtttttttaggttygttyggattgtygaagtttttttggaaaaattttttttttttttatattaaattttgygtygggtttygttttttttygggtaggtagyggygtaggaagggttaagttagttygttttagttgatagttagttgattgggttttgattgatagtttygaaaagtttttttgtttttatattattatgttaatygyggtygttttygtygttttttattggttyggagtgttagttaattttttatttggatttgaygttaygagtgttataaaatttagtaattgttttaaattttttttgttggattagaggttttaaaatttttttttattttttagttgtagttygggttgtttgtyggtttggttttttttttttttttttgttttttgtttygtttttttttaggatttygttattttgtttttttaaaaaaaggtaagaaagaattaaattttttttttttttttttttagtygggttgtatttttgttttgtattttgtatagaggtagagagygygygagggagagagaggaaagaaaaaaaataataaagagagttaagtagaagaggaggygagaagtatgaagtgttaattttttygtgttaaggttygygtygttyggatagaygttygtygygtttttagtttygagyggaygtygygygygttttgtttgtagttygggtyggygaggygagtttttttttatgtaaagygygtagyggagyggygagygggggaygtygygtatygggtygggtttttttagtttygtygtygtagttattatygtygttatygtagttygyggaggattttttygagtttgaagtygtyggtttggygygtaaggaggygagygagtaaggaggggtyggggygagygagggagtatattggygtgagtaggggggagggagggygggygyggggggygygggtagggygggggggtgtgtgtgtgagygygttyggaggtttygggttagttatygtygygtaagttagaagygttttagttyggtaagttggtttattygttggttatttagtatagttygttggttttttttttgtagtttatttggyggagyggyggyggyggyggyggyggyggtaggagaatggtattagaattggtaatgagtaatttygatttgtttattagttttttggttatggaatatgttaatgatttygatttgatgaagtttgaagtgaaaaaggaatyggtggagatygatygtattattagttagtgyggtygttttatygtygggggttygttgttttttatttttatgagtaygtygtgtagttyggtgttttttttttttagtttttyggygtttagttygggttygggtagygagtagaaggygtatttggaagattattattggatgatyggttattygtagtagttgaatttygaggygttgggttttagtttygaggaygyggtygaggygtttattagtaatagttattagttttagggyggtttygatggttaygygygyggggygtagtagttggtygyggyggtyggggtyggtgtyggygtttttttgggyggtagyggygaggagatgggtttygtygtygtygtggtgttygtygtgatygtygyggtygtygygtagagyggygygggttygtattattattattattattattaygtygtyggttattattattattygayggtyggygygttyggygtygygggtagygyggtygtttyggtyggtggygttgggggygygggyggyggtggttyggttagygttgggggyggyggyggyggyggyggyggyggaggyggygggggygyggygggggyggggggygttttgtattygtattaygtygtyggyggtttgtatttygaygatygttttttygaygagtagttggtgattatgtttgtgygygagttgaatyggtagttgygyggggttagtaaggaggaggtgattyggttgaagtagaagaggyggattttgaaaaatygyggttatgtttagttttgtygttttaagagggtgtagtagagataygttttggagtyggagaagaattagttgttgtagtaagtygattattttaagtaggagatttttaggttggtgygygagagggaygygtataaggagaaataygagaagttggtgagtagyggttttygagaaaayggttygagtagygataattygttttttttygagttttttatgtgagtttgataygygattttagttagttattttgataagtgtttygygggggttyggttygg

SEQ ID NO: 7103 - DNA, 2267 bp, Artificial Sequence
  Description of Artificial Sequence: Synthetic polynucleotide
ygggygggggagggggtttgtyggtagagaaagtgyggagagggtagagtagyggttyggggygtttttgtaggtggatatgaaaygtaygatatgtaaatgaatgtaaagtgtatgtaaatgatttggtttygggattygygggaagygagggtttygtatyggattygttygggaggttgagyggggggagygygatttttgtyggttaygtayggaggtggttttgggtygggttaggygtygygttgggggygagygyggggtagggggygggggyggyggtygaaggagygattttttttttaattttttatttttttattttttttatattttttaattttygtttagtttttygygyggtygttagaagtygyggttttaaagttgygaggttygyggtygtygattgttgygaggtgggtgtgygyggtttgyggagggggagagggtgggygtaggygggggtygttttttagagtygygttttttttayggygttygtattttttaattttttygttygttttygtttgygttttttygygtygtttttygtaggaggyggygygttygtygtttttttttygygttttttttttttttttttgttttyggygtttygtatagtttyggtttttatggttagtttttagggygtygtttyggtggyggaggygttgggggyggttttyggyggyggggagtttttttttaggtyggygtttyggggyggagttgagygttatgggygtygggygggaggtaggtggygtagyggyggyggyggggggtaggaggyggaggyggagygygyggggygggggtygyggggtttygtgagattttygggygagygygyggygttggagttataggygyggyggttggattyggygygggtygyggaggtyggagatygtttygggyggggtgygygttttgttttygygyggggtggtyggagtygagttttyggtatggtttaggyggtygtttygygygttttagtttygtygygygtttgagttyggtgyggygttagaagatagygygtagtygtttttgagtygtggaggyggggattaagttggaaggagtagygattttyggatygagtygygagtgtgygtygttygtygttygtyggatttttyggatttttygatygtaagtgtygtgttygtttygygygtygtygtygttttatttygatttygttygyggttgtygttttyggatttgygtygtagtygygtygagygtaygggtygtttttaaagttggtgtttayggtagggtggagttaattygtttagygtttatttattygggttgagygtagtttttygtgagtagagtttgatttgygggggttgyggygaaatttygaggggaaygaygygttygggygttgggagtttygygggtttttttggggtygttyggtttttttaataaaggtttygyggttygygtgayggagattygggagtggggaggtygagggyggttttgggagaggtagaggtggyggyggtyggtttggggaggggggtttagagtttttttttgttttttttttttttgttygggttttyggygttgtttygtaggttaaaggtggttygygttgggggttttggattttgtttggtatgyggtttttggggttttgayggtygygggtttyggtatagtygggtggtagygatggygygtatagtttttgggaagygtttatttgtgttgggtaggtttygagttaggttgtgggaatagyggggagggaggtgtgagtttttgtggagggatagatggttggaaaygtagttttagayggttgattttatttaygtggagtagaaggyggttaggttggtggyggygatttagagtygttgggtttygaatatattgyggggttggygttttttygtttttgygttygttygtgtgtgttggggtygyggtygggttgtgtttattttttatttattttgtgggttgaggtyggttgattttaggtttattttagggtttaggaagaaaaattttttttttgaaaagagagtaygtygygtgtttttgtgggtgggggtttgtyggtagttgttaggtttgtggttttagttagggtgyggtttttgtgygttyggttygggtgtgygtttttttttttggaygaggaataggaggtttttagggtagttatttyggyggaygggtyggtyggggataaggggygggggtyggtttttygg

SEQ ID NO: 7104 - DNA, 265 bp, Artificial Sequence
  Description of Artificial Sequence: Synthetic polynucleotide
ygtagtttgygatygatggagtaggaggygygggtgttgagagttgygggyggttttggtygggttyggygtttgttggttttygtttygtgggtattttgtatagtgttggggttggtgttgagtttygaggagttgtttatygygtagttygygttttattgtygatyggattttaygttgttgtttttagygttgygygttttgygyggattygygttgttggaygtygttatttygygtttggggtttaygygagtygyga

SEQ ID NO: 7105 - DNA, 374 bp, Artificial Sequence
  Description of Artificial Sequence: Synthetic polynucleotide
ygaatagygttttgaaaygtagaaaygtgtttattygaattgttaaygygagygtagagtttattgataaagtaaaataagataaatygggagttagaaaatttagygatttataggatttatygtgatgttttttataaatgttatygygaaaatagtyggatttgaaaataaaygygatttatttggttttyggaaggggagaaggattygggygaaaggygttagttttttttygttygtttygtagaygtagygtaggtttygagttttygagyggyggttttagaattygygggttattygggagtttttttygtagtattagtygaaagtttttagygtygaggagggygggyggttgtttttttyga

SEQ ID NO: 7106 - DNA, 1133 bp, Artificial Sequence
  Description of Artificial Sequence: Synthetic polynucleotide
ygaatagygtttttaaatttagaaaygtgtttattygaattgttaaygygagygtagagtttattgataaagtaaaataagataaatygggagttagaaaatttagygatttataggatttatygtgatgttttttataaatgttatygygaaaatagtyggatttgaaaataaaygygatttatttggttttyggaaggggagaaggattygagygaaaggygttagttttttttygttygtttygtagaygtygygtaggtttygagttttygagyggyggttttagaattygygggttattygggagtttttttygtagtattagtygaaagtttttagtgtygaggagggygggtagttgtttttttygatttygtttygttygygyggaygttttyggttttaygyggggattatttygggattttygtyggatttygygygttygyggttaatttgygtgtatttgygtttygygttaygttttyggygttttaygtttagtttttattgggtttygttttttagtggttttaagtttygttttttygttggttatygtaagtttygtttttygaggtttygtttttgtaaggttygtttttttaygatttaggtttygtttattayggttagttygggtttaggtttygtttygataygatttaggtttygttttyggttagtttygtttttygygygtttygtttagtaattttygttgaattyggygyggtttttttagygttgttttaygtygtagtttagygtttggagttygygygtttygagtttttgttygtttatgygtagttgggttatttaggtgtatttatttttttgttgtttygtygttttttttgtttttatttygtttaggttttgggtgttttttttttattttttttggygtttttgttttaggttatttggtygtttttttgggtttttygttygggggyggtttttggttygayggtgtygtagaygygygygtataggttagtttygyggagaggttgtttttaggggttaggyggggggttgagttagaggttggggtttgttaggagyggggyggtttggggygtagtagtattggagttgaaggygagggyggttygygtygg

SEQ ID NO: 7107 - DNA, 2358 bp, Artificial Sequence
  Description of Artificial Sequence: Synthetic polynucleotide
ygggattygttttttaagyggygttttttttatttttygygaatttttyggyggggtttgtgtggattaagggagattagagatttttygtygttattttatttaggyggagayggtttattygaattygtaygggtttttttttttttttggaatttgtagttggtttttttygaatgtttgttttttttttttttttaygaaagaatagtgttttgggattyggggtgyggggtagtygggttygttggagttgtttagtgyggggaagagtygtygagattgggagaaggggygttggttagggaggagayggggtagggagyggattygygattygtattttgggyggyggttttygygttttagtygygtttttygatgatttttagtygygaagggygagygggygggggttgggttgygggttygggttttaggaggtttgyggggtyggggaggggygtggagtggttygaggatyggtttggggattgggggtaggtgtttggayggaygygggtygagtatttttttygggggygggygtagtgaaaatattttgggaggyggygtygygyggttgagygttgttgttttgggaataggayggygttyggtattgygagttgagagtatttttataaattttgtatgggaggygtttygtgagygggggyggggagyggagygagagggagggagttagagagtaagggagggagggaggaggagaggagggggaagtyggggggaggaagggaggygtttygtttygtygatygttyggttttgtaaaygygygtygggygtttttttyggagttyggyggtgygtgygagygtttttttgttgtagtygyggyggyggtggttygagggggyggagaggagggggttgyggtyggtyggttagggggyggygtttttttttaaaatygtttgygaagtgtttygggtggtagaagtaggtygtyggtttygyggagtaagtygttygtttyggggttgagtaagygygyggggttgtygggtagtattayggttgtttgygggygtyggtgttttyggygyggggttggagtttattatgtttttgyggggtygggttatygggtaygagyggattttyggtttgttttygtttygaygygttyggattagttgtagttggygtttagggatttgaatttggatttygggagggagtgygtttaggtygatttyggagyggyggtttygtggttaatatgtttygtaaaggtgagttggagtygtaggggtaagttgaagttgaatgygtttyggaaagagtygygagttygggygtygttyggygtyggggttttyggtttgggaagtagttttyggygggttggtgggttttgtygggygtattygtygaggggttgttgttggggtttagttttygttagyggttagttgtgagatayggggttttttttatggatygagtggttaggtttagagattyggttyggaggggttagtyggagattagagtgagyggtyggtggtggaaggggagtyggttttttgggatttttgttttgttgggataaagttttgtatttgtagtttttattttttgygygggtataygtttttgtttttgtygttttgtggaggtygagttygtayggygttttygtgtagttagyggttagtgatygygyggttygggygtttttygygygttttagttttttagayggggttyggaygyggaygttttttttgtagttttgttttgatygttagggatgggttttgggtatttagyggttgagggtggggagyggttagygtttgatgtttagttttttaaatttttattatgttgggagyggagggaygygaaagtygtgtygttagtgtgygygatyggtgtatagtttaatttgaggatagttggtttygygattatygtagttagaygttttagtagttyggttyggtayggagygyggtaaagttggtgygggtatyggggaagtttygtygygtttttaygtggttgttaygyggggygtygtttttygggttttgggagggtaggtgattaygtygggagtttaygggtttygttattagttgttttagtttttgygtttgtttttttttttttaggttygagtaggttgtggygtttygtygggatttttttygygtttggttyggttaggaggttgagaagtygyggygtttgyggttggttgtttyggttttgygggagyggttgaggygggagtttaggtagtygaggggtttgatttttgygttttaygttttagttttaattygtttttgtttttatggtaatagatygaggtgtygt

SEQ ID NO: 7108 - DNA, 1050 bp, Artificial Sequence
  Description of Artificial Sequence: Synthetic polynucleotide
ygggygggtagttgyggttgttgaggttyggtggggtttttttaagaygygtgttygtatttgttygtygggygtttgyggggtgtagygtttattggagygygatagtttttgggatagaggaggatagtggtttygtttttttgtgygatygtttaggagtttygggtyggagagtgygagyggggaaaaggggttttgtatttagagtggggyggaygtggygaggaagttaggggggatygggaagygaggttygyggtgyggagggygyggggygtggggggatatttttyggagagatatyggaggggyggaagtaaggagatggaaaggagagggagatyggggagatagatttgagagatttagaggtttgtagagagttttattygggattttttagagtttaggaaagagtagatgyggaygygggagggygttttaygttaaagygggtagtattagtgattaaaataygtttygtttggtagtttygggaygtatttttgtttyggtagygtaggagaggtttggatagygygagatgttagggtttaggttgtttttagagggttggttygaagygttggagtttaaagaygttttttatygtygtygggtggtagaattgggggtaggygygttttatagatttygaggggtggtttygttttagggtygyggggaggygttttygtgyggggyggagttgttatygttttttttttaattttyggggattgtggtttttttttaagttygyggygtttttagttgttttttattygtttygttygttagtttttttttygygygatggtttyggygttgagttatgtttttaagtttaagtttttygtgattttgttygttatttygtttttgttgttgttattygttattttgatgttygttaaggttagttgtatttttaggtagtttttyggatattyggygttttgtgtttattaaygggtatygatttygggagttttgagttggagygtayggatttygyggggagtatagttttttyggggygygygt

SEQ ID NO: 7109 - DNA, 1731 bp, Artificial Sequence
  Description of Artificial Sequence: Synthetic polynucleotide
yggtyggttttagttgttatttaggtaatttyggagtygtygtagatatyggatttattggaagggggygaagtygyggggaggaatgggggatattggggaaggggygtygtttttgtygttttygttttttttagtgttattgggyggttgttgyggagttygygttattttttttttattttatttygttygtttggtttygtttggtygttggttygygtttygttgygttygttygggggttggttyggttygggtttttgaygttattagtaagtttgttgttttyggygttttaygtgtggyggyggttagyggyggtttaggaggtagtyggtgagygtttgygagtagagtggygggggtygttgataggtttygygtagtttagtttagtttagttaygyggtttataggtggggtttaagagtagtttggagtaattyggygttayggagaggggtggayggttttgtaygggttttttgtttttygttygggtagagggattyggggggatttygttttttggttgagagaatttgaattygggyggagagaaygygtttaggygggtaaggggattagagaaagtyggggttggaagttattgtygttygttattgtttggagygtayggagygtagaggttyggtagtygygygtgtttttayggggatygagttagtgatgtaggatygttgagyggagattygygtygagaagtttttyggggtyggggttgagaygtaygttttygatatygttgttaagatttygatttyggygatttttgyggggaatygaggggttaaggttgttttaagtttaggatttgggygagtttaagaygatggttttttaagtayggattygygttttttttttygttttttygattggaggtagggattttgygyggggttttygggatttygttttttygyggagtttyggtygttgtttttygggatagttygtayggttataggggygtayggygatgtggttttygtttagygygttggttygtyggggggatgttttggtatttgtyggggtttaggtttagtatggtyggygygttgttygaygtygttttyggttaggatggttttttygggttyggttagtgttttttttatttyggtygagtygttgtttygtagtatttttyggaagtttttgttgatgttttgttttttgtttaygtttttttaygttttttattgtttggtygagygttgttagattttgttyggtttygtygtggggttgttyggyggyggygaggaggygggggtttttggtggyggygttttggtyggaggttygagggagttggyggtgtggtyggyggyggtatagagaaagygttttttgtaattgtygtagtggyggaggygtyggtygttygygtttygygaygayggygaggaggyggtttgggaagaagagttttttggtttgttagggggttygggyggtttyggggtyggaagtatygtggtygaggtttygtyggggattttggygttgtttttggaygaaggtagtaagtagttgtygtaggttattattatyggagtgaagaagggyggtaygygggygttgttggagtttttgygygtgtatttygaygtgygygtygtgggygtygagttttattttttygatygtagttaygataagggtttygtttggtatyggtgagyggggygggttygg

SEQ ID NO: 7110 - DNA, 3535 bp, Artificial Sequence
  Description of Artificial Sequence: Synthetic polynucleotide
yggtygygttaggagttgttggtgtagtttaggaaygtagtgtttggggttagttgyggtatttatagtgggttttttyggtagttygattygtygggttatygtttygggttttgtgttttttggattygggagttttgtttgttagtttagggagatggttygggaggaygaagaatttttygtttttygyggtttagttaagtttttgyggtygttygggtttagtygttatgygtggtygttygtagygtagttttygggygtaagtyggtagtygaatttttygggttgygttgttygttgtaggygygyggygagggtttttaygygatttygttttttatttagygttttttagttaattaaaaagaaygtggtaggtggagggtagtygtttaagagattgygtgagtttttttgtggggatttttatagtttgttttaggtgttttaaaatygtttgatattaagggtttagttttttttttgttagttttttttaattyggtttaagtgtgtttgattttagaaaattttaggttgtttyggggttttggygggttttatttggaagggygttagttatagtttgtygtttggttttggaattattattttaggaggagggggagtggtggtggtagaagttataataatataatyggtgataatagttaaygattagagaggtttttaygtgtttgygaggtattttatygtattagygtatttattttttttatttttgtttagaatttgtattatttttattgtatagatgagagtattaaggtttaygygattagttaggaygtgaatttaggygtyggattttagagattttatttttatttattagtgtttygagaatgggttatagttygggaayggtgggaaagatgattgttayggttggttaaatttygagatttgggtaatttttgataataataaaaaattattaaggataaaggggaaggggtaggaygaggttgggaagggagtygttttaattygyggggttagtttttttttattttttaatttatttaggtttygatagtggggtgggtatagggagaggggtttagttattttttttttttttgtttttttaagttttgagygtttgtgaagttaattgggtttggaggggtgtttgaatgtygtgttggttggggttaygggtggagattttaaygaaaatgtgggggtygttatttgggtttttagtygaagatagttatyggaggtygaaatttagattttttgtttattygygttttattygaagttygggtaatttaatagtttattttaaagattagtagttgyggaaagtagtgggtagaggtagtgattgtgatttyggggttattgtttttttggaatttgattygtaattygattygagaatagaattttyggaagtygygatttygaagtaatttttattttttaattaatgggtttygaatattttttgtttyggaygtgtaaaagtttygyggagataygygtttttgttttttttattttagtatygagggtagggaggyggaaaygggyggyggtgttyggaggttyggaygtttttaaagtttygygtygttttagtyggttgtagtgygygtttttgttygatagggattagtatagttttaygtttygygygtygttygttygttaggyggaggygtygggttattygttyggtttattttttygagtttaggyggttygygagygaggygggtttgatatttttggggtttyggtaattaggyggattgtaataaaaagttaatagattttgyggtttygtygggaygtygyggtttttattttttttttttatttgggaagtagaagttgttttagaagttttttgagggyggagatygattaaaggggtttagaatatttttagygtttygggtttygggaggaaaaaatttaaaaygagttataaaataygattygagtyggatatttttatggttagagggtggttygttttgttgagggyggttttagtygttgttttttttttttgyggygaggtygtttgatgaatttaagggtattagtgtttygygagaattttttgtgggttgtgaygagaattaagyggagygtaatttttatygtattyggataggatgygttgygtaatttgtygtagtttttttgttttatttygggtggttygaagttgtaattttgttaattttttattataygttatgttttttttagtttagggtttgaatygaygatggagattttgtttttggtagggaaatttatyggtattaagygaggtttttgtygtagttgygatygaagaaatggggttyggygtttayggygygtaygtyggggtgtaygygtagaaattttagtagygttygygtgtygtttttttttaygtygatgatgatggtttgyggtagttgtttgtttttagatttattgaaaaagttggagatggggtttggggagttyggtatttygggattttgttttttygggttygtagygttttyggttatttttttgtttgaagttagtggggtggttggyggygttyggaayggtagtttggggggygtttygttyggagttgtggttagggttggygggtygtgtgyggygygggatttagagtttaggagtagtagtttyggygyggyggygtaggagtyggygtaygagtataggaatatatagagttagaygtagagtatggygaagagtagygygagttttttttttatyggyggygggggyggyggyggttgyggtaggagtyggtyggggatatygaggtaagatttgtygttatttaggygttgttttatgygttgttygygggygyggttagggatatggtttagtatatggygtgggtttygtygggtagtgagygtagagagggtttttyggtaygttggaygttygggtggttyggtttattgttttygtgtgttygyggtygtygttgttgttgttgtttttttttaggtggyggyggtagttgtagyggyggyggtttttgatatgttgttyggtaggagttgtaattggaayggaaagtygggayggyggtaattgttgggygagggtttgttttyggggygygaygaygygttyggggttaggaggaygttgtattttygygttttggttattttagattgtgygtatygtygtaygtyggggttgtttttttgtagttttaagaattgagtttygagtagtttyggtattttttygtagaggttgtagaggygaattgygtaggaagagagttgtggatygaggtggagtgggyggtttyggttttttagagtgaygggttgttttatttattaaaaatttygaaygttatgtaaatataggygttttttygagagtttagtagttaattygtttttaggaygagggggtgtggaaaggtttttgggyggtgtagggyggttaggggttgttattggtttyggaataaggggygggtttaaaggggygg

SEQ ID NO: 7111 - DNA, 2896 bp, Artificial Sequence
  Description of Artificial Sequence: Synthetic polynucleotide
ygattttyggtygygaatttaagtttgtygttttygtygygtttattttttagttttttttttgtttyggygttattttaggtygaygtttttaattaaaataagttttttttttaggagttttttttttttgttygaggtttagggttagtagttttaggagggattttttttttattttatttttttyggtagaggtgygagattttattgttagtttggttattygatygygygtgagattggggygtagggtaggggggttattgggtaggttttygtgyggggagtggggaggggtttttaggggaagtgtttgaagttatttttgtagttttgtttagattyggaagtygtygaggaagggaggaaggygggggtggggagagygygattttaagygttggygggyggygaggaggggtygtagyggttygaggaagygtttggaggygttaggggygtygagtttttagggaggtygygttttygggaagttttttatyggttgttyggagtaggatyggaygygyggatygtttttttyggttygattagtttyggggygtagattgygaatttgaatagaattttttttttttttggtatttttygtttttttattygtggttattagtttygttattttagttttatgtttttygttaatattatattygttaagatygtttattaatgttttgtggaggaaaggggaggggggaatttttagtataattaaattgtggttaaaagyggttaaaaaaaaaaaaaaaaaaaggaaagaaagaaatttttttttttgagatygatttttttaattagygtggaaaatttttaaatatgtaaattygtaattttagttaagattttggygtygygggaggggtgttygyggygggyggygattttagtttgtagtttyggatttygggtaggtttgygygyggyggygggtygggggttyggggagttttggygtttatagtagttygtygaaaatataaagtttygtygttaataatatttgygggttttttttgggtttttygggygtyggygttgygygtttygtygtttttttttttttygtygttttttttttttygygtaygttttttttttygttttttttagaaygyggtggttagatgagatttttgggagaaataaatgtgagygttygtaygaattttttttttygttagtygtttgtaayggttttaggttygtttttttttttygygttttygygygygtygygtttttygygtttygygttttttttttagtagtttttgygagygtttttagtagttattatttataggtygtygggggttaggaggtaattagagayggtttygtggtygtatttattyggtaagygygatgttggygyggggygygygyggggaggggygygygatgagggggtttggttgygygtagttygygttttagatttgggggaagggaggaggaggagggggtagggaaggaggaggygggygggggggygagagatgagttygggaagggagygggaggagggggygtyggggagaygtttttttggtttttatygyggggtttyggggttattygttgygaggtttygaygygtttagggayggggggtgtgagtgtaagagtgygygygygygtaggygtgtgtatgttaaagatagaggaggggagggagggaaygttttaatatttttttagtgatttaygagtttgygggtgaggttttggttgtgygtttaggttygtgtgtgtattaatgtggttgtatatttttggtttgttttaygagtgaatgttayggggtttgggggggggggtttggatataagttagtgaatgtgtttttgggttttagtttgattgaatgatgtggygttgygtggggttgtgtttgtgygattgtttataggggggttgtgtgatttygtgaggtattgygtgggtgggattgygtttgtgtgyggttgtgtgtatatgggattgtgtttgygtggggttgagtgtttagagggtagttgtgtggttatgtgggtttgtttgygagtgggttggtgggtgtgtggggtygtggggttgygtatgtaggggtagtgygtttgtayggggttttgggttaatttaaagggttgtggtgggtatttgtaggyggttgygtgtgtggttggatttgygtggggtttgaggtttggygggtgggggttagtttttttggygtyggggatygtatygyggtagaagagtygtttaaggygttaataggtagygtyggggtygyggygtagygygaygtgtagtagyggtggggygtagagagaaggyggagaagaggggggtttttatygygygttttttttagtygtattagagaygtagtttggagattttgtygtttgtyggtttygyggttttagaagtatagggtttgggggattttttttagttgggggagaygtttattggtygggaaggtagygagaattgagattygatgattttggygtagtatagaagtatgyggtaaggatygttaggagaggtgggtygyggttyggagatagtygagaattaggtygagataaagaagagygggatyggggattttggggttaaatygygtttttaggtttttyggyggtygaggggagygtatttaaggtyggygygtggagtttggyggaggtggygygggttttttttygttgtagttttagtagtygttttagagttttgggggtaygtaattaggygttatagggtagggttayggtgaggggggttttgagtgtagttggygggygtygagtttyggggttgtgattgagygtttagttggttygtttttttttyggtygtttatygtttaygt

SEQ ID NO: 7112 - DNA, 2567 bp, Artificial Sequence
  Description of Artificial Sequence: Synthetic polynucleotide
cgtttttaacgcgggagcgtagtgtattttagtggataaattcgagaatcgtacgttgtttttcgtttttatttttgtttttttcgttcgcggttttaattcgggatttaaatgtacgagttcggtgaatgtttcggtaggagggcgagggtttagaggtagtttgtttagtaaaaacgatagttgtgttttggtgggttttgggttattttaggtagaagttagagaagttcgagaatttcggcgggttggtaaagtttgtcgagaagggtttttttggatatttttattacgggttttaggttcgaatttttttttttatttggttttggagttttagatatagataagtttcgggcgcgtcggcgggcgtatgtgcgtgtgtgtttatagcggggtggtcgtcggagttttttaagaattttagttttttcgttttagttgttcgttagttgtgagcgttcgtcgggttcggaggttattcgtaaatagttgggtcggtagttgggagtttgggaggtttttgtttagtttcggggtttcgagaaaggagaagggggagcggagtggttgtttggttgtggttttttttaatttcgtttgcgaagttttcgttgggagttcggagttttagtttttttcggtagtttcggttttcgcgttcgtcgcgtttagcggtcggcgtttcgtttcgggtttcggggaggaggcgcgtcggggtagtcggttaggatattgcgttgttggtttttagagttgcgggcgcgtttggtcggttttatttttcgggttgttggggcgggcgtcgttgtttcgatttcggacgcgcggaattttggagattcggtcgtttttcgttagggtcgcggtgttgttttaggtttcgggcgggcgttttttttcggttatcggtgtatttcgttgttcgtttgcgggaagcgaagaggggttttttgatttgtaatatagaggaaagcgtcgttttcgtttagtttggtatttacgcgtttatacgtattcggcgtcggtcgggtcgtttatttgagttttaaaagttgttgaatttatatggttacgtttcggggagcggggttttagatttggttcgtttaggttatttgcgcggcgttcgcgttcgttcgttttcgtttcgcggcgtcggttttcggttttcggttcgtcgtttttcgtcgttcgtcggtcgcggggcgtatagcgagttagagcgcggtcgcgcggggttttatgtcggtcggcgcgtcgtcgtcgttggggcgtatggtttaggttgggcggttcgcgggggcgtatatttttcggtcggggcgcggggttcgcggtttttttcgtcggcggtatagcgaaggcggtagcgaggcggggcgtgtttcggcgttgtcgcggcgtagtaaagggttggggagtcgcggtttcgtttttcggggcggcgaggagggaggtcggcggcgttgtcgtttacggtgcgtgtttttcggcgcgcggtttttgtttttagtcggagtttcgcgtcgatggggcggcgttgtttagggtttggggtgacgcgacgcggacggacgcgagtttttttcgcgttgtcgggtcggggggttttgttagaggtttcgtcgtcgatcggcgttatttaagttgttcgggggtttcgtttgagcgttcgttttgtagacggtcgcggttcggagattggtaggaggcgggtacgagaggcgcgcggggcgagggcgtcgtggagcgcggggcgtggggacgcgcggcggcggcgtcgcgcggaggaggcgcgcggggatttcggggtttcgtcgttcgcgtttatcgcgttcgtcgtagagtcgttcgcgttgtttagtcgttttttttttcgcgtttgttttttcgcgcgttcgttttcgtttttcggagtcggttttaatttcgttcgttcggttcggtttacgttattcgtttttttcgtttttcgaacgggagttcgagtttttggtttggtttcggtttttgttcgtcgttttattttgcgggggtcggggtcgtcgcgggtggtggggggcgttgtgtttagtaggggcgatagcgtaggcggggttttttgtagtttttttttttattttcggtcgcgtttcggtttttattttgcgaaaggttcgagagaggtcgtaggttaggattggatcgtcgggcgtcgtcggatggtgttgttagggtaatcggatggtacgcgaagtcgttcgaggtttcgattcggttacgggggcgtttagtggattcggagagttattttggggagggggcggtttcgaagaaggattgggtgggggcgtatggagcgggggttgcgcgaaaagttttttggggcggagttgagttacgcgggtcgcgtaggagcgtttgttcgagggtcgtttacgagggatttttttgttcggttgcgcgggtttttgcgttgatgaagttatcgcgtttcgggtcggagtttcggcgtttttgtttcgaatttagcgaagttcggttttatgtttttaattatttaacggttttttatcgtttagcgt

SEQ ID NO: 7113 - DNA, 573 bp, Artificial Sequence
  Description of Artificial Sequence: Synthetic polynucleotide
cgttgttcgtcgggtcggtggcgtttatttcgtatcgcgttgtttcgttcggggtattatggtttggggttggattatgttttttttattttagtcggcgttttttatttacgcgcgttgagggtgcggtgagttgagtgcggggttaagtatgttttggcgtcgatttcgtttaggggtttaggatttggcgtttaaggggttttttggcgacggagattttcgacgtagtagcgattcgcggttgtttaagttgatttcgttcgcgtttcgagcggttttgggcgcgcggggtttcggggattggaggatttcggggggcggcgtcgcgtggtggtcggaaggggacgttaagttcggggtgggcgtcggacgtttttcgtcgcgtttgttcgttttgtttatcgcgattcggcgggtcgtgcggaagcgggggttgttgcggtttttgttgtcgttttttttgttgtcggtcggcgcgtttcgggaatcggcgtttaggtagttagggtttggagagcgcgagcgttttcggaggcgcgtggttagggaggatttcgattttttgggcgt

SEQ ID NO: 7114 - DNA, 383 bp, Artificial Sequence
  Description of Artificial Sequence: Synthetic polynucleotide
cgttcgtcggtttttataggggcgaaattaggtatttatcgtgacggcgagcgtgatagcgttcggttcgattttgtttagatgtttatagaagatggagttgacgaggttgattataaagattattaattgcgtaagaaattgcggaggcgcggaaagtaaggcgcgtttatagtcgtttttttttttggaagttcgcgtttatttttgcgcggcggtcgtttcggaggcgtcgggttgggcgtgaggacgtcgtatttattattgggttcgcgagcgtcgttagtttagtcgttttttttcgtaggttcgggggtagcgtatttcgtaggttttataagtcgttacgttattcgagggttcggagtcgttatgggggtcgg

SEQ ID NO: 7115 - DNA, 853 bp, Artificial Sequence
  Description of Artificial Sequence: Synthetic polynucleotide
cggcgcggggtgaggttcgggggtcgttttattgttgaggttcggtcggttggggtcgtcgttaggcgcgttggttgggtagtttttgggagatgaagcgacgtaggcgttttaggtattggttgtagagttcgatgtcgttgtgttcggcgttttttatttatagcggttttatcgttttggggtagcgttcgtagagcgttagttcgtgcgagaagtcgattatttcgtttttcgtgtcgtggatgatgagtacgggcgacgtgatttaggatattttttcgatgttgcgggaggggcgtggagcgggtgagatttagcgttcggttcgggtttcgtttcgttttcgttttcgtttcgttttcgttttcgtttgggtcgtttatttagggaaggcgtcgaagtagtaggtcgttttggtgttagggaaggcgacgcgtatgttcgaggtgagcggcgagtgtagtattatcgcggtatattcgtagcgcgaggttaggtttacggtgggtatcgtgtcgatgttttgtcggtataggatgatgttgttcgggttgatgtcgtatttggtagcgtcggagtagggttagtcgcggttttcgacgcgcgtatattttttttattagcgggcgttttcgggtttagtttcggatgcgattttttagtttttttatttagttaagttagtgggttaggtttaggttttatattagtttcgagggttatttttagtttttaatatcgcggcggtgggcgaagttagcggtttcgtttcgttttttgcgttgtcgtttattggcgttttttagttaggatttgtagggatttcgtttacggagtgtttttggggcgg

SEQ ID NO: 7116 - DNA, 1062 bp, Artificial Sequence
  Description of Artificial Sequence: Synthetic polynucleotide
cgaggaaggaaggtgggcgtagaagttattttaggcgtgacgcgtgacgttcggggtacgggcgtcggggggcggaaagcgagggttcggttgggttagggatattcggggggggtcgaggttttgggtttcggcggagggaggggattgggagggaggttatcgtttcgggttacgcgggtgattcggcgggggagttgggggaggggcggcggggttgggttggggttttcgggtcgggattggggtcgggttagtttattttttcgttttggtcgaagcgtagttcgagcgtcgcgacgcgttttacgcgtaggaagtcgtcggggtcgcggtcgtatatttcgaatatttcgcgtaggcggcgtacggagcgtagtagagtcgcgggggcgttcgattagttcgcgtcgttcgttattcgggtcggttcgtagtttagttcggatttttcgttcgtcgcgttcgtcgtttgttcgtcgtcgttatcgtcgcgcgtttttcggggtcgttcgtttgggtttgcgtcgcgtagttttcgttcggtggcggtcgcggtcgattcgtgttagtagcggcgtcgtagttttagtcgttttggaggggaagggaggggaggggagggaaggagaagagtggggaggggaaggaggaggggtaatagggggcggggaggggaggggcgggggtcgcggcgaaaatgggagggagagggggaggcggcgggggcggcggcggcggggacgttgtagataaaaggagttcgcgttttttcgagtggggcggtttacgcggggtcggtaggcgtagcgagttgttaacggtcgcgtttttcgcgattttagttttttttcgcgtttttagttttttttcgcgttttcgagtttatttttttttttggatattcggagttatttaaaggttttgttttgtcggaggatttcgcggggtcgcgttttttttcgttattcgtgttcgttgtcgcgtttggcgtttttcgagcgtttaggatgttttgggggttttttgtattggcgcgtttcgtgattgtatttatttcgg

SEQ ID NO: 7117 - DNA, 918 bp, Artificial Sequence
  Description of Artificial Sequence: Synthetic polynucleotide
cgcgaagttttcgcggcggagagcgttgcgcggggagataaagggaagggatagggatcgtagggatagggataggagcggttgtcgggttttgggttttcgatcgttattagatatgttttcgagtagtcgaggtaaagggaacggatgggaaaggaaaatagaggagcggtttagaagggcggttcgttgcggtggtggggcgcggattcgggaattcggggcgggtagggtacgggcgtattttttttttttttttttttcgttcgaggtcggtagcgtttttcgtttcgcgttatgtatatttattgtggtgatgagagttcgcgtttcgtgttcgttacggttattgtgcgtttaataaaaataaatattgtcgaggagtcgtcgcgatgcggggcggacgcgcggttcggaaaggggagggggttttaggaagagttatattcgcgagtcgggtttgggttaggggcgaggggagagcgttaagattgtttcgtcgtcgagggcgtcgatggaggtataggggttttcgtggggcgtttcgagagatatcgtgtttggtcggcgggacgtgggttggttttttattcgacggagagaagcggtatttttattttcgggtatcgggtttgggtttcgagcgggggtttttggaatataaggtagtgggggtagacgggtttgggtttattttaggttgggaaggggtttgagcggggcgttttgattggattcggttttggcggatcgaaggttttaaaagattttgtatttttaaagatttttgtagatcgttatcgtttaaggcgttttaggttcggttttatttatgggaagggtaggaaagaaagttgggagcgttttggggcgcggggtagagatagcggtgttggaggcgcgttgtggaggcggcgg

SEQ ID NO: 7118 - DNA, 865 bp, Artificial Sequence
  Description of Artificial Sequence: Synthetic polynucleotide
cgagttgtgtcggttttcgcgttttttttattttttttttttttcggattttcgttttttcgcggagaggttttgtcgttttaagagtcgggttagcgattgataagtaataaacgttgagcgttcggttgcgttggagtcgttcggagttaggggtttttcggggcgtaggtaggcgtttttcggttttcgggttagtttttattttaagattttcgtttttttttcgttttgatacggtatttaggattttatttattgggtttaaattttataggttttttttatttaggttcgttttttttttgtttattcgttttcgtttttgggttttttttttggggtgttggttgggagaattaagtttcgttgtttattgatattggttttcgtttttgcggtaggggttttaaagtggttttaggtattaaggtggtgagttgtgaggggtttcggtatttgcgcggttttttcgggggttgtgcgggttgggggtatttagaagttcggtattacgtaagaatcgtgttgttagcgttttcgggggttggggagcgagatagaggttgcgttgggtttcggtggttttttggtttttttaggtagttaatattataattttttttgggagggggttcgtagaagggcgcgcgttgtttttttcgttttttaagttgtagcggggcgggtcgggagttagggttagggtttggagatttgggaggggatcggtgttagaagcgaagagttagggttagaaagttaggttaattaaggggggggcggtgcggataaagacggggtgggggttggtcggggtagttatttagtgattttatttttggttttcggcgggcgcgtacgt

SEQ ID NO: 7119 - DNA, 408 bp, Artificial Sequence
  Description of Artificial Sequence: Synthetic polynucleotide
cgaagcggggagaattcggttgggttgacggagacgttatatcgcgttaggggagtaggagttttttcggagcgggaggcggggcgtcgtgtggttgcgagcgcgttttttggatgtttcggtcggcgcgggggtgggtgggcgttttcgttttatttttggtttcgggcggttagtcgcggtgtgttcggagggttttgcgagggttgtgggtggcgggcgagttttagcggcgtagtagaggaggggttttcgagcgagcgtattagggagaagggggttcgtgtaaattttaggttgacgatcgcgtacgcgtttttcgggttattagttttgtcgtttttggtggggtatatcgaggagatcgtcgtggggaatcggggatcggattgtttgatagtcgagcgt

SEQ ID NO: 7120 - DNA, 2245 bp, Artificial Sequence
  Description of Artificial Sequence: Synthetic polynucleotide
cggattttgcggagtttcgagtttcgggtgaggcgatgtttagattggcgcgaagcggggtgtttcggtagtagcgtagaggtttattcgttttttcggtcggttgtagcgggcgcgtttatattttgtaaaattaaaacgttttggaaagcgtttggggttgtaagtgacgtttgatacgagcggcgggtcggattgtcggtttttcggtttttttttggtttatataattcgcgggtcgtttttatcgtttacgaattttagcgggtagacgttggacgtgcggtttggttatttttttaaattttagcgttcgattcgcgtcgtagggtcggtcgcgtagcgcggggatcgcgggtgtttaggttcggagaacgagcgtcgcgtttttagtcgcggtcggggaataggaattgtcgttagaggtatcgttttttttttcgagattgcgatattgattaagggttcgtaggcgcgggcggtatttattttttcggattcgtagttcgtcgcggaggggaaggggtaggacgcgtttttaagattagggcgggggcgtgcggagtcggggagttgtttgggggcgttggggcgaggtgggaatttcgttttagagtttttagtttcggggtcgaggtttgtaggaagggcgtgggaggtggaatttttttttttttaggcgtttgttcgagagtttagagcgatttttggcgcggagtcggttattcgggtgggcggattttttttttcgttaatatttcggcggtttcgttacgatttttttttttatttgagtttttttttgtttatttaattttggttttaaaggtttagagagttaggttgtttcggagtttagtttttttcgatttaagtacggtttttttagcgttttcgtttttattatatttatagtttagtttcgtttcgcgttcgttaggggtcgggggcgttagcgttcgagggatggtcggcgggttgttattttgacgagacggagttgcgggtgtttttttattttcgggttcgttcggttatcgttttgaatgttcgggttttacggatattttagagggatcggcgggcggttgcgggttcgggcggtacggggtgggcggtcgggtttttcggtcgttgtttggtgaggagatgttcggttcggcgtttttcggtttcgcggttcggttcggttcggttcggttttcgttcgttttttttcggggaagtttggtcgtcgtttttcgacgtagttcggttcgcggtcgttttttgtcggtttcgttttcgttattttttttacggttcgcgtcgtttttcgtttcggtttttcgttttttcgtttagttcgtttttttttttttttttttttttttttttttttcgttttttttcggtttttttttcgcgtttcgtttttcggtttttttttagttttttttcgtttttttcgttttttttttttttttcggttcgttttttgtgtttcgtcgttaggattttttttttttgcgttcggggtttgcggtagttttcggggcgcgttggtagtagtggcggtcgtcgtagttcggggagaagtcgggaatgggggaagggggtcgcggtaaaggattagtttttcgttcggtcgaggtcggggtttgggaagttttagggatttggggtgatttgggttagggtgtttaggtgaatttatgagggcgaggttattgggggttagggaatagggcggtttttattgagcggagtcgtcgcggaatttagtgaggttgcgatttgcgtttgggtagttttcgttttgcggttggttaggaggagtttttcgtcgtttttattttagtcgcgtcgggcgttgggttcgatttttagtatttttggtattgatgtgtttggtgcgcgttgagacgcgaacgttttgtaagatgagtttttatttattcgtttttttttttttttatttgtttattttataaattgagtgtttggttattttggtttaggtaagaggttggatttgggaattttttggatttgggagttttaggatgaaagggagacggcggtgttttgtaggataagcgggtattgaacgttgtttaggggaaagtcgggcgcgtattgcgttgtagcgcggcgaacgttgttaggagttcgcgggtagggcgtggggaggatatagcgttttttttcggtcggtcgagttttttgggtagcggtgggttttttcgttagatttcggggtcgt

SEQ ID NO: 7121 - DNA, 2972 bp, Artificial Sequence
  Description of Artificial Sequence: Synthetic polynucleotide
cgattattttcgtttttttacgcggttttttagggaagaagcgaggcgtttgagttagattgggttggaatagtgcggtaggggttcgtttttcgcggagttgtttttttatttattatttatttagtttagttcggtcgtttacgtacgtttatttgttgttttcgttttatttttattaggcgtattagttagttcggcggttttggttatagacgtttgaatgataaagtgtttttattatcggcgcggttcgttagtcgattcgtcgggacgcgttttggttttagtttttttttttttatcgcggtttaggaagaaattcggatcgcgtatagttattttagatcgagtagtcgcgcgtcgaggcggaggcgggagtcgtaggggttgtagacggtaggtttttgtcggggtatatttttttaagcgtttaggttttttacgtttagtttttttttttttttgggttttcgcgcggggattttcgtttttgtttagattcggagtttaagtcgttgtttttttgggattcggtttttttttttcgtttttttggtttacgttcgtttattcgcgtttgagtagcgtttttaattagcggcgttagttagtagacgtgttcgcggtcgtttttaaattttcggacgtagttataggttttgatagttttagggaattggggttgagttttcgggttggggttcgtattcggatagaatttttgtttattttattcgtaggttttatcgtcgacggattttggggatagtgttaatttttttcgttttgttgggaaacgtagtcgtgatttcgagttgggatagcggttgttttttgaaaaggtgggggagtatcgagttgggaattaggtcggggagtttagttacgattttggtttaatttgttgtgagattttggttaagtcgtttaaatttttagagttttagttttcgtatttgtaaagtcggaatttggggcgtagtgttttgatgaaagatgttggcggggagagtgaagacgtttttttcgttgttagattttttagggtattcggtttatggttataaagtaggttatatttgataatttcgtcggattattcggaggattcgtcgatttttgtcgagtcggtggttcgggatatcgcgttatagaattcgaggcgttcgggcgttttcgtttcgttaggtgtttagcggtttgtatcgagagttaggagaggtttagatcggatttcgatttttcgaggcgcgggagtttacggagcgcggtgggcgcggcgttcgggtcgcgtagttaggtggggagcggcgcgtagttttagattcgtaggtaggtagcggcggattgtatttgtttcgtttcgtagcgttttttgtttgtcgtttttcgtttgcgtagttagagttgcgcgcggttaggaagggttttcgtttagtgcgtttcggcgttttgtatttcgagacgtagttatcgttagttcgggtaggggtatattcgtttcgtttttcgcgattcgttgcgttgttttaagtcgtgagaatacgcgcgtcggaggagttcgtcggtcgtgggggaatttcgggagcgggttcgtttcggcgaagtgggtattttttttttagttttagattcgtagttttaatttcgggattgggagaggtcgcgagtaggagcgcggggataggcgttggaaatgtttaagtttttgtttttttttttcgttttattgttttttagcgggtaggcgggatttcgattattttagggttcgcgtttcgttttgttttttttttttttgtttttatttttttgtcgttttcgtcgtcgttttttttttgttttttttaatttattttttaatttttttttcgttttttaattttttttttcgacgttttttttttttattgtttggtcggtttttattgtttttgtcgggttttttttgtttttagttttttcgattttttttattgttttatttcgtcgtttcgggtttttcgttttagtttagttcgttttttttatttttagttttcgtttagttttttttttttttttcgttttggttttgttttacgattttttagagatcgagatgttgaggggaaagttttttcgggatttcggtattcgagtgttttttttcgaagaatttgggtatcggagagttttatgtttttttttgaaagattttttttagtttttttatcgttttttgcggtatttgaggatcggtattcgtgtttcggttttgtttttatttttattttggagagtcgtttttgcgtttcgggaattttagattttttttcgtggtttcggtattagaggtttttttttattatttatttttagtatttgggattttaatgttttgttttgtttttttggtggcggcgttcggtttttttcggagttttgatttcgggaaagggagcgggtttttttcggttaatatttatttttagaagtagtaatagtagtaggcgcggttcgtttatggcgcggtcggtggtatttgtttttatcgttcgtttttcgcggtagcgttcgatttttagttcggttcgttttgcggattgatggggttgcgttgcgttgcgttttagcgttttttttgttcgtcggagttggtcgcggttcggttcgttttggttgcgggcgggagaggttgggtgaagttagtgttgcggtttcgttttcgtttcgtttagttcgtttattttcggaatcgcgttcgttcgttttgtcgtttcggggtgggaagtagaggtaaagggagggcgtgcggtttttcgtatttcgttgcgtttttttttgttttgttttttagagttttttatttatttcgttttggtatttagttttcggttcgcgttattgcgcgttcgtttcggatgttgtgggttcggggattagggcgtttttattgcggtttttgttttttttcggttgcggttcgt

SEQ ID NO: 7122 - DNA, 1026 bp, Artificial Sequence
  Description of Artificial Sequence: Synthetic polynucleotide
cgatcgttcgggttcgagtagcgggggcgtttttagcggcggtaggcgcgggtgcgggggagaggagtagaaaagagagtagtttgaggggtcgagggagtcgcgttcgaggtcggcgcggtggggatcgcgggtttattattagttaagtttagttatttaattatttgtagagttgttgtaggtataggtttaggttttcgttttttattttttcgcgggtgatgcgttttgatagcggtcgcgggagcgggggtaaaggcggtagttggggcggcggcggcggtacggtcgagtgtttcggggttgtcgtcgtcgtcgtcgcgtttttttttttttttttatttttaatcgtcgtttttttttcgggtttcgggttttgtttttggttttttttttttgtcgcggttatcgtggtcgtttttttttcgggtttttttatcgaagtttcggtcgttttagtttttattagtttaggttcgggttcgggttcggattcgggttcgggttcgggttcgggttcgggtttcggtttcggttcgtcgtcgtcgtacggttcgcgaaattcgtttaggaatagttttaggaagcgtcggtaagttttttttttagggatgtagtcggttatcgttgtttatgttttagggtagatcgggaaaggggttgggggaagtttaggaagggtaaggggttgtttttgagtttagggtttcggtaagggcggttaacggtcgtatcggtacgagcgattagtattaggttgtttggagagggttttcgtaggcgtgcgcgtcgtcgagtatcgacgtgcgcggttcgggggcggagcgcgtcgtttttttcggatttggagggaaagttggtggcgggcgcgcgtagggtttagcggcggtttattttttatttttacggagagtttagtttacgttgtttagagattgtcgttatggtaatcggttttaattaagtattgtagggtttttttcgtcgagttcgcggagtttaaaggatattttattcgttcgt

SEQ ID NO: 7123 - DNA, 10207 bp, Artificial Sequence
  Description of Artificial Sequence: Synthetic polynucleotide
cgttggtttcgtcgttagttttttgggttttttttttcgttggcgttgtcgcggggttataggttttatttgagatgttagtatgtgttgggagaggtggaacgggaagggcgcggcggtgtttgttgcgttggtcgcgggatttagttcgtttgcgtttagtttcgcggcggttttaggttcgttattttcgtcgttgtcgtcgtttgttatcgaggttagtaggtgatttatgtttatggcggagaaggcgttagggtttatggtgaattgtttagggtgtaggaagagcggttggtcggtttttagcggtttaaagaattgttgttcgtgtaagtggttggaaaaggttaggtcgggtaggtgttcggcgtttaggggggacgtattgtttgtttgtattattagcggcgttaggttttgttttttgttttcggtcgtttttttgcgtttttcgtttttttttcgagtttcggcgcgttttttttttaggttttttaggtcgaacgggtcgttttcgtcgttttcggtcggttttttgtttttttcgggattacgtcgttttcgggcgcgttcgggttcggttaagcgagtggggttggcgttgtttggagtcgggttgcggtttagcggcgttttcgtacgtttttcgtttaatcgtttaggtttcgggtcgttgttcgcggcgtacgatttttttttagttgcggggagagggcgcgcggattataggggtttgggcggaggtcgacgagtaggattagggatattcgggaagggttgttttcggggaggttgagtcggaggagttgttggagtcgggtaaagggtagttgtaggttatttaatttaagattttagatttatagtggaaggaatttagttttggagaggaaattttatagttatagaattatacggcgtttaaggggttaggttcggagttcggtcggattttttggttatcggggatcgttttcgtaggggagtttcgggacggaaattttattttagatattcgtcgacgttttttttttggttttttaggttagcgggtggtttagtaaaagattagtttagcgatttgaggatttttcgtcgttatttttttgtttttttttcggttcgatttttatttcgggttcggtgtaggcgtagcggattgggcgttgcgttcggggaggtgggtggttttcgcgcggggggagggtcgtacgacgaggcgtttgatttcgcgttatcgcgttcgggtttgtagtgtttttcgtataagcgtagagacggtagcgttagttgttttttggggatgagcggatgaattaggttagcggggagtttatttttttattttttttgttcgttgttttcgcgggtattcgttatagggttgttgttttcggttttttattttttttttcgtcggtcgttttcggtgtttcggaagtttttggtaaacgggttgttgtcgatttttagttgtgtgatttgcggggattaagggggcggcgttaagttaggtcgtggtttttttagcgtggtcggtggtatttcgaggttagcgggtgttggtcgtagagggaagattcggggagcgtttatttggtatttattcgtttgggatgggacgtttcgagttgaggtcggtgggagggtttcgcggaaagcgacggggtttgttttttaaaagttttattcgaggaattatttttagataggtttagatagttttatataggtttaaagtagtgttatagtgtcggaattagtttaagtatgtatattcgttcgcgggtttgcgtaagttaaacgatttcgtattcgagtaggcgcgaatagagattgtagtttatacgtaaggttgtaggtatatataaagttaaattatatttacgggttcgtatatacgtaagtgtgtatagatataataaacgtttacggaattaaacgaatttatatgtttttataggtatttaatatattttaaacggggtacgtatagtttagcgtatattttggtttataaagttataacgatcggtacggatattcgtatttttttttttattcgatagtggcgtataagggtataggtttagaggggtgatgttttgttttattagaataagggtggagaagtcgtaagtagaaaaagttttttgattggaaggtaattttttaagcgttttttaaggggtttggggtttagattgatttagagtagtagttaggagtgttttggggggttgtgttatttgttttattttttggtttttttcgagagagtgaaaattgggtttcgggttttgagtatcggtagagtttgggtagattgtttcgggcgttttttttttatttatatttttatttttgagttaagaaataaacgaataaaatgtaaaaatgttagcgcgggttcggagttttagttaattgttaagtaaatatttttattagaacgacggtttagttgttcgttcgttttaggggagtttgtgtgtgcgcgcggtgggattgagagggcgttttgaggattttcgtgagtgttgcgcgtatggatgcgaggttcggtgttcgggggcgggtcgtaagagcgcggatttcgtgtagggggtttcgaggggcgatgaacggacggttgggtttgtacgtgttgaggggcgttagtgtaggggtttagtttatcgttcgtcgcgcgtattttgttattttggtaggtagtgacggcgatgaagtcggttttcgggaatacgtaggtgcggaaggtgttgtaaggtagttttaggatgtcgttggttcgtattatgtggaagcgcggttggtatttgtgtatggagtttaggatggtttgcggggagggtgggggttagtcggtagttattagtttcggttcgagtttttttattttttgggtatttgatttttttttttttattttttttttttttttttttttttttttttttttttttttttttatcggtttttttttttttttatttttttttgtttttgttttttttttatttttattttttttttttttattttttttttcgtttttttttttttatagttttttttttttttgttattaaaaaaaattttttagttggaaatagaaatgagatagagtaaaaataaaataaaataaaaaataaaataaaaaaattaattaaaaaataatttttttttataaaagaaatttaaataaaataaaataaaatagagttttataattttatttttaatattttttttttttttggtattggtaaattttttaattttataaagaggagattttaattttcgggggtttattaattgttttattttagaatgggtagttttttttattttatgaaatattattttcgttcgttggggttttgtttaggtataaatggagagaatttttaaattttttttttttagttgggtatttgtttgtgggaggagggaaaggttttagggaggttgggggggtgggtggggagggtggtttaatttttaaattttttagttttgggggagggttagggacgcgggttttggtagaagggtgatggataagttgaggttatgggtaggttttttaagttcggtatttataggttaagagtagggtgattttcgtggtttagtattgtagatttagttttggtagtatttgtttttttattgacggtataagggattttttacggtttgaggaattgagattgtgagttgttagttattgattttattattttttaggtttgtaaaggagagcgttggggtttaggtttaggtttagtttacgtagattatagggtagtgattcgggtaggggtattttgggggtttgtttagcgtttttttttgggagattttgtcgttttgtttttttgtttagttgtagtgttgggttaataagtttttgtatcgtttttattttgttttaatatttacgaagtcgtgtttgttagagatgttgttggttagttttagtttgtggaaggttataggtttagttatttattgttttttcgtggttgggttgtttgggtggatgtatatgcgtttgggtattttagggtcggttttgttcgttattatttagcgcgagttgtggaatttatagcggtaatcgttagcggttataatgtttattagtaggatatatttggtttttttgtttaggtcgttgattcgtattttgaagggggggaatattcgtttgggagggagggaagggaggagattttattggaatcggttgttttaggttttaggattttattttttttttatttattttttttcgttgcgtatatcgttgtcgtttggttgttttttttgtggtcggttgttttgtttttttattattgttcggacgattttatttgtggttgttgtttttaggagattttatttttgtttgttagatttttttttaaatagttttttttaggttttgtgtttagatttggggattttttttttttttgatttgagatgaaagttgatgtttaggagagaagtttaggttttttagaaatattttcgtttttttttaattttttcgaaattcgtttaggggaaatatttatttgggacggaagtttttagaaataaatttggagggtgtttgtattgggaattgggttatagagtttgataagatattttggtcgtgtagttcgggggaagagggtgaattcgaggtttggattttcggtggttgagtcgaagggtggaggggtcggggttgtggttttttttaggttttaaggtttggggcggcggatgcgtttagggttcggatgttcgcggtggagaaagggtttttagttcggtgaggcggagggttcggttgattcggggttcgttgttaggaatcgagtaattagcgtggggttagttgggtttaggttttattaggggtttcggggtcggagtagagtttgagagaggttgaatttttttcgagttcggagacggattcggacgtagaagagcgagagcgcggggcggaggagatcgttagggttaagtcgcggggttttttttgcgttgggatttagaacggttggggttattttttagtagtatgttttcgttttattttattcggaggattttagcgtttttgttttaaaaaaaaatcgtttcggtgttaaacgagaaaagttaatttggttgttcgtgggagcgaagcgtggcgttagggttagaatttggagtcgggagtcgggagtcgggagtttttagttttgttttgattcgtgtagtttcgtgttttagttcgttcgttcgttcgcgcgttttttagtcggtcggtagttttatttttcggatttggtgatgattattttcgtgtttagtttgtggaattggttttatagttttttggtttttagcgttattttggggtcgttttttatttcgttttcgggttttaggtttttgagggagcgtagatgcgcggcgggcgggtgcgggtttagtgtcgagacgtgtagtttcgtttcggtcgttgttgtcgtcgtcgtcgtcgcggtcgtcgttttcgttaggttcgggtcgggtagcggtttggttagcgcgtcgggcggtagcgcgagtgtcgggaagaaggagggttgcgtcgtcgttagaaaggcggatatggggaagtcggcgggtcgtggcgcgtggaacgggtggtaagttatggcgttggtcgttagcgtcggtttttttatcgggatattcggtttaggcgttcgggggtcggggtcggggtcgggggcgcgcggttcggattttcggttcgggcggcggcgcgcgcggtggacggacgattcgggtggcgggcgtagtagttgtttttcggggtttttcgttcggcgtatcgtaaggggtattcggttttgtgcgcgggggcggcgggggttttgcgcggggtcgggttgggtcgggttgagttggttcgtttcggcgtcggggattacgcgcgattggttagattttgtcgtgatttttggaaaattgtgattattttatatgttttgtttagttcggattttttgcgttaacgagttaggttttttttgattgttgattttacgttttttggattaattgtgggttttcgggggcggggttttgatagtttaggttaagtttcggtcgggagggggggtttgggagaaggtgtcggaagttttagtagtaagaaaatatgttaatagaataaaatattaattaatgacgggtcgtcgggtttcgagatttttttttttgtttcggtttttatcgttcgttcgcgtttgcggttgtttgcgtcggattggagagcgcggagggtcgatttgattcgtcgaaagggtttgaggcgaggggagttcgggtttcggggttttggggaaggattcgtagtcgtacgtcggttttaagtgtaaagtattgatacgatttcgagcggagagggggcgttttttttttttcgcgtttagaggttcggtcgttttggttcgagttttagtttggttttcgatttagtttcgggtcgtggcgtcgtttgggggtttttgcgtttcggaaagagatagtaggtattggaaagcgaggtcggtgggcgggcgagtcgggaggttcgggcggtcgaggttcgggagcggattttaggtggcgggagttggtgagtggagttatggtcgagttttgttggggtcggcgcgggcgggagcgggacgcggttttgcgttggggaaacgcggggattttttattcgcgttcgtttttatcggaagattcggaaggaatttggagtttttcgtaggttcgggtttcgttttgagttttttagcggtcgggaggagcggattttcggggttaggaaggtgagcgtatttttcgttgagtatagggcggtatcgcgcgggcggatttcggattttttattcgcgatttaacgaattttcgttttattcggtatcggagacgaaagtttttttttttcgaaatatcggtttttttttttcgttttgttaattatttttttagtttttttttatttttcggaagcgtacgttttttaagttaaggagtgttgagtaacgcgtgagggagttggggtgtttgcgagtatttgtgattgaagtttttttttttgtgattagttttcgttttttgtttttcggtagttttagttttttttttatgaagtgatggtgtgtgtgtgtgtgtgtgtgtgtgtgtgtgtgtgtgtgtgtgtgtcgggtttcgtgtggtgttttttgtgcgtagcgagagttataatttaaggtgtgtacggggagagtgaagcgattacgtatttgtttttaatcgggttcgggcgcgaatatttaggttgatttttgaaggtcgttttttgaaggaaaagatagagtatgtattagttacgggtgatatttttattcgtataatcgcgtggtgggcgcgtatatttaatattgatttatgtaggcgttcgtttattgcgtatatcggtcgtagggtatttcgttgttgaacgttgggagtagcgtttgaaggtcggattttttttggtagtgcggattcgggatcggcggaagtagtatggtttttgcgatcgttatttttatttttcggggtcgattttagggtttttataattttttattatcgtatatgtgagcgtcgtttttatagggttttttttacgatttcgtttttggttaggtcgtattttttttagtattttttttttggttagaacgaatttttgatttcgagttgcgtagtttacgtagacggggtaggatttattgtagttttttataggtaaatatttgttggttttattttaggcgagatgtggtttttcggggagggattcgttgtggatacgtttgcgtagtcggtgaggtgattagataataattagggtagttttttttagtcgggaatttaggtatcggtttaggaattcgtgaatatattcgtaaagtcgcgcgcgcgcgcgcgcgcgtgtgtgtgtgtgtgtgtgtgtgtgtgtgtgtagatatatatttttgtttttgtaagagtatgtgtatatttaaatgtgtgcgttttagatattagtttattttattagtttatttatagttggtttaggggttcgaggtttgaagagtttgaaatatttaggtttgggttatttgatcgagaaatttggcggcgatagtgtagcggttgtatttggggacggcgattttatttatagtggtatcgattttttttttggtttttcggggttttgttcgggttaggattttattattcgtttcgtttcgcggtttcgcgattattttgaggttttgttgtagtcgttttgaagagtttgtagcgatttttagttaaattttttagttaggaatgttcgaggtttatcgaaagttggcgttggggaggtttgggaggttttggagcggcgtcgtgaggttttcgttgggttttttttttatttaggtcggttttttttttttttttaggaatttttttttttggcggagtttcgggggtcgagtgtgcgtgtttttttaagaggtttcggggggcgtttcgcgggtcgttcggggttggagggggagggcgcgggcgggggcggttggcgttaggcggtcgaggttttataataaagtttcggtttttgttatttcgtatcggttaggtttcgtagataggcgggggacgcgcgttcggtcgtttttttttttcgtaggcggttttcggttagggcgtcgggcgggtttgggttggtggcgcgcggtttgtgcgtttcgcgtttttcgtaatagtgaaatggggcgggagcggggacggtttgggtcgggtggggtcgcggttttgagtttggcgtggttgttttttcgtttttcggtttcgttatttttcgtagggttaaggggtattgttgggatttttttcgggttgagtttttaggtggtagggggttttcgtcgtttttttttttgtgtgtagggtcggggttgcgtgatttcgcgggtagtgggtagtaggaagttcgggttgtgcggtcgcgtggtagagcggacgacggatttgcgttcgagtgacggggcgcgggttgtagattggtttaagttttcggtggtagacgaatgtgtttaggttaagtttaggggacgtgtgtggtttcgtgttatgggttcgttgtgagggtgtcgttaggtcgtcgattattgtttggacgtgaggagtgtggtggtgaaggatattttttggatagagtcgttttttattacggttttttcgtcggatcgtatttttcggagttttggcgttagttagttcggtttagcggtcggatcgggttttttcgcggttttaggtttggttggggtgggggtcgcggtttcggtgattttagttcgtagcggttcggttcgtttcgtttatttaaataaattgtcgttgataggcgcgtagtttttttggagtcgtcgttttttcgtcgtttttttttcgttttaattatttcgcgtagggtggggttaattggttgggatggggcgggggacgcggggagagcgggcggttcgatttttttttggtcgcggggtggttcggggaagcgttttcgtagttacggtttgtgtggtttcgtttttggttttttcgggggatgcgagggtaaggtttagtttggtagttgtgggttttggaagggcgtcgttttgtatttaagggcgagattacgcggtcgagaattaaggtcgtatttcggatggatttcgggtgattttttcggagttttggggaattttttaattcggggagttgtagacgatttattggtttcgggtcgcggtttcgcgggtggtcgttgtacgtttgagatatttggttcgtagaagttaggtgtacgtttgtgtatcgtcgtgcgttggatgtgtatggaggcgagatcgtggttatggatgtttgggattacgggagcgtgaacggggcgatcgattgagtgatttgagagacggggtagagcgtaggaaggatttttaggacgggtttatttgcgacgggcggcggtgggggagtggggggtttgtcggcgcgtttataggttttgggttcgcgttcggaaacgttttcgtagggagcgggtcgggatttttcggagtagtacggtgacggcgtgttataattcgggttttagttgtgtcgttttcgt

SEQ ID NO: 7124 - DNA, 2392 bp, Artificial Sequence
  Description of Artificial Sequence: Synthetic polynucleotide
cgaggcgtatttgtttcgagtgttaggtttggggacgcggtttcggagaggggagaggggttcgggaatgcggcgggaggggtttcgaggggtagcgggtcgggtcgggtcggggcggaggtggcgggtttcggcggggcgggttttcgcgggcggcggtgagagttttcgtatagtcggttgcgagttttgggagtaggaggcgcggtgcgtagtttagttcgggacggagtcgggcgtcgtgcgagtttcgggagggtcgcggggcgtaggggcgggtcggggttagcggattaggtcgcgttattcgttttcgttttcgttttgtcgcgttcgggtttcggcgttcgcggagttgagattgagcgcgttagtttttcggggtcgaggttttgggatagatatcgcgagggaggcggtcggcgcgggttttcgtcgcgggcgtagcgtttttttttttcggtaagtggcgagcggcgggcgaggggtattaatttcgtcgttaatttggggttgggttttcgcggcgcgcgagtaaggacggcggagatagaggcgggatattcggggggttggatttacgtaggattttcggggtttaaggagggggcggttggaggattcggatttttaagaatttggttttgggttttgattcgggcggtcggagagaaggcgaagaagaggtcgagtagataggcgcgcggcggacgcgagagaaggacgcgggcgaagcgtttaagacgttcgtttttagggtcgtcgagttttttttttttttcgtttggcgcggtagtatcgcgggattaggggagtttgggttgtcgcggatttaaattgttgttgttggaagtcgtcggggcggagagcggggaatagggtcgggagtgggggtcggggttgggatttattagagcgaggggttggaaaggagtcgagaaggtgaaagggggttgtgcggttttttagtttagtgttttagtttttttaggtttgttgggtatttgttgcgtattcgtttcggcgtttagattttttttttcgtcgcgagtttcgttttttttttttttagttttgttttattttttttgttttagtttagtttttttttttttgcgatttgggagaatcggagtgggtttttagagtagtggtattttgtagatgttggttcgtgttcggttttcgggtttttagagcgtaaagggaagggtaggtagagagggtattgggcgagtaagatttggcgttgggttttggttgcgtattagtcgtttgcgtcggtttttgggggtttcgtttaggattttcgacggcggggaggggaagtttcgagttttttgttttttgtttacgcgggtagggcggggatacgcggagtaaaggtattcggtaatttgaatttttaggtgcgtttcgcgattttgtaaggagttgttgggtgagtaagacgggaattttcgttaggttttgatgtttattttattcgtttattcggttttttagttttggtcgtttaaggggatttttggttcggttttttagttttcggatggtggcgttattttagtttagtttttgatttcgggttataggaaaatcgaggaaagatatttatttggggagggtattatttcgttggttgtattttagagttcgtttaggttttggcggtgttagtgattttgagtttgtttttaaattttcgaagaataagagcgtgttaggggtaggtaggtaggttcgggatatttgggttcgtttagggttttcgggcgggtttgggatggtattggggtcgtttgttaggttggtttggtttttttattgcgggattcggggttacgatttagtttgggggagtgggggtgggggtttcggagtcgcggacgtcggcggggggtagcgtggggcggggggcgtcgggtgcgtggtgtttagtttggtcgttaggaggcgtggcgcgggttttcgttcggagtcgtcgtcgtcgtcgtcgtcgtcgtatcgcgagtgtttttgagtcgcgggtgacggtggttttcgttgttcgcgtttttttttttcgcggggggagtttgatgttacgttttttatgaattatttatcgtcggtttaaaaatatttcgaattttatagttcgagtgtaagagattgttgcggaggggagggggcggggcgtttcggtggttagggggagttcgggcggggttcgcggagacgggggtcgtagttttggaggagtaagaatttcgtgtttttagtagtggggtaagttagaacggcggtttttttttttggcgtttgggttcgggttttggttgggtaaaagggagggagggaaattcgacggtaaaggaggggcggtttatcggaagggtagggggttcgg

SEQ ID NO: 7125 - DNA, 564 bp, Artificial Sequence
  Description of Artificial Sequence: Synthetic polynucleotide
cgtttttaaatcgtttatttgcgacggtttcgcgagcgtgcgtagtttagtttttttcggacgttttcgttttcgttcgggtatatcgtgtttcgtatcgaggtagagaggggtacgcggattttagtttttgcgagtttttttgttcgtcgttattttatatttcgtattgttttagttgtcgttttagaagatgtatcgtttggcgcgtaaagcggtgtacggtttttagttcgcgcgtagtagtttggaggggcgttagagttttcgttttattttttggcggtattgttttcgggtagttttttttttttttttttttttttatgtttttattttattttgggacgtttttaggatcgaagaggtaggagggggatcgcgaggggaaggcgcggagttggggaaggaggagtagcgtcgggcgtagtagtttagggcggttcgggaggttgcgcggcgttcgcggatttacgttttaggatagaggacgtagtttcgagtatcgtacgtggtttttagattttttttatttttattttggcgattacgagagggggtcgg

SEQ ID NO: 7126 - DNA, 3277 bp, Artificial Sequence
  Description of Artificial Sequence: Synthetic polynucleotide
cgcggtatggtggttttcgcgtgtgtgtgtagcgtttgtaggtgtttcgtttagcgttttttgtataatagttgtaggttggattcgagggtttttttttttggggttttatagtgtttagaggtttcgttagttttagatatcgttttaggtttttttttttttttgacgtcgtttattttttttttttgcggaagggggatacgtttttttgtgtcgaggtgttaggtcgttgagatttgttgttttggaggaaaagttaggtagggtttttggttttgggcggttaggaaggttttacggttgttggggatagagacgcggggttaggttaagggttttcgtttcgtttaaatagtttgttttgggtagggtagggtttttttttcgcgttcgcgcgttttcggttgggtacggttcggttttaggtttgacgggcgcggtttttttattggacgcgtgcgggagggcggcgaggttaaagcgttggggttaggagggtattcgtttagcggttttttacgggagttggggtagaagacgtcgcgatttcgcgcgggtaatttttttcgaggcgcgttttagttcgtggcgttgtcggcgtagatttcgcgtggggatcggcgaggttaattttttttgcggttcggggtcggtagagtacgtaaggggtcgcgggtcgcgtgggtttgggcgcgtcgtggtgggtaagcggggttagcggagcgggaattcgtatatttttcgagcggagtcgaggataggttcgtgcgggtcgcggggtttttttggcgttaggaagcggcggtcgaaggagataacgagaacgtagtttcggtttagggaggtttaaaagttgagatgttgaacgtagacggcgggcgttcgggggttggggggcgggtagaggtcgttattttttaaaaaggtttttatcgagtcggtttttgttttcgttcgaggggcggacgttcgatttcggtattcgggattgttcgtgggtttttgttggttggggatttttagttttcggttgcgcgtagggaaaggttgtagaacgtagagattagagaagtcgggggcggcggggaggggtcggggggttacggttgtagttcggtttcgtagtttcggagttttagtttttttttttgtattacgggagcgtggacggagggattttcgaggttttgatcgttttgatagtttcggggcggggcggggcggggcggttgcgttagttttggttttgagtttttagttcggcgtcggaattcggatcgcgatttcgggagtcgagtttcgcggtttagatgaaggcgcgagtgcgcgggtgtcgggtggggtgtttgagcgagagcggagttttttaggtggacgtttttagttattttcgggattttttttgttggtttttgggtttgagaagtgggcgcggttggatagacgggaaatagttttttacgtataggtggatattcggggatatcgggcgcgcgcggcgtttggtaaggggaagttgttggagacgcgggcggttgttttcgcggggttttttttcgaagcgtcgttgcgaacgtttagtttcggcgacgtcgtttgttcgcgatcgggtcggcgtcgcggataggaaaggttcgattagttaggtttgttttcgagaagtttttagcgtttcgttcgtacggggtggggattgatagtttttcggggacggggtcgggtttatagagttcgggagttgggggaggggaggcgtcgggggtttcgattcgtgggaagtttttgtatttaggttgttcggcggttttttaatagtatacggatatttaagaaacgcggggcggttcggtgattttcgttttggatttagtggcgtcgcgaggttttatttcgagtcgttgattatcgggtattcgggtgttgacgatttgggtttttgggtatttagttcggttttaaacgatttcggtttaagggtgtttagtgtagttaggagggtcgaatcgaattttatttttcggacgcggtggtttttcgttcgtttggagtttcgtcggaggttcggggatattacgtaggtggtttattttcgagttcggggtcggagttcgatttttttttttttgagttttcggagttttcggggtagtagcgtcggtttaggcgggggcgggggaggagggggtcgcggtagtttttagaagggcgggggggacgcgagcggaggtagtttcggtggcgcgttcgtgagattttcgtcgcgtcgcgggttcgggtcgcggataattaaagcgggatttttttttcgttgacgtcggcggttcgaggtttttttcgcggcggtataaaaggcgcgggtttcgtagcgtaggcggtagtgggggtttgatagcgcggcggtgtggatcgcgcggtcgaagagcgcggcgtttagagcgcgggtcgttcgcggagttatagttcgagtcgggttttagtcggagtcgagttttagtcgagtcgagtcgggttcggagcgttcggtgttcgtagttatgtcggtcggtcgcgtcgcgcgtatttgtgcgttgttcgttttttgttttttgggcgtcggggtttaggatttcgggtcgacgcgttttatttgtatttcggtgttcgtggacgtcgatatgtgcgtcgcgttcgtggtcgtcggcggcgtcgaggagtttcggagtagcgtgttgtagtttcgcgagacggtgttgtagtagaaggagattattttgagttagaaggagattattcgcgagttgatcgttaagttgggtcgttgcgagagttagagtacgttggatttcggagtcggcgaggttcgggcgggcggcggtcgtaagtagttcggttcgggtaagaatattatgggcgatttgtttcggatatcggtcgtcgagacgtttagttaattcgggtaaattttgtaatcgtttaaaattcgtttggagaatttcgaggttcgcgcgcgttttcggtttcggtttttttttcggttcgttcgtttttttgtttttttttatttcgttttttattcggttaggtatttttcgttttcgttttagtcgcgcgggtgttcggtcggtgttttttcgcgtttgcgaggtttcgcggcggttattcgttttagttttttgttaggtcgttttcgtagtcgtttagaggggatcgcgtcgcgggttttttagtacggttttcgcgtttcgtttaacggtgtggtttttttcgtttttgtatttcgtagtagtatagtcgt

SEQ ID NO: 7127 - DNA, 5692 bp, Artificial Sequence
  Description of Artificial Sequence: Synthetic polynucleotide
cggacgttaattttacgaattttgttcgggttgggggtttgggacgttttttttggattttaggattcgtttgtacggagttatagaatatagcgttatcgttcgttcgagtttaggtattttttttttttttcggggtttgcgtcgtttgtacgttttttcgtagattttcgcggaaacgtgtatagtagggttttgaatagaatttaggttgttttgagtcgaatttttttcggttcggggttgatcgtgtttatttaagtcgtcgtttcgtttttcgtattttcgacgcggggttatttttttttatttttttttttatttaggcgtttttttcgatagcggagggagagttaaaaatttataattcggcggcgggattttgtcggttttagttgggcgatttgggcgtattcgtcggcgacgtagtttcgggttttagcgtatagaattcggtcgttcgtagtttttttcgttagttacgttttttgggttttttattggttaagtcgttcgcgttttcgcgtgattttattggtttgcgtcgggggtttagataaagggagtagtcgcggagggcggtgattgggcggggttgggggcgggtcgggcgggcgcgcgggtcgggcgggagtcgcgcgttggagaggcggggagtacggcgttgggggaggggcgcggtgtttcgggttcgggatcgggaggcgcgggtgtgcggcgaggttcgggtgttttttttcgtgggggcggggcggcgggggcggggcggttttacgtgggtggggttgggcgtttcggagggcggcggtcgcggggcgcggggcgttgggatttcgttcgttttttcgttttgtatttttttcgtttcggggtttttgttcggacggcggtcgtcgtcgtttcgtttttttcgagggtttcgcgttcgttttcgtagttcggtcgggaatttgggaattcggacgtagaaggacgcgttcgagttaggattcgtcgcggggtttttttggtgggtcgtggtcggggagaggacgcgggttttggcggtcgaagacggacgtagcgttcggaaaggcgagttaggttttcggtttttggcgttttttgtgagttggttcggcggggtgcgtcgtcggggagggagggattggtcgtggggcgagtagtcgggcggggagtggtttttgggggttttcgttagcggagggttcgcgaggtcgttttcggagcgtcgttaggtacgtgcgttttttttgtttttcgcgtttttagagcgtattttcggtagggaacgaataaaatttcggttggtgtgtaagagtttttcgttgtaaacgtgtttttttgcgggattcggggagtcgtcgaacgcggggtagatttcggtttaaagtgtttttgtagtttttattagggatttttttttatttttattttgggttcggagcgggtgttagtttggaaatgtttgttttttttgtagtttcgattgaattcgtttaggaggaggtgcgttttgtttcggttttagagttgggaggatcgggttttgtttttcgaagtttttttatttcgtttttttggaaaatgcggattttttttagtagggatgtttagttttgagggggttgttttcggaggaagtttgggttgggaaagttcgatattggttttaatttggcgggtagttttttttgttttggagtagttttttttagttttcggagtttcggatttatacggttaggagacgtttatgggttttgggggtattttgcggggttcgaggaggtcgggtggtttgggcggggttcgaggaggtcgggtggtttgagcggggttcgaggaggtcgggtggtttgagcggggttcgaggaggtcgggtggtttgagcgggttttttttttttttttatgtgtacgttaaataaaagaattttcgaatagttttggggatagaatttttcggaatgtgagtttgtttttttcgtttttttttttaggaaggataggggttttttaataaaggtaaggttgcggttggagcgggttgaagggaaggagcgttgttattttggggtatttgatgaaagagaaatttattttttttttttttttttaaaattagaggtagttgagttagagttttttttatttttttatttgattaatggggttttatacgatgtttgtatttggggtgattgggtttgaagatttttagaagtgggaaaggattttgtttgtgtgggagattggaaagttggtttttattcggtgggggatagaatttttatggagtgaaatggattttaggttattttgcggaagattggaaatttaaggatttgacgggggggcggtgattttgtgtttttttttttttttttttttttttttttagtttagaataaagggcggaggcgaaggaggtaagatgggtggtgggttcggaagtcggagtcgaaagaagaatgttataaaagttttttattttttagttttcgcgtatttttaaatagtttattagagtttgggtggggataaagtgaatgatcgtttagagtcgggtttggtatttatggttcggttttcggcgcgggcgttcggagttcgggggaagtttttttagttcgttttaagtcgcggttggttagggcgagagaggtcggggtatagcgcgcggttttttttgtcgttttcgaggatcgagattcggggttcgcggttttttgattgcgtaagttttttcgttttttttgtttttttttttttttcgtcgaaagacgttcggagcgtatattcgtttgtattaaagttagggattttattttttttaaaataaaataataagttataaaggtttttgattttagtggaaaaggcgtcgtagatttatggtttttttaaatttttatattttaattatttttgtttttagtttatttatgggtggtgattaataaaatgattttttattttgaattttttttttaatataaaaaatgtaagtttcgttttttttttattcgtttggatggatttttttcgtgcgggaagtaaagaaatttcgtttttttcggttttatcggtttagggttgagttgttgttttcggttgagcgaattcggtttgtcgtagtattttttaagtattttcgtttcgtatatttttaattgtaatttaagggagaatatttttttcgtttttttttcgtttaagggtatttgtagggatttttttttagaagttttgtcgtgggtttagcggttagaagggttatttcgtagagcgggttttcgatagttttagttcggttattttttaaattgcgtttttttgggtttcgtattgggcgcgagtttggggcgtttaagggtttttattgaggaggaaggttgtcggatcgagttttcgttatcgtttggcgtttttattttttatttttttttttttgttcgttttttcggacgtcgatttggagatggtaggaaaaaaaaaataattagatggaaattaaagattagtttgggtgcgcgggcggttttcgtcgggtcgggttatgttcggttcgcgttttataaatttttttcgcgacgtgataatagtcgcggtttcgtttttttgggaatttaggaacgtatcgatttttttcgtcgttcgcgtaagtttttttttcgggagcgagaacggagagtttttggtgattttgatttttggttagcgtaggacgttttaggttttagttagggtattatgtataggagtggaggaaggtggaagggaaggggtttaatttttatttaagaaagcgtagtaaatatttatatttcgtaggttaaattaaatatattattaggggtcgtattttttttttttcgcgtcgtttgagaagggggcggaaggaaggacggagaagggtgaggggcggattaatttttttttggcgatttttttgtttggttcggatattgttgagtcgagtggggcgtttaggagttagcgaggggttttcgaggcggtttcggttcggtttaggtgtgcgggtcgcggtggggcgtaggttcgtagcggagttacgagattttcgcgttttcggttgacgttcgggcgtttagggtttgcggttttacgtgcgatttattcgggagttgcgttttagacgtttcgtggagcgggggagaatttgaaggaagtcgtggcgcgtttagatattttaaaaattcgaattaattgggaaaataggaagggcgtttttaaacgcggagaagatatttcggggtggggaaggatgttttttaaaaattatatttttttgttgtggcggttgtttttgattttttttattattaaaagaaatgttgttacgtttaatttttgttgttatgagatatggagggggtagtttagtattttgaagtaatttgataagtttttaagtagtaaattcgaaagggaggtcggcggtttaggtatagtttttttgtaatttgaatttataatgaaagtatttttttttatggatataatagattagattttataatttaatttatcggaatggtttcgtttaagggagtttcggttgattttattacgttaagttaaattggatgtttgtggttttaacgaaaagcgatcgtgatataaaatatataatttttaaagtaaaaaattagcgggttggattttgtttttttttttatttttgttttttatttttaattttttagtgtgggaaatacggataattatttgtgtgtgttggtttttatcggggagataggcgttttgggtttttttttcggcgggttagaggtttcgtcggttagtgcgtacgcggcgtcggttttcgattaaggtttcggttcgttttgttggttcgtttgaaacgtcgatatttttagcgtacgattcggggtttcgggggtatttatggggttcgaagtttttgtttgtcggcggcgatcggatagttttttcgggcgcgtagggtagaggaagcgttttcgaaagttttcgtacgtatttacgagtcggttttgcgcgggtatagcggtagtcgcggcgggatattcggtagggttttcggcgttattttgtgttaaaaattgcgttttcggagattcgggtatcgtcggcgtcggtagttagagcgggatttagtttttatcgcgttttttattggagtttttttcggtttttcggcgagtgcggttcgtggggagtgggcgtcggcgcgaggaagtttttcggttcgggcgatttcggtttttgagcggtttttttttacgtcgtcgttcgttaggtcgacggaggatcggggcggggacgggggttttagcggtttattttgttgttatttttgatttattttttagtaacggcgcgtttttttttcggttttttcgcgaggtttgttgaagacggatttagttttcgtagagttggggaaggacggatggacggaaggtttagcgcggtttatttttttttttcgtcgtttttcggttggtaggagtcgtagcgatagtttcggggagcggggtttgttttaagatttttttcgcggtatcgggagttaggcgtggtcggaggtatcgcggttgttttacgtggttttcgtcggtcgttatttcgcgcggggaggacgcgtgcgtgcggtgcgtggtcggcgggttgcggggacgcgt

SEQ ID NO: 7128 - DNA, 7937 bp, Artificial Sequence
  Description of Artificial Sequence: Synthetic polynucleotide
cggcgggtttttagcgtagttttgcgcgtttttttcgaatttattcgcgtcgtttggtgatttttagggttttaggcgtggtagttgtttttattttgatttttttcgatatttatattaaagttatcgggaagagggttgttttggaggtttgggttcgttttgttaaggattgattttttcgggtagggagttagaggggatcgttcgagaggattcgtttttgcgaggtttagtacggcgttttacgttttttttttggagtaaattcgtttcgttttttttttggagtaaattcgtcgtattttcgtttgtatcgaaattttgagcgtcgtttcgcgttatttttagttcgcgttcgcgttgttttttttttcgggtcgtaggttgagaggttgggtcgtattttggttacgttttgttcggttttagcgggatattagaggtattcgttaaggtaaatgtatttttgtaaatttattttcgttttgatattttaaggttttatatagaaataggatttgttcgttttatattagtagtttttattaacgttcgttcggcgtatatattattttaattcgcgaggtcgcggcgtattttggtttttttttttcgttataatagtcgttttgttttcgtagaaagcgtttcgttgttttagtttcggaacgttttagggaggtgaatgtagaatgtagaaaagaggttttcgtggaatttagatttgtaggagggggcgggggagggtggcgaggcgcggaaaggttttaattttagtcggtttcggggttgttttttcgagattttcgggggagggtggttagggaagggtttttttaagtcgcggcgacgtagtttggggggttggcgggacgcgcggtttcgtttagcgtttaggtagttatcgcggtcggggtcgggaaatgaaattaaagtttttttgttttcgggagcggaggggtgggcgttttgtttcgttttcgaacgttttcgtttcgcgttcgtttcggtcgagtattgatttgtgtgcgaagttatgggtaacggcgacgggaagtattttttcggttggaagtgtgcggggggttgcgcggcgggtttagtcggggcgagacgcgcggcggtagcggcgttgcggtggtttaggttttcgcgtttcgatagtagatgcggcggcggcgtaaagtcgcggttatttatgtcgggtttcggtttcggttcgtcgtcgttttttcggagtagcgcggtcggggttcgggggcggttcggcgcgcgggcggcgtagaggcggcggcgttcggggttataggcggtggtggcggcggggtcggttagtacgcgggaggattgggtttttcggcgggcggtcgcgtatcgagttagcggtcgttgtgcgggtttatggtttgtggaggtaaaagtagaggagatacgggtgattggggggttcggttcgttcgggggttttcgtttcgttcgtttatttattttttttattttttattttcgtcggttcgagcgagcggcggttaggtcgggtggcggggtcggggcgttcggtgttttttcgtcgtacgcgcgcgtagtttagtattcggggtttcgcgcgcgtacgtatcgtttcggttacgtttggttcggggtagtcgggggaatttagtcgtattgttcgtcgtttttcgttttcgttttcgcgggtttttgtagttagggcgtcgcggcgaagaggttgttggttttgttgggtgataaaaatttaaatttgcgaagttattacgtatattcgtatatatatatatatatatatatatttatacgtatatttttttttttttttcgttgtttaaaggtgtttcggaggaaaaggtttggggtttatattagttttttttttttttttattttatgtcgaggtttagtttttattgtatttcgtttaatcgaataattatgttaattaagcgagtaattttattgattgtaatttaagagttttttttttttttaataattttttttttttttttatttttattttttttatgtatttttcggtttatttttttgaatttatcgtggttttttttttttagttttagcgggattagtttttgtttttagtatcgcgttaggattttaggtcggttttttagagtttcggaggttcgtaatcgttatcggtattatttgggtcgttacgtcgtagtgttcggtttgttgtttcggagtcgggagttttttgttgaggttgtaataattatttcgttttttaattaaattcgtttaggatttttttttgcggattgggggtttgggggtgtgtgtggggggggtgtttttagagttagaatgtttttttttaacggtttaaatcggttttgggatttttttttttagcgtttgtcggggatcgcgagtagaggtcggttttcgtttcgggtagtatcgggcggtttgggtacgcggggtttgcggcgtttagttcggttttttagtcggggaaggtgggttcggtttagtataattttttgttagtagattttgttcggatttcggttatttaaaataatttttatttttatttttttttatttttatttaacgcggagtatttatttaggcgaaattggggataattttagattttgggtgcggagggtcggagttagtgatagaagttgcgtgtattatcgtgtttttaggcgttttttcgaaggcgttttttggacgtattttatatattattttttattttttaaatacgtattgttttaatgtttattatttttaataaaagggagatggataggtttgatatttttaattaggaattttgcggaaaattttgtgtttttgtagttattttattatgataataaagcgattaagatgttttttatttattgaatatttttttaaattgcgatattttatggttcgggttttaaaacgttttatttgtagattattttgtgtttgatttaatttataatcgaaaatataatgtattaagtgaatatatatttgtttagttgataagtttttttaatatttattcggagagtttttgtattgtaaataaatgggtttatataaagagttttttttgtttggtaattatatataaaggcgtttggggtttttttttttttggggatcgttagtttttttttcgggtttaataaatagttcggtttttaagtttcgatttcggtttgtaaagcgagcgttcggtcgttagggttcggagagtgttttggcgagggggttgcgagcgtaggggttaggggaggggttgttcgggttggattagggacgtgggggtttttagtttcggtcggcgtttttcgagtttcggagggcgtcgggcgggataaagggaaagaaggaaagggagggaggttagaaatttgtagttttaaaggcgtcgaaggtcggagaggggtcgggggttgcgtacgcgggggtgttaggttttttggcggtttttagggagtcgtgtgtgttgtgtttttgttttgtggttgtttttttttttttttttttttttaataagaaattttaaagttgagaaagcgcgagttgtcggcgattttcgggacgcgggttcggttacgaagtaataattttaattttttattttttgcgggcggatcgtaggttcgattgttttttttttattagtttgttcgattttttaagtaaataggaggtggattattgtcgtttgtttgcgtcgttacggttttgatcggattggagagagtttttttttgtgtttttttttttcggggagaggtcgcgtcgcgttttcgcgtttgttcgcgtcgggtttcgggggtttggggagtttgaggcggttaggaagtggggcgaggaagggcggttatacggttcgagttgggagttttatagtttcgtagcggcgacgtcgttattcgtcgagtgtcgaggttcggggtttatttttagtttagttttaggagaggtcgcgtcggaggatcgcgaggacggcgtcgtagcgttaggtcgggttgaggtaagggaggaaatggagcgaaaagtggcggcgggtagagggtttcgggcgggcggagaatcgttgacgagggtatttcggaaggaattgaatttaggagtatagggttttttttcgggaaggtagggcgtgattttggagtcgtcggttttttttgtcgcggttttaggcgtggttggcgcgttttaggatttggagtttttataagtttgttttgttttttgtttttgtatttaaaaattcgtttttttttcgttcgtttgtcggagattaggattttggttcgtttgttttttttcggcgtcgttttcgggagcgcgggcgcggtggggtttgtaggtcgggttgggattaggcgcgttttggggcgcgagtggttcggtcgtcgtcgtagaattcgttttttgcgaaatagtcgtattcgttttttgggagagttatgagaattggggtcgcgtttgattttcgcgttcgaagaaaattagttcgcggatttcgttatacgggtcgtgattcgagtttcgcgcgtcgtttcgaacgcgcgcggtgaaaacgtttcgttgcgtcggttttgttcggttttttttttttatttttattttttcggaaaaaaaaaattttgaattgggaacgaagattcgaaaaattcgttatgattattttttttttcggtttttagtttcggttcggaaggttttttagggtagcggtcgtgggtattacgattcggttagtttttttcgtcgcggatcgatcgggtagggttaatttaggattgtttcggggaggggagtagggtaggggagcgaatgttggggttcgttcgtgggttatttagaattgggcgtacgttggcggcgttcggatttcgtttattgttcgttcggtgttattcgcgcggttcgcgttagacgtagtttggcggtttttgttttgttttcgagtatttgtttttaatgttgggtgtcgatcgagataataagcgtttagagtaaagtaaggatgtattacgggggtaattttaaatcgatcgataagattttttagagaaaaaaaaatcgtttatagtttatattttttaagaaaaaaaaaagttttaatattttaacggattttgttaaaagggaagatatatattttttaatattataattttgaattttttttgttaaaaaaaatgtaaaattttaaagttagaataaaaaataaaataataataaaaatataaaaataaaaaaaaaatgaaagtaattttagttatttattggaggttgttttttggatataattgaatgtaatataattaaattagtaaatgtgattttgttttgtatttttattggtatttttaatgtgttgattgttgtattgtaaatgtatcgtttttataataacgattttagcgagtttatttagagcggtttttaaatttgtagtttggcgcggcgagttacgggttttgtatattaataagttcgtgttatttagttcggaatagttagcgcgttgattggtcgcgtagttttttacggtcgggagttcgtgttatttattcggcgtaaataggttttttaataggttggcgtcgggttagggaattgttaattaggaagtagcggggttattattaagttcgatggcgtttaatttaagttcggcgattgcgtagtttttttgcgtagattattgttgttgaatgggaatgtggtggcgtagggcgggagagggagttggagcgagcgagtgcgcgtgtttcggcggagggggaggcgtagatatagatatagatatatatatatatatatatgtttaatttagtaggtttaacgtttggtttttgtcgtatagaaggttaagggaagaaatattattattttttaaaagtagttgttttttttttttggaatttgtttggtaggtggtaggtaggttagatttttaagtttagaggtttttttaggttgtttggtttatttatcgttttgaagttgttgtttgttcggattcgagttcgcggatgtacgtacgtacgttcgttgtttgggtagtaaaagttttgaatagttcgttcggtttttttttttttatgatttggggattagattttgggaagtgagttttgagtttttagtcgtttatattattggtttttaattttatttttttttgttatattttgtaatagagtagttattaaaatgaaaattagggatttattgagaagataaggattgttttttttttatttatatttagatttagaaaatatttttagtttggtaatgggggaagcgggtatggtgtggtaaattatgtatagtattttttaatgttgttttttgtttgtttatttgttaaatttttattttaattaaagtaagttattgaataatttttatcgtaattagatgtaaattatttttaaaatatttcgtaaataaatatttttgttagaatttggttttttatttaaatgttatttatttttagggagtcgaggtgatgttttagtggcgatggatatatttatttttgtttttttttttttatgtgaatttttgtttttttttttgggggaaaaaaggatatttaaattaggagttaattgatagatttatacgtattcgaaattttttatcgttttatttcggtagggatacgaaagagttaaatttaaagtttgttgtttttttgttttttcgtttttattttcgttttcgcgggatcgttgggattggttggtatttcgttagtggattgtttattatcgagtgtaaataaggcgttgattggttgttgtttagttcgtattgggttttttgaaaaaagtaattattggtttcgcggttttaaggcggtttaaggtcgtttgatgaaaggagataagttggggatcgtttttaggattttcgcgggtcgatcggggtagttcgggagtcgaggtgcggcggagagttcgcggattaaaggaatttggagagaaaggggaagcgggcggtcggtttcggtcggttttttttttcgtaggttacgtcgatttggggtggggggttgcgggtcgcgggcggggatttcgggatttttcgtttgtttgagtcggggtttacgtcggcgttcgtttcgggcggttcggttcggaggggagtttcggagagttcggggttcgtaggtaagtatcggcgtttcgcgggtcgggtcggggacgtaggataaggcgcggggtttatttcggttggttcgggagtggcggtcgcgcgggttcggttttcgttttcggcgtttttcggtttcggcggtcgggatttttcgcggtcgagtttttggttaggttttaggtcggcgttttcggaagcgacgtttggcgggtcgcggggtacgagggggagagtcgggaagcgtaaattttcgaagcgcgcggagattcgattagcgcgcggttatttattaggttgggggcgattgaattaggtttttgggcgcggtcgtcggttgggggtgtgtggcgtcgattttcgggtttttgtcgtggtttcgggaggttggagtagcgagtagcggttttagcgagtgtgtcggggaagcgggtgttttcgggtttcggtttcgcgggtgtaggcggaggttgttcgtttttcgcgtatatcgaggacggtcggttcggtttcggagaaatggcgtttgagaaaggaggggaggggaaggttttcggattttgggtagggattcgtcgtcggggattcgcggagtttttcggggatggaggaggcgcgagttggaagcggcgcgcgagttcgagcgcggggttaatatcgtggggtttagttttttttggttcgggtaagtggacgcgtttcgaggtttcgggtttacgtagggcgtttttcgtagacggcgt

SEQ ID NO: 7129 - DNA, 1408 bp, Artificial Sequence
  Description of Artificial Sequence: Synthetic polynucleotide
cgcgcgcggtagtttcgaggtagtagagcgcggagtcgggagcgcggggagcgcgggtcggcggcggcgagggaggacgggggcgtagacggtcggcgcgcggcgcggttattatgggcgtgcggtgagtagtcgttcgggacgattttttcggttgcgcggcgttcgcgcggagtttttcggtcggcggtgcgtttttacggttattatgaaaggtagggcggcggtagtttcgcggggttttgggcggggggaacgggtttcggggcgcgcgggaggttacggaggtgtttttcgcgcgaatttttttttgggttgcgggttcggggagtcggggttgttagggcgtcgggttcgtgcgcggatattgggggcgtattcggttttcgggttaggcgcggttggagatttcgaggttggggttttgaagcgcgtaagtatttttttttttatcgcgtttttgtaagtagtttgaagttttaagtcgttgtttacggattttcgtttttaattttttaattgaaaaaatttgtcgaggagagtggaggtatcgttatttttttcggtcgtttttttacgtcgtagcgttttttacgttcgtttagtttttttttttttcgtttttagtcgtttttcggttcgagcggttttcgcgttggcggtcgggtgtttttttcgggattggggatgtttttcgtgcgttttcgttatatttggtaatgattaggtgttcgaggagtttagttggttcgggaagtgtatttggtatttttttttattagatttatcgattggaaaatagttgttttcggtttcgcgttttttttacgtgttcgttttggggtgtgtttattggtgttttggggtgatatattttagttggttagtcgttttttgcgcggtgttttttgtaggtcggtttatggaagtgttagatgttatcgtattttagaaagaagtacgagaaggattgtagggtagttttttgtttagtggaaatacggagatttgttagcggaattttgatttatgtatgagataagtaatcgtagcggaggtattaaagagtcgtttaggaatgggttcgcgtggtgtttatataaggtttcgtgtgagagttgttggttttgtgttaggataatatagttttgcgtgggtgcgaaatgttatttgatcgcggttatttcgtttttagtcgttatagatttggcgatgtaatcgttttgatttttagggttgtcgttcgagggaggcgttcgggaagttttaaggcgtttggaaagtaatttttggttttggaaagttttttttttgaagggtagttttcgcggaattaatcggagcgatgatattttattaatttattttttttttaagggcgttaggtgtttacgtcgggagatttcgg

SEQ ID NO: 7130 - DNA, 208 bp, Artificial Sequence
  Description of Artificial Sequence: Synthetic polynucleotide
cgttttcggggtcgcgatttttttcgggaggtgtttgcgaaggcggttttgtcgcggtgggggtggggaggttagggtttcggatcgttggagttggggtcgtagttagtttttggcgagtgttttttggttgttgtcgtaggggtttgttttttcggattttttttttaatttcgtcggatttttttttttttttttttacgttcgt

SEQ ID NO: 7131 - DNA, 805 bp, Artificial Sequence
  Description of Artificial Sequence: Synthetic polynucleotide
cgtcgttcgcggagtttgattttgcgttaggacggaggaggttgtgtttatgtaattgttttgaagtattgcggtggttttttttttcgcggttgggagggtaggtaggacgaggttggtttttttcgtacggtttttgggcgtgggttttcgtcgtagtttcgcggagtttcggtgttttttgtaatagggggcggggggaatagcggcgagtagttttgggttgcggttttttttttacgttcgagttttttgcgtatcgtcgtcgaggacgcgcgttcgagtttagtttttacgtcgcggcgcgttcgggttttttgttgattttaggtaattttttcgtttttcggagtgggggattgcgagggggtttcggttttacgaggtgcggaggaagagttcgaggtttggggcgaggcgcgcgggatagtggggttgacgcgtggtttcggcgtcgcgcggtttttcgaatttcgagtttcgcgttcggcgcggtcggggtttttaatcgttttttcgttcgtcgggatttttatcgggtcgagtttgcgcgtcgcgtttttcgttcgtttcgttcgttgcggcgtagtagtggttgggtcggcgcgtagagtttgagtttcggttttcggtttgggggtttttttgggatttttggtcgaaggggcgattcggttttcgcgtttttttttcgttaatttgtataaatttttcgttcggggcgttatgttttaagttgtttttcgggttgggggcgagcgcgggtcggtttttttttcggggaggtgcgggggatagggggcga

SEQ ID NO: 7132 - DNA, 2462 bp, Artificial Sequence
  Description of Artificial Sequence: Synthetic polynucleotide
cgagcgcgcggttgggaggcgggtttagggcggggtagagcgcggggatcgttcgggtatcgggcgtagttaacgagcggacggggagggcgggttcgcgagggttgagcggcgcgggttgttataggcgttcgaagcgcgttgtaggtggtaatttggaggtgtcgttatcgtagttgcgggaggagttcgggtttggcggttttttttagtttttaggagttttttttcgtcgtcgagttcgagattggatttcggagaattcgaaggaaagagtttttgcggagggatttgtgagtagttttatttttttttgtttttgcgttattttttttttttaaggaaggttgtgtttgcgggttgcgaataagtttcgggaggggttttaaaggaaggtttcggtgatttaggtgagcgtttttttttttttggtagtcgggcgtaggtcgggagcgtcgtttagtttcgtgggtaggggcgcgggtgcgggtcgtttgtttttggttcgaggtcgatgggggagaaagcgaggaaggggcgaggttggttcgatcgggggttgtttggtcgggttcgttcggaggcgatagggatttttagacgggtatttggagattagggacgagtagagaggtgttttgagggggatagagggtttgcgttcggtttaagttgatcgggatcgatcgtttgcgcgttgtgttggagttgtcgcggaagtcgggcgcggcgtttttgcgaattttagagttagtgcgcggggttcggcgagcgtattagttttcggtttttcggagtttaaggttttggaggacgttattttttttcgttcgggtaatttttttttcgtttttttttgtttttattttttcgcgtcggtcgtttagtttatttcgagattttgtgtttttgttagcgcgcgttagttgttgttgttattttttttttcgttttcgtcggagttggagcgatttggggtttggtttttcggtttcggtagtttagttgtgggttggacgcgagtggggttggttagttttttgcgaggagggtaggagtgagcgcgggttttttttttagtgtttttttcgaattcgttttcgtttttttgtagttcgaatcgttagtttagagagcggagttttagaagttagattttgttcgttttggggaaacgcgggggaggggggggtttttcgggaaggtgcgaatttcgtagatgaggttagagttttcgtttttattttagcgttttagtttttgtttttttgtttttaagtggatagtggttttgattttcgtatttcggtttgtggcgtggggggcgttagcggtagtgtgtgtgtgtgtgtgtgtgtgtgtgtgtgtgtggtgtgtaaggatgagcgagtgcgatttttcgggaggtagaggcgtaggagttagtttttttagttcggcggagtcgtagggatcgttttttttcgtcgttagttgcgcgtagttgtatttcggtaatttcgcgttgtcggttttttttttttagttttagttttcggtatttttacgattaacgcggaattttaggattaaaattatttggttaaagggtgcgggtgggggatcgaggcgttttcgaggcgaatgaggttgttttttaaaattcgggaggcgtttttcgttcggcgttgtattttttcgtggttcggttgtaaggatttgcggtggaggtttggcggaggcgggttcgcgttttagagagagcgttacgttattcgagaaggcgacgttgggggttgttgagttttttaattttttttggcgcgttttgtttagaagtcggggagtttttggtcggcggttggcggggaagcgcggcgcgggaggtggggtggtttggttggtgttgcgggagggcgtttcgggcgcgttaggggttgcgtgtcgcggttggagggcgcgtcgggagttgcggcgggttcggggtattcgagtggcgttggaagttgagtcggggttcgtagggttcggtgatcgttttggcgtcgtcgttgcggattcgggagtagtaattacgcggcgcgttcggtcgttttttcggttcgtcggtcgcgtttttcgttttttttttgtagaagtgaagtcgtcgtttgggttcgttcgggttggcgatttttgcgttagaaaagtttgaggtgttggaggcgaaattttttcgggagcgaagggcggcgtttataagataaggaaagggaagacgtcgggttttggcgggtagcgtagtagcgggagggcggcgttgagcgttaaggatttcggaggcgaggcgaggttaggcggatttaatttagttaggaggtgttgttttcgtttttggggtttttttataggtatttggtgttagttatagattttcgttttcgttagttcgtaattttttcgtaattttttttgaagtgcgatggattaagattgggtcgcga

SEQ ID NO: 7133 - DNA, 990 bp, Artificial Sequence
  Description of Artificial Sequence: Synthetic polynucleotide
cgtatattttgtgcggttcgagtggttcggatggtatagtttaggtgttcgggttaaagttggtatttttaaagtttagaacgtaatttgggcgcgttagtataaattcggttttcggtttttttgaagttagttaagttcgtatagggtttttagcgtttggaaatttgagaggcgtggaagggtggggagtttcgcgaagtttttagtttttgggtgtttttcggtttcgcgggggagcgggtttggagttaaatcggtcggtcgtaggttggagtagcgggcgtcggagcgcgcggtggggatgttcgaaaaggagttagaggtttagtcggagagttcgagaatacgagggatgtttattttgtaatatggttttaagtttttttttgtttacgcggaagcgtttttcgttttatttcgggttgtgtagggtcgtttcggcgattaagtcgttttcggagtcgggtattggggagtcggtgttgcgttcgttgttggagtcggggttcgattgcgtcgttaggtagtcgggttttttttgggcggttatggtgggcgcgtagcgttcgggttttcgttgtcgtcgtcgttttgtttgcgttgtcgttttcgttcgtcggtcgggtttaattggtttttagcgtcgcggcgttagttcgtttttttgtagtcgtcgacgttatcgttaacgtcgtcgtcgttattgagttttcggcgtattttagtttcgggcgtcgtttacgttattcgttatttcgggtcgcggtttcggttcgggtttagtggttgcgtcgtttttcgttagtaacgttcgcgcggaatgagcgcgtcgcgttgttcgcgtttttattcgtagggttcggcgtttttttttcgttcgtcgtttttatagtcgcgcgtttattggttcggttagtttacggggagtcgcggcgggcgggcggtttttggcgtttatatattcgcgcgcgtatatatatattacgt

SEQ ID NO: 7134 - DNA, 2274 bp, Artificial Sequence
  Description of Artificial Sequence: Synthetic polynucleotide
cgtgtcgggttcgtttttacgtcggattttcgatttcgatttatagatttttttcgtgaggggtttttttgggtttagaacgttttcgcgcgcgcgtgtaggtatatacgcgtatatatttatacgtttgttcgtatatcgttagtgttttttttttttatttgggattttcgggtagtcgggttggatgaataagttgtagttggtcgcggcgtttcgttagggggacgagggtggggagggggagtttagcggggcgtagggtcgtggttagggtttggggatttgttcgttttttttcgcggtcgttaagttttatcgttgggatcggcgaggaattttttttagttttttcgtagacgttgtacgatcgcggggatttttcggggtcgttagtcgcgtcgggtagggggcgatagggagggtagggtatcgggagatcgtcgtcgtcggagcggtcgttagttttcggcgatcgttgcgggcgtagtcgaatattagcggtttgggttcggtcgttgttcggggtcggcggggatcgcgtagcgtttacgttaggcggttcggcggttgtaattgggaattttaagtaaagttttttgttgttttttttgtagtcggttagggatttaagagtgtaagtcgtttaattttgagtattagtttaggtcgcggaaggacggcggtcgagttggtagtttcggttggggagttcgttttcggggttcgttcgtttcgttcgttcgaggattgggtgtttgttagttttacggtttttcgtttagcgttcggtttataggtagaagcggtgttcggttcgtcgcgtttttcgttcggtttcgacgttagttttagggttttattattagggagttgtcggcgtttcgggcgtttcgcgtcggttcgcgcgtttcgggggcggtagaggcggtttcgtttatttgagaacgtttcgttcgtcgtagttagtaaaagttcggttaaagtcgttaggtaagttttaagtttttttatggtgttgagtgcgggtcgggtcgtttttcggcggcggtgggtgggcgcgcgagggcggagggggtcgggagttttggtttcgaggtagcgaggagagacgggtaaatagtagagcgttaagttaagtttttaaagtgttaatagttgtagaagttcgaattttagcggttttaggggcgcgggtatagggttttgggttttttttttttgtttttggttttattcggcgtttggcgtcgttggtagagggagcggagggcgagttcgcggagttaaaattttttttcggtttcggttgttgagttcgtcgttttttttttttttttgttcgggattcgggattcgagttgttggtcgtggtcgtggcggtggtcgtggtcgtggtcgcgcgcgtttcgttcgtcgtttttttataggtagttttaagtttagtttcgggcggcggcgcgtcgatgatcgagttcgcgtcggttgcgcgcggggtttttgtttttcgattgattggcggtgtttcgtaggtcggttgaagggagcgtttacgttacggtcgttcggcgtcgtcgcggttcgttagagggcgtgagcgttcgtgtttcgtcggttcgcgttcgagcgttttcgggagttcggttgggggcggtttcgcggttatagttattatcgtcgtcgaagcgggcgttagtcgcgcggggaggagcggttatcgggtttttttcgtttattttttcgtttcggtcgcgttttttattttggtagttggttttggggagggtgattgtggaagaggttgcgtcgtcgttagaagtttgtttcgggttacgagtcgcgagtagtttgtgagcgcggtcgggcgggattagcggtttgcgatttcgcgggcgcggttaggcggtttcgagtttggcgtcggacggcgatgttatcgtatagggttagttgtattcggagtcgtcgggtttgcgttgttcggcggttgcgggaaaagcgagttaggagatcgttgaggtttcggagggttgcgagtttttttacgtcgcgggcggagcgaagttggcgggcgtcgggagatggcgcgggagtcgggagcgtcgagtttcgcgatcgttagttcgttttcggtcgggttcgtcgggtatacgtcgttggtttcgagtattggcgttcgggaagtagggcgcgtttttgttgttttgcgtttttattatgtttcggtgtttcgtgtgggttcgaagcgagtcgtaggtagtatacggaaggcgg

SEQ ID NO: 7135 - DNA, 882 bp, Artificial Sequence
  Description of Artificial Sequence: Synthetic polynucleotide
cgaaggttgtggtcgcgttttcgtcggttagtttttagtagtagtttatcgtttttgtttcgcgttttcgttttaggttcgtacggttttagtttcgcggggattagtattgagtcggtttcgtcgtcgttttagtgacgggttgttgttgcgggaagttaatcgtttagcgtttggaggagggcgacgaggtttttcgcgcgagcgagtattagaaagtagtcgggttttttcgttttatgttggttcggttggcgtagttcgatcgcggtcggtgtttgaggttgggggacgttttgattcgcgtcggtcgtttttcggtggttttgggcgcgtttcgtgtagtcgggaggttggaggcgttgcggtcggaggagttgggggagttggcgggcggtttggtgtgtttcggtttgcgcgaacggttattgttggcgaggaagtcgggcggcgagtttaaggttagggagggtcggttttggcgttcggcgcgtttcgcgatttgtttggttgttcggggttgttgtataagtcggtgatattgttttgcgggtttacggtttgtgagcgttgcgtggagttggggttcgcgcggttacgggcgcgggcgcgggcgcgggcgcgtgaacgtagtgttgagtcgtttgttggagaggtttttttcggtcgagtgttcgttgcgtaggttggagggttaggcgcggagtttgtagcgttagtagtagttcgaggtcgcgttgtttaggtgcgattaggttttggagttgtgatttggttgtggggtcggttcgtttttttgatttttgttaagtttagcggttggagttaattcgcgggtttgggttttcgagcgttttgtttaggcgtagggggttatttcgt

SEQ ID NO: 7136 - DNA, 4359 bp, Artificial Sequence
  Description of Artificial Sequence: Synthetic polynucleotide
cggagcgtttaatttagtatatcgttttcggtaaattgcgagtaatttaaagtagttcgtttagtagggaggggagttggtgggaggggggtggatttcgtcgttcgtagaggtggggagatttggggggcggtttcgtttttaggttgtagcgtgggtttggttttttgttaagttaggagcgtagttcggagttagcgcggttttcgggtttttgcgtttatggcgagggtcgcgggggaatagtttttggtaggtaatttgtcgggtatttatttgagtttttcgtatcgcggttcgaaaatttgggagcgttttaggataaagggttagttttttggaattagtcgtgtgtgattagtgtgtgttagttcgtatgtgggggttttagtgtgtaattaatttagttgtttatcgtagtttcggagaaacgagtacgtttttttgtacgtgtttagggcgggtgcggcgggtagtgtattgtgaataaagtcggttatttttcgcgtcgtatttcggggacgattttcggacggtttttcgcggagagtcgggcggatgagagcgtggtgtgtgtgtgtgtgtgtgtgtgtgtgtgtgtgtgtgtgtttgtgtgttttgtgtttttttaaggagtcggaggcggttcgcgaggtagggatttgttttaatttgttttatatttggcgcggttttttcgaagttcgggtggcgtttagggtcgggtaggtacgcggaggattagtagcgttcgttgtagaaaaagatatcgttaatttttatttagaagtttatattgttttgagatttggttttttatttttttttaaaaaaaaaaaatgtaaattgatggatgggttttaattgatgcgtaaaatgttttttttgagagtaagataggagggttagggaagggggaaataggtagttgatataatttttatagtttaattgtcgagaattcggatttggaggtaaattcgaggacgtattcgaggagtaggcgaggttgttttttagtaggacggtttggtatcggggcgtattgttggggatttgattttttcgtgtttttttattttagggattcgtagttggttcgcgcgttagggtatatacgggttgcgggagaaggtgaaagttaggatgtagtacgagtttcgagagtggtttgggttgtgttttttaagagaatagtcgaggttttcggcggttttgggaagttgtttttgggtcgggagagcgggaggcggcgacgtaaggacgcgttcggagtttgggcgcgtcgggggcgggcgtttggttggaagtggggtagtgttttttatgggaaagcgagattcggcgagttttttggttgtttttttagttttcgaggtgttcgttttcgcgcgtttgaggtagcgtagttcggagggcgaacgaatggcggttggtaaattttgagtgagagtgcgtttcggattcgaattgtcgaattgtggttgcggtagggtcggtcgagatataagttcgtttttttcgtttgttcgatgggttttagggagattttagttttagtttggtggagcgtttcgttcgagggagttgtgttattttgtttaggggtagggagggcggcgttttgggcgggtggggaagggtttttgtggtttttggggttttaagcgttttttttttcgtttttttttttatcggttttttttagttttttttgtttcgttttttttcggggttggttggatcggcgcggatttgttttagatttacggggagcgttttaggtttttaatgatagtttaaatgtggttgttggaaaagtcgaaagggatgtggttgacgtggggcgtgtttcgtttttttgtaagagtcggaaagggagttgggagtcgcgcggttggttttaggttttcgcgtttcgtcgttagtaagtaggtgggggagtcgtcgtcgtcgttagttttatttcgtttttaagtttcgttcgttgcgttttggtcgcgggcgtcgagagggtgcggggtttcgtcgtgttttttttattttgtttattaatttgtttgtttcgtttcgtttcgggcggttttagatacgggtttttcgcggtagtattcgcggttcgttcggcgtagtcgtcgtttcgatttttcggtttcggggggtaatgagggggtagtggaaggggtattgtttttcgggtattatttagagaaacgagatcgtttcgttttttcgtcggttttttttttttttcgttcgggttcgcgtaatttttcgttagagggtaagttgggagtgtttcgtttttatcgatagtttttttttttttttttttttttttttttttaaagtttttttagaagtgggagtcgggtgggggaggaagaaggtttggttagttttcgttttttattttattttttcggtttaatttgtttttttttttttttttttttttattttttgcgcgtcgttgttttttcggagttgcgttcgggaatgataattggagcgcggtttttttaagagttcggttttgtttttcggtagttgaaggttattaaatataaaagtttttagcgttgcggtttaatatagcgtatgcgttttgttcgaggattggtagagagacggtaatatggcgagaatgtttggtagcggggattgtaatattagcgcgggcggtagcgttagcgttgtcgtcgtcgtcgtcgagaataatggggagcggggcgagggcgagcgcggcgcggggggtcgcggtcgtcgttatagtcgttcgtattattgtagcgcgggtgaggaggaggaggaagaggaggaggaggacgagatttaggaggtgtagataacgggggacgaggaggaggaggaggacggaggtggggggttggaggaggacgaggaggaggaggaagaggaggagatggggttggattgggacgagtttttggagttcgaggattcggtcggggaggagttggagttcgagtcggtttatatgattaatatggattagagcgtcgcgttggagttcgaggcgtcgtcgcgattgttggcgtttcgggttcgcggtgggtcgttcggggacggtttcgagttggatttcgacgtgttgtagcgtttcgagcgggttcggttgagcgagaatattcggttggttattcgttacgtcgtgcgtatttttcgggagtatttgagcgagaaggcgtagagttcggatttcgagattatggataagggggcgttgtgtcgcgtgttgcgttttttttatgtcgaggttcgttttaaaagcggttagttttatagtaagtcgtcgtttattagtattcgtagtttttttaatcgttattttaatgagttttcgtattgtcgtacgttcgattttattaaggatttcgagttgcgtagcgttaatttgacgttggtcgcggttattcgtaagttcgaggagtagggcgtcgggtcggtggtgtagaagtaagttattacgcgcgtcgatttgcgtaagttgtatatttttagcgtttttagtattaatacgtttttcgggttgtttaataaggtttggttcgagacgtgtatgtatttttgtattcgcggtcgcgagaattagcgtgagttggaggaggatttttttgggttggttatggacgaggacggtcgtaagttcgtttattttaagtttttcgggttttattataagtcgcgttcgtcgtcgtggagtaagaagcgcgtcgagagtagcgacgaggagaatttgtttcgtatgtatgagacgggtatcgagttttgtttttacgttagtttcgttaagtatttgtcgaaacgtaattttttttgtaaggcgtttttttagcggtttcgggattattgtagcgagggcgatgtgatttggtacgagaataaagttatcggtaagaatttgttaggtattcggatgtagatgttttttaaggcggttaagttttttaagatttatattaattattgtatcggcgtcgtttttatcgttacgtttaatagtatcgcgggtattggtattaagttgggttcgttcgtttcgtagggttgttacgtcgaggttttgaacggggcggtacggtattatttttattatttttttatttattttttttattattatcgtttttagtcgttttcgttggggaatatttatattttttttaaagatagttaggtcgggttcgacgtgaaattcgaggttgcgtttaagcgcgttttgtacgagtttgtgttcgggtcgggggaaatttgcggttttattttttttaaaagattttgtattcgtttttcggagtttgtggatgcggtggtggtggttttcgtgaaatacga

SEQ ID NO: 7137 - DNA, 2762 bp, Artificial Sequence
  Description of Artificial Sequence: Synthetic polynucleotide
cggggcggtgttcggcgtattttaggttttttttcggcgatttttcgcgggttgtagtaaaatacggggcgtttcggcggggcgggggcgggcggttgtcgcggattcggtcggttatagtcgtagtttggtggttttcgattggttacgacgcgggcggggaggtttggcggaggagggaggcgggggcgagggcggcggcggcggcgggaggaataggagaggggagcgggtcgcgtagttaggtagcgcgtggggcgagcgcggggagagcggcggcggttcgtttaggtcgcgtagcggaggtcgagcggggtgcgcggtcggcgacggagggcggcgcgcgcgagtgagcggcgtagggcgaggatcggcgggcgggtgtcggtgcgcgggtagtaggggcggttgcggtagtagttgcgcgggacggagtcgcggcgggagagatcgcgtcggtttttcgttttatttttttgcggtcgaggtcggagaatagtttttaattcgtcgggggatcggaaagaggagtcgagaagcgtttttcggtttttacgtagcggaggcgcggagtggcgggattgttgttttttgtgggtgtagtacgtacgattcggagcgtttttttcgcggcgttgttttcggcgttttcgtcgcgtcgagcggttttggagcggggattcggaggaagtaaaattacgagttcgaaatttcgcgtggcggagtttttggggagcgttattcgttttatttttatttttatattttttatcggttaaggttttcgtcgttgtatttttcgcggttttcgttgcgtttcgggtcggagtcgagtcgtttgcgttgttatagtagtcgtttttatatattcgtagacgtttatacgttttttttttttgttttttcgttttttttttagttttttgatttttgggtttgttttattatttttggtgcgagtttcgcggatttcgcggttcgttatttgttattagttcgttttttattggcggggagcggagagtagcgaagaagggggtggggaggggaggggaagggaagggggtggaaattgtttggagtcgttttttcgcgtcgttgttggtgttgtcgttgtttttttttttttcgtcgtcgtcgtcgtcgtcgtcgtttttttcggtttttcgttcggttttttttcgtttttatgtgtcggatagcgggagcgttgcggattttgttgtcgttgttggcggttttgttttaggtacgcggcggttttcgcgggtcgggttacgggcggggtggggcgggcggcgtcgggtttttttgtttttcgcgtcgttgcggggtcgggttgcgtattcgggaagggaggtgttacgtcgcgtcgcgtcgcgtcgcgtggtcggtagttgcgtaggtatcgggtttcgttcgggcgtcggggtagggttgtcggggttagtaggtttttcgcgttttttttggcggggttttaggggttggattgcgggttttttttgtttttttttcggggtcgagtaagttcgcggggggtgtttttaggtagtaggagggtgaggtaggataatttttaggttttgtagttttttgtgtttttcgtttttcgtatagtattttgttttaatttttttgtttatttttgtagggatgggtcgcgagtttatagtaggaatttttattttggtgttttagttacgggatttgtttttattttattttattttgtattcgtgcgtttttcggtgtttaagggttttattgttttattgtttttattttagtttggagttgttttttttttttttttttttgtttttataatattttgtgttcgttttatttggaaagaaaatttggtttttttgttcggaggagtttttgtcggttagcgtttgtttgtagaacgagtttggttttttacgtttagtatttttttcgggcgagaagtttcgttacgcggttgtttttttttttgttcggttgtttgtgttttatatgcgtttcgggggcgtttttgtttggagtttttcgtattttttatattttcgggagagagttagcgagtttttttatttaatttttattaagaggttttttcgcggtaggaagtatttgttttagttcgggcgtaggttttttcgttattgtacgttgcgggtttttagttcgggggtagtttaatttttcgtcgtttttaattcgaggatgtttttaggtttttttcgattagttagtttaggtttggaggttattttatatagtttcggtcgggattttttagttgggcgggtgtagtgttttggttttaagtcggttttcgtttgtcgtggggtttttcgaaggttgcgggaaaggggcgtgtttattttcgtcgcggggtaggaaaatttacggagggtttttttgtttgtcgttttcggggtaaggggagaggtgttttattgttagttggtagtttcgaaaagtgcggacgtagttcggaagtgtttgtttcgggggtggagataggtggtgtggattatttcgtttcgtggtttttacgggttagggtttggcgcgtttcggttcgtcggggggtgagtgttgttggggcgggggtaggggttggacggggttggttttcgtagtttttcgcgttttttttcgtaatttttagacggtcgtgggtcgtcgtcgcgcggagttttgtttatggtgcgttatggtgcggtacgtttgtttttgttcggttttacgtttttttttcgggtcgt

SEQ ID NO: 7138 - DNA, 338 bp, Artificial Sequence
  Description of Artificial Sequence: Synthetic polynucleotide
cggagcgggggcggtttggagcgttgatcgggcgtcgaaacgtcgggagtcgggggttaagggttcgagttaggaggtttcggagtagtagtcgttcgttttttacgtcgtcgtcgtcgttttcgcggttgtttggatacgggataatcgatttggggtttcgatcgtagtagagtcggaggggtgggtaggcgcgggttcgggagacgcgcggggaaacgcgcggagtcggtgagtcgggggcgtttgtgtttcggcgcgggcgtttgtgtttcggcgcggggcgttgtcgggcggcgtttattttttttggtcgttcgtttgcgcgattttcgcgg

SEQ ID NO: 7139 - DNA, 1435 bp, Artificial Sequence
  Description of Artificial Sequence: Synthetic polynucleotide
cgggattcgtgtgtttttcggggtttaaaggcgttgggcgggcggttgttttcgggagaggcgtagtttttatttttggattacggggttagtggttggggaagtttttggggcgcgcgcggggaggcggcgttgcgttttatttgtttagtttcggacgtagttcgggggcgaggcgtttagggattattttaatttaatattgggatttttaataaattaaggaatgggattttaattattgaaaatttagtttttttgggttagaatggtgttgggatggttttggttataaaatattaaagagatcgatcgttaagggaataggaaaaacgttcgagatagtcgttgtaattacgaatggattagatttggtagtacggggtattgattgttggtgtttaatcggattttttttttttttttttatttttttttttatttaaagtaggttttcgttgcggtcgggatttcgtatttttgtaacgtggtcggggttgtattttttatgagtttagggtgaataggtgcgaagtgcgttgggagtattcggttagcggtcgagcgcggggaatatggagagcgagcgcgatatgtatcgttagttttaggattggtgttttaggatttacggggatttaggtaagattaagacggtgattcgtaaaaaatacgaacggatcgtttagttttttaatggtttcgagtcgagttttacggataacgttaaatttaaattttgggttaaatcgaagggtttttagttgggttagtcggacgaggttcgcgggggaggcggcggcgttaagtaagtgttttacgtgtttgttaagattacggtgagtgattcgtttttttttgttatttgtttgtcggagtagttcggcggggagggaggaaggagagaggcgggagagagggggagtcgtgagtcgtcgttggttcgtgtgttttttattttttttaattttttttttaagtcgtttttattcgtattagttaggcgcgttttttttattgtatagtttttgtggttttttattttaaagcggtagcgtatttttagagttggttttttttttcgtttcgggttttcggatcggttgtaggagttttttttttcgggtcgggcggcggcgtttggcgttttcgggttgggttattgttttatgtttttttttgggcgtttggcgcgtgttttatcgtcgttatcgcgtttaaaggttaggttggaagttcggtcgtacgttttgagagtagacgagtttgatcgatagtttatagtgtttttttattggtataaagttcgaatgtagcgttagcggtggatgtggggttttttttaggatattgttaggttttatcgttagatcgttgttcgggaggtacggggtagttcgaatgtttcgattatttttagagatcgttgtcgcga

SEQ ID NO: 7140 - DNA, 510 bp, Artificial Sequence
  Description of Artificial Sequence: Synthetic polynucleotide
cgagcgtgagttagcgttgaaggtttagagcgcgttgtacgagtagaagattttgttcggggtaagtggcgttcgtcgtggcgtaagcggtcgacgcgtcgatagggggcgatttcgggaggtcgggcggcggcgcggcgcgcggggagaggacggtagggcgttcgtcgtttcgtttgagttcgggagttcgcgcgtttttttaaatttttgggttttcggtcgttcgggtttaacgggattcgggataggggttttatttggtcgtggtcgtgaagtttttgcgcgggtagtttggggcgggggagcggcgcgtttcgggttttcggagcgggagttgttttcgtcgggttcgcgggtcgcgtgcgcgatcgagttcgtttatcgagtcgacgcgggtcgttttagtgggggaggagggggtcggcgtgggagggggcgtcgtaagtgagattatcgcggtttatttaaggagttagttttcgtttttgataaattatcgcgtttcgg

SEQ ID NO: 7141 - DNA, 2722 bp, Artificial Sequence
  Description of Artificial Sequence: Synthetic polynucleotide
cgaaagtggttagtcgagggtcggcgggggttaggttagtcgtttagtttcgtcgttttagttttttagtttcgtagttcgcgggggagcgggcgcgttattttaatttgttaggtttttgaagcgaagaggttgttttgaaaaagtaaatatgagagaggacggggtgtaggtaaatattattaacgtgaaaatttgttattttagttaagtttattattagtatttatttttataggcggggtcgttcggattttgttttcggtttcgcgtttgttattttttttttcgcgtagtcgagatgttagttttagtgggtttggcggggagttcggcggggttcggatcgggcggttcgattttcggtttttacggtaggaacgatttagtttcgtatttcgggagttgtaggtgtcgaaaacgaaattcgcgggggtagcgtacgtcgcgcgagtttcggttcggcggtaatttagatagcgatttaggggttttatttttttgatggtgattaaaaaaatatattttatttgaattcgtaaagtagacgagggtaaattaagttatttttcgcgttggtttatcggttatcgcgtttagcgttttttttttttttcggcgggcgagcgggtaggggcgttcgatttttatttttttttcgttagttatcgggggattagtcgcgtttttcggggcgggggaggtcgttcgggacggggatttttatttttcgttttcggaagcgggttggggcgggggtcggatttcgagtttttatttttcgtttttttgtttttcggcgcggttcgatagtttttagttttattttggtaggtggtttgggtggcggtagatgtcgggcgggaggaagatgtggggttgttttggtaggttgggggtgtgaggaggaaaaaaaaatagagaaagatatatatagagagatagggagagagcgcgcgcgagagagtttttgtttatagatttatttatataatatatatttatgtagttttttttttttcgatattgatgaatgcgcgttcggattttcgggcggattttttttaagtcggttcgtttttttagtttaaataaataaataaagttagatggaagaaaaaagcgtttattttattttcgtcgtcgtttcgttcgttatttttgtttttgtttcgttcgtttggcgttttaatagagtatagtttggtggataaagtttttttatatatttatacgaaaataaaaattattatttttaaaatataaaaagttgtatttgttgttattataaaaagaatttttaaaaggtaaagagaggaggtcggttgttcggttttttacggatattcgtttttcgcggtcgtcgggttcggaattttagcgtttttcgaagagttatgcgtttggcgttatttatagtcgggggtcgtttcggattgtattatcgttacggcgcggggtcgtcgacgggggaggcgcggtggtcgtcgttttacgtcgttttgttttcggtcgtcgttcgtcgtggcgcgggtttttatagcgcgtttattttcggtttttcgcgttttttttcgcgcgcgtatattcgttatttttatttttggtttggttgggaatttgaatcggtttagtttgtttaaacggaaaggatagagattttgtttgtttaatgtaaaaaaaaaaaaaaaaaaaaaaaaaagaaaaaaagaaaaaaaaaattagattagattgagagagagaggagagagggagagagagagggagagagagagggagagagagaggagagggagggagggagagagagaggggggagagtagagagagagcgcgagcgcgagcgagcgagagaagaggagaaagagagagagtagagagcgagcggagagcgaggtgtagagaaatcgagggggagagaattcgagtgtgtgtatgcgtgtgcgtgtgtgagcgcgagcgagcgagagagaggagcgagagagtgtgagcgagaaagaataaaaggaaagaagattttttttatgtatataaagatggttacgttagtaaacggataggttgataacgtaagttttagtattaacgggttcggtagtagttcgggtagtgtcgggtatatgaacggattaagttatagttcggggaattcgtcgattatttttatgaaggattacgatgttattaagttgtttattgggtagatttttcgtaatttggatgagaaggattttaagttttttttcgaggagtttggtaaaatttacgagtttacggttttgaaggataggtttataggtatgtataaaggtgagtatattttttttttttaattttgtcggggagtaggagcgggttggcgggtcgatcggtcggtcggcgattgacgagcggcggattaagcgagaggaagtttcgggcgggcgcggtggagggaggcgttcgggtagcggagattagagttggggtgcgtggggagttgttcgttggggtaagattgggttttgggcgaggtgttgataggaacgatgttatggagagagtagcgggcgtcgatgaagagaaagagagaggggatcgaggagacggggtttggatttttgggtatagcgatttgaaagatggggatggggaaggttgtatcggtcgagtttaggacgttgagcggacggattcgcgggtttttggtcggtcgaggatcgagggtgttgtttatcgtcgt

SEQ ID NO: 7142 - DNA, 1133 bp, Artificial Sequence
  Description of Artificial Sequence: Synthetic polynucleotide
cgagggcggtcgtttttattttcgggggtttttttaaaatggggtggggggaagttatcgttcgttttgcgttttcgcgggtgtgttttgagttttcggtcgttcgcggcgttcgttttcgtttcggtgtttgcggcgatttacgtttcgaagtagatttcgaaaggaaaaagcgatatttttgtttcgtatagagttaaatattggaagtacgagatagtcgacgtggattaggattattttggtttttcgtgcggcggcggcggcggcggttgcgcgcgggttttttgtggcgcggttttggggcgcgggcgcgggcggcggcggggttgcgggagtcgtcggggcgggaggcggagcgcggggcgcgggcggcggtggggcggcggttggcggggagatagatggtttatggaaaggtttttttttcggtttttttcgatatttaaaggcgttggggtcgtagttgtcgttatataaaggcgcgcgtagttaatgggagcggagcgtagcgcggcgcggtttcgtcggaatcgcgggggatagcggggatcgcgggcgcgcgggtggcggagggagggaggggtgacggttggaagggggtcggcggttaatcgttgcggttcgttgcggggcgcgagggaggggttagttttacgggaagcgtggagtttagcgcgggtttttggtcgttcgcgggtcggagagggcgcgcgtgaagcgtttttgtatagatatgggcggcgtgaatacggaacgtgtatatatggagagggacgtgtatttagatatgtggaggtgcgttttttagtgtagagagacgggtacgagcgtttttagtgtatacgattttgaggtttttgtatatcgcgtacgggttattcggggacgtgcgttcggaggttggcgtacgtgtagagtttgattgcgggtataagggaagttggaatgcgaataagtagtcgtaaataggatttaggtattgttatatagatatgtatatattaaacgttttgttaacgtaggacgcgtgttaagaacgtatttttagagatatatagagggaatatacgatgtagatataggtaagatacgtatattttttaggttttttgtttggcgtatcgcgtcgt

SEQ ID NO: 7143 - DNA, 2401 bp, Artificial Sequence
  Description of Artificial Sequence: Synthetic polynucleotide
cggtttgatcggggcgtttcgtcgtttttttagtgtattttatcgttttcggttgggggcgtagtattttggagagaggcgtttggtttcgcgtttgggttgggggcgttttattttgcgttttgggggttaggggcgtttgtcgggtcgttgtcgaggggttttgtttatttttgtttagttcggagtttaggcgagttagcgcggcgagtttttttttttttcgtttgggtcgttttgagttcgcgttcgttttagttgttgtagttgttgttgttggcggttgcggggagcgcggggcgcgcgtcgaagaggtttgggcggcgaggacggggacgaggaggagtcggaggcggtaaggaggaagagcgagcggaggtcgaggggtttagcggcgtggcgataggattagggggtttcgagaatatgggttagtaggcggttacgggtcggcggtcggacgcggtgaatttgtcgcggtcgggcgcgtattggcgcggcgagtcggagtcgagcgtagtcgggggaggagggttggcgtaggggcgttcgggcggagggggtcgattatttattattaacgagttattatttaataagcggagagcggttcgttagtcgcgcgggaggcgttcggggaagggggttatcggtcgagcgtagcgtatattcgtggcgtacggcgggcggcgcggcgtcgaggatattcgggatcgcgcgcggagtcggggcgggttcgggggcggcgtagatttcgggcgcgggcggttcgcggcgttttttggttttcggcgttcggggttagcgtagttcggggcgagcggggcgcgggtcggggagggggagttgttcgcgtattttatttttttttttttcgggcgggcggcggcggttcgttgtatatatttcggcgtatttcgttaggtcgcgtatagcgtttcgagtttaggcgttttttcgtttttttttcgcgttttgcggcggcggcggcggcggtagtagtagtagtaatatggttgttgatgggtgtttggggtggcgttggcggcgggaggagttttttcgagtttttgcgtcggttgttcgttgttagttatggtaaatggtggcggcggcggcggcggtagtagcggcggcggcggcggcggcggaggtagtagttttagaatgagtagtaatatttacgcgaattattttagtttagacgcgttttttttttttttttttttttttttttttttttttttttttttttttttttttttttcgtttttggtttacgagtttaagatggatgcgtttattatttcggtgattatggaggtgtcgtgcgatagtcggggttaacgtatgtggtgggtttttttggttttttttatggtgatttttttcgggggtttttttattattttgttttggcggacgtttaagtatttgtggatcgtgtgttgttattgcgggggtaagacgaaggtaacgcgcgtttcgggcgttcgttttttgcgttagttttatcgtttttcggcgttttttgtagtttattttttcgtttcgcgtcgcgtcgtgtttttttttattttcgtttgtttttttttcgtcgtttttttttttttcggttttttcggtgttttcggatcggggtagcgggcggcgcgtcgggggtgaggagttgtttttagttagtgcgtttcgggacgcggacgtttaattttgtttttttgtttattgtagggttgttggcggttgcggttggggtcggggtcggggatttataggttcgggtgtcgtggtgcggggtggggatagttaatttagcggggacggaggaagttgggggtagttgggtgcgtgttttgtatcgtttatttgtcggggttcggtttttggcggtgggcgagagggagtatattcgtttatattttaggaatttgttggggagatgagttcgtggggttagaaagaagggaaaaattttttgggtaagggagagaataattttgtataagggaatttcgggggaggagtatggttcgagataatagggggatttcgaggggcgagagaagttggggagatttattttattattgggggtagtttacggggttgttatttttggaatgtgtcgaggtcgtatatttgatgtaattttttatttcgttttttaggtgttttagtggaatatattttaagtttttcggtttttgtttttttgtttttaggttatttattttgggttttcggaaatgttattagtagcgcggagttggagcgggagttcgtttgaggtcgcggttttacgcggagcgttttttttggcgttcgaggtggttagatgtcgtcggttttagttatttttggtgtagacgtttatcggtattgaggttggcgatattttcga

SEQ ID NO: 7144 - DNA, 769 bp, Artificial Sequence
  Description of Artificial Sequence: Synthetic polynucleotide
cgttgagtcgtagggaagttgcggggttagttgagtagtcggcggtttgttgggtttttagtgtcgcgcgatagtacgattcgagataaggtatttggggttggtgttaggtagaggtttcgcgttgcgtggtcggcggtaatagcgtttggcggtcggtttcgggcggggttgtaggcgtcgggttttcgcggtcgcgaggcggggttggagggcgttgcgggttgcgcggaggttgcgggaagcgcggggagtacgcggagttcgattagtagggagatcgcgtcgcgtcgggtataggtacgggattcgcgttttaggagggcgtagcgagaggcgtattgcgtatttaggggttgcggtttcggtcgtcgtgcggtgataagttgatttttcgtcgtcgtttagttaagttcgcgcggggtgttggcggagatgtcgtatgggaggtttttttaacgaggtgtaaatttaagttatttcgtttgagtgaatgaagggacggcgcggggcgcgggtggggtttatcgtgataaaagtttagtatttggtttaaattttttttttttttttgttcgtaggattagaatattcgatattaaaatgttttagtgtagtagaattttttagcgatttcggtggcgggagagtagtattttttaggtatagttgtgcgtatttttcgggttttatcgatcgtattatttgatcgcgggaaacgaaatttgagtttaggaatttgaattgttttacgtacgttcgttttcgg

SEQ ID NO: 7145 - DNA, 1169 bp, Artificial Sequence
  Description of Artificial Sequence: Synthetic polynucleotide
cgggagttaggcgcgcgggcgggggttttatcggttatttcgaaatcgtagaatgttttagggttttcgggatttgtgggtttaggggaacgttcgggacgcggagcgggtttagtttatttgtcggacgtttttttcgtttattcgaattcgggagtttcgtaggagggatttttttcgtttttagtgattatagttcggattcgggttgcgttcggcgggtaaggttgggagtttttcgggtcggaggacggggcgtatgggtttcgggtttgtagaattcgcggttgcgggagttgggtttttttttttttaattcgggtcgcgtttcggttggtcggaggaggtagagtaggggtgcggtcgtgtgttcgagcgggagtggggcgtttattttcggggagaagggggatcgggaaaggcgtagcgcgtcgagtattcgtttatatttcgttcgtttttcgcgcgagtcgggtgcgtttttaatcgaatcggggcgggcgtcgggagagtcgggttttttcgagattcgcgtttttttttcgttttcggtttattcgggttttcgtaggattagcgcgaatagacggggcgattcgcggtcgagatttttatttacgcgcgcggcgcggttagatcggcgagcgttttcggttcgacgtttttttcgattttcggattttgggcgttgagcgggagggggaggtattagtttcgttcggtttcgagtcgttttcgtttttttggttcgaatagggggattttaaggtttttttcgattttttcgcgttcgcgcgtatcgcgtattcggagaagaagttgcgcgcggaattattagataggagttcgcgtttttcgttttatcgtttattgcggtttcggttttttcgtcgcggattttttattttcggttttacggcgcgtttaattttatttgcggtttagatttcgcgagtttcgggtttcgtttattcggtcggcggttttttcggggcggagcgcggcgtttttggagtcggtatttcggatttcggcgtcgtttcgcgtatcgttttcgttttagtttttagtggcgcggcgttttttcgcgatattcgcgggtttttaggagcgagtcgattttcggttgggtttggagtcggggttaagtttattcggagggagtacgg

SEQ ID NO: 7146 - DNA, 6036 bp, Artificial Sequence
  Description of Artificial Sequence: Synthetic polynucleotide
cggtgcggttttgggtattgattacgtttatatgtgatggttttcgtaacgtgtaggtttcgttggggagaggttagcgcgggttttaggttttagggtttcgggtttattgtcgggattttttttagttttttttttattggtttcgttcgtcgcggttgcgtcgggtcgatattgattttagcgatttttggggtcgttttagttggtagttagtattttttttgggatggggtttaaatgttagtcggttcggcgtttgtattagggttttatcgtacgtagttcgttgttttttcgtttttcgttaaggggtgcgataggtagggggattcgttggtttttgttttttttatttttatttttttgggtttcgtcggagcgtttgggtttcgggttttttgaatatcgtttgggcggggttttttgtcggggttcggttatatttttattcgtatttttatagttggggttgagaatgaaaataatttttgtaaagtttttattagcgaattatcggcggttgtagtgattataggtttcgtttttgcgcgtcgtaaaggtttttagttggtaggttcgtcgcggcgtcgtttttttttagtttcgttttatttgcggcgggcgtcgttatttttttagcgttgtttttgcgaagtagcggatttagatttagattcggattcggaggttatcgtttttttcgttcggggttaagtaacggttttcgataggggaagggtcgcgcgtttagggttgggttaggacgtttttgttagcgttttacggtcgggatttgaggtttagcggtcgtttcgtttttttttggattttcgcggtatagaggtaaggtttttcggtgaggcgcgaggtcgtcgtgcgttgggcgggggttttgagagtggtggggttcgggtgggtagaggttttggggcgatttatgggggacgtttatagcgtaggtttatggggtagttagatcgcgtcgtagggtcgggagagaacgttttagaaggtcggtttaggttattattttaggagggtggcggaggtagtggtcggggtttttttcgcggtcgagtcggtggtggttgcgattattatggggttgggtatatagttgaaggggggtattcgggtcgagcggttgggggagtcgtgtcggttggcggggaagttttttacggcgatttttaggttttcgtgtacgaagggtgcggagatgggagttttggcgaggttgggatcgtttacgtcgttgtcgaggagggagagttggtcgtcggcgggggtttcggggggttttttggtttttaggttcggggacgtgttggagttggttttgggggcggcgattttttcggtttggattacggcgtcgttggttttgcgcggcgggggttcggtcggggcgttttcgggcgtggagtttcgtagtggtagggtcgtggcgggaagcgtgttgcgtaggatgtggggtacgtttttatttcggatgcgtcgttaggtcgtgttcggcgcggttattttggggagcggtcggggtttttcgtcgttgttgcggcgcgcggcgtcggttgaggtaggggtcgcggggacggcgtcgtcgggtttgcgggttacgttgatgtgcggtagcgacgcgtagcgtttgatagttttcggtcgggcggcgggcgcgcgtataggtaggcgggacgggttttcggaggtggtgtgtcgggtagggcgttcgttagggttgggtcgggtcgcggggggtcgttgtcgggtcggggtcgggttttgtcggggtgtcgttcggagtttttcgtagcgcgaggagtagaggaagacggcgggtagcgcgggtcggtcgcggcggggcgaggcgttttggggggtagaggtcgcggattcggtcgaggatagttcggagcggcggcgtcgtaagttcggcgattttttgatgaaggttagttgtcgtcggaagttcgagcggtcggaggattcgttgtcgttggagagggttgaggttatacgtattaggtttaggcggttttcgcgcgttttcgggttcgtttcggttttcgttcggtttttggggttcggtttcgggattgttcgagttagcggtggcggtttacgtcgggtcggtttttgtatgaacgggattcgtacgggcgatttttgcgttttgtgttgtttcgttagaagggtgcgcgtcggcgttttgggtatcggggaggtttcggggtcgggtagggttttagtagtttgggtgatcggggggcgttttttgggtaggggttgggaggcgggcgaggtttgggaggagttggaggagggggttttggcgaggcgggcgggcggtgtggcgtttttggggggttggtttagcgtcgttagtttcgaggttttggtaggtcggtgtaggtttcgcgatcgttgttgttcggggttcgggattttggttggagtcgcgggttgtgttaggtaagggggcgttatttttcgcggtgtggcgcgggggtcgggggtttttttgggttgggtacggggtgtcgggttggggacgtagattattgttcgttttcggagtatagttggtatttcgggcgtggttttttgtgtgttacgtggtttttcggggtttgtaggggaacgggggttttcgttggttttgattgaggttgcgttttttttttttggtcgtcgggtattgtttattttttttttcgtttgtcgtttttttttgtgtttggggggttgtagggtggattttattgatagttcggatacgaaggataggatggagtcggattcggacgaggtttttcgcgtggtagttgttgtttggtgtagttacgtgataattgaattggcgtttttttggatggcgcgttattttacgttatttaggtcggaggttcggttcgagttcgttgttttttcgtcgcgttttcgggatttttttgcgggtcgtttatttagtcgggtggttcggggtttgcggcgtcgtaggttagatacggggggtcggcgtttgggtagggtcgagttgatgtatcgttgtagaagttttttcgcggttcgcgggttgggcgagttgtcgcgttcgttttttgggttcgggtttttggtgatcgcgggttttcggtttcgtggatggacggtcggcggtttcgagggttcgggttcgttgagggagttggcggaggagtttagggagtagtagggcggggtttcgttagtaatgaggttgggttgggttcgggcgggcggcggggtagttggtgtagttttggacggggtaggggttttttttcggttttgcggacgttttcgcgtaaaagcgcgagggatggtcgatgtgcgtcggtgggttggcgtgggcgcggtcgtcgggggtttttcgttcgagtcgttgtcgtagaagtagtatacggtttttttagtgggcgtcgtgaggtatagcgattggagcgtttcgttttcgcgggttcggtcgggttttgagtcgtttttgtttgcgggggcgttcgggggtcggtttaggggtagttttagttttgttttgtttttgttcgcgtttcgagattgtttcgcgttgcggtcggcgtttttcgttttgtgtcggtgttttatggtttgtttggtagaggtggggcggtcggtgggtttttgtttgttcgttggtttttcgggttggtttttggggggtttttgtagcgtttcgtcgttgagcgaggcggcgttagagaagttgatcggcgtgtttttcgcggagttagtgtaggagtcgtttttttgggtcggggtcggggcgggtattaatatgtagacgggtacggggagtgcgcggcgatttggtattagcgcggaggttattttgcgtagtcgggtaggtacggcggtttttaggtattttcgtagtagttttagtttttggttcgcggcgtcgcgagggcgagaattcgtgggcgtcggttttttttttcgtcgtcggtgttttgtaaagtggaggtcggcgttttcggcgttttcgtcgcgttcggggtaggtcgagggtagtagtcgtagttttacgttttgttgtacgtagtgttcgtgtaaggttagcgcgttgaggttggaggcgtacgagaagttttcgtttggtttttttacggtaaagcgtacgttgtttgcgtttagtttagatggtagtcggtagcgttttcggtagtcggcgatgtttaggaagcgttttacgtagtttttttattgtaggttgaattgggtggtttcggggggattttgtggcgcgggcgttagcggtggcgttttgtttcggttgggaggtatggtttgttcggggttgtcgggtagttcgttagggttgatggtgtcgttgttttgttcgttgtaaggtttattggggatggagttggcgatggacgggttttcgaagttgtttagcgagtttatagagttgtagcggtttagtataagcggtgttttttgtacgtagtttttcgacgagttggacggcgtggcgttttttatttttaggtttcggtttcggttacgtcggggagtcggaatggttacgggtagcgaggtggtttcgggcgttcgttacgtgttgtttagtttagtttcgttggggtcggttttttttagtttttttagggaggagttattgttatttaggttattattttcgttggggtttgggcggtcggtcgaggatagcgaggaaagggagttgtatcgggatagcgagagtggttttttttgcgtcgttagtttttgtagtgttttgttggttatagatagcggggtagtcgttagtttttcgggaattttgtttaggtggtttgtcggtagttaggtttgttttcgggtttttggagagattttaggtttcgcgaggggttttgtattcgtttttgaggtatttttaagtagtggtacgtgttgataggtaggcgatagtttgatggtgcgtacgcgggcgtcggcggaggtggtttcgcgggtcgggggttcggtttggtagtcgggtaggttaaggttaagtcggttgggtcgaggttgtttatatttggggttttcgcggcgcgaagttagtgcggttagcgggtagggtagtatatgttcgcgtgggtagtattcgtcgttggtattgtcgttgttgaggttgtcgttggagaggttggcgtgggtcgttttgagtcgtagtagcgggtgcgttcggttttttgtttttcgtcgttcgtttttcgggtcgcggtatggcgagtaggattgggcgcggttttttcgtggcgttttttgtttcgggtttttagagttgaggttgaagttatcgtcggacgaggtgtgtagggcggagatgttttttattagttggtcgatgcgcgttattgtaagcgttagtttggttttggttttggtcgttacggttgtttttttattggtgtttttttttgtttttttgtcgtttcggcgggtgggcggggtgcgagttagcgtttgtttttgtaggaaggggttgtttaggaagagggatagcgcggtagggttggttggtttttcggtggtcgcggtcgtagttagggatgacggtgtatcgtcgtcgttaaagtagttcgaatcggaagtatagttttgggttaggtcgtttaggtgtcgtaggggcggtagcggttttttagtggcggtttcggttgtcggcgggttttgtttttttaggtgttttagcgtttgcgcgaggtgtcgtgcgtttagttcggtttttagcgttcgttgtttgcgtacgtataggttgggtacgtagttgtttggggatacggcggtggcggtcgtttggtgtttggcgggtcgatgggttagtaggttgcgtagggcggcggcgttgtttatggcgattattttgtgtttggagtgtattagattacgtagtatgtttacggcgtttaggttttatagtagtttttggttacgggcgttgcgggtcgataggttttagagcgtgtcgtacgcgttgtttacgatggttaggttgtgcga

SEQ ID NO: 7147 - DNA, 3400 bp, Artificial Sequence
  Description of Artificial Sequence: Synthetic polynucleotide
cgtgtagttgcggggtattcggggttgggtttatttgcgttcggggtcgtataggtaggtagagagagtcgggtttagggtataggtttgttttttgttttttgcgttcggggaagggggcggtatagagttagtgattatagcgtagcgcgtatttgttttcgtaggttttcggagcgttttcgcgcgtaagaaggcgtagatcgcgtcgtttttgtagtcgtcgtcgtcgttttcggttttgagcgaggagttgttttggggagatttgtcgtttaataagtgtttggtgttcgtttcgttggtggcgttgttgggttcggttttttagttgtgtcgcggtgagcgtaggttttttagaggtggggcgaggttggggtttatttgtgcgtttatttttttaaggaaaggcgttgtgtcgttagggtggggtttgggagttttttttttagggttgggttttgtacgtttttaaagttggtttgtgtatttttttttaagtgacgggttttgcgcgttttttttattcggtgtggattttttgcggggtttatttttttcgtcgcgagtaggttttggttttcggatgaattttgtgtaattttttttgtttcgtagcgttttgtcgttttttttttgcgttttttttggggatcgtttagttcgtgagcgtttttcgggggtatttttgcgattttttttttgttaggggttttttatagttcgtggtcggggggaagaatgattaattgaaagagcgaggttcggagaaggggcgtcgcggtagcggagtttcggagtttttttttacggttcgggggtatttttagttttagtcgtatcgggggagttttattttaattgtttagggaggggggttttaggggtgagggagggatggatagtgtggatcgtgtttcggtttagttgattcgggtttcgattttgtcgttgtagacgtcgtttttggggaggtagtattttaagtacgtgtgttcgagttttgggtttcgttaagtttagtttcgagggagttatcgtcgtttttggtaagagtttttttttattgatcgcgggtattgggatttttatttttaaggaaagaaggagttcgggtcggggggaaggtgggcgtttattttaggattttattttgttttgtagtttaagttcgaggtttaggcgtttttattagcgtcgtttgcgtttcgggtcgaggtagaggttagatttaagattttcgggagtcgggaggttgtagagaacgacgaagaggagttcggcgaggttatcggagaggtcgttcgggaggatcgtgtgattttcgtagatcggggatttaaggagaggtttcggagagaggggaagtcgcggaaggagaagtcgcggaaggaggagagatttaagaaagagaggtcgcggaaagaggagaggttacgggtcgttagggagtttcgggaagttttattttagcgttgggagttacgcgaagggggttatcggtcgtgggtacgggattttagggacgtcgagtttaggaagaagtaggtttgggtgttttcgaggcgtttcgacgaggagtagcggtttgggagtcgttagaagtttcgcgtaggtaaggggcgggattgagtcggtttcgcgtcggagtttaggggttttttttggacgtttcgcgattttggcgaaataaagcgagtgttgcggtcgtagagttatttgtttttttacgtttggattcggtattaagttcggggtttgaaagacggtggtggggcgttttaggtaggggagagatagcgagcgttatagggcggattcgggtcgtgcgcgaggagagacggtaagggaggttttacgggttttttaatacgtacggatattttagtcggttgtttgttggtttttattggggcgatgtttggggttcgaataaatatgggaaggggcgcgagttggggcgcgttcggattttcggggtaggagttcgcgcggcgtaggggttatcggtagttatattcggtggttattatgttgggtacgtggtgcgcgttgatgcgttttttcgataggttgatgagtagtttgttcgcgtaggcggtgggtacgtagtagggtgggcgcgttagggcggttttacggatttgtatttttagtagtagtattacgtggttgtcgtagcgcgggttgcggtcggattgaggttagtcgtatacgttttggtaattgttggtttggtaggtttcggggatgagtacggagcgttcggcgcggaggtttacgttgagttcgcgtagcgcgtacggttcgtcggcggcggtggttttcgcgttgcgttgtgttcgattcggttcgcgcggatttcgttcgcgttattttacgcgtaggttttgtagcgtttttaggagtagtagcgttcgtaggggatcgtcgaggtcgtcggggttatttgggtagagcgcgagtaggcgcgttagtagcggggttgtggtcggaggtagattcgggaggtttcgtagttcggtagtcgtcgtttgtagtttagtagttacgcggcgcgttagggtcgtggtttacggcgtcgacgtggggtcgtgtaggggcgtaggattttcggtggtggtcgtagtgggttttagtagtagtagtagcggtttttcgtcgtcgagtaggcgttttagcgtcgcggggttcgataggttgattaggttttgcgggaagtcggttagcgcgttcggatttagggttaggcgcggcgcggaggttcgggtcggggggattcgtagcgttcgtattaggcgcgtgagcgtttttaggaaggggtttgcgttgggtggcgatttttcgagtttcgcggatggtttggaattcgtaattggaggagttgagagcggttacgaggttacgtcgttttcgttcgtttttgtttcgtgtttcggtgtttgcgcgtatttgggcggcgggaagggtacggtgtttagttggtcgtgcgtaggtagcggcgcgggttcggatcgcggtagtaggagtagggtcggggttattcgtgtgaagtagcggtggtcgtcgtcgaatagtagtgtttgtagtcgggcggtatttagtcgggagtttgcggtgggtgggtacgcggttggtttaggggttgggggttcgggggtagtcgattcggtttttcgtttttttttacgcggatttatttttttcgcggggttgtagggttaaggttagttcggagtcgcgttaggttttcgtagggcggtttatcgttaatattaggtagcgggtgtttcgggaggggtagaggttttgcggagattagggtttagttcggttggatggaggtttatttagtttcgttttatcggtttttttttttttatcgttattggttttacgt

SEQ ID NO: 7148 - DNA, 1143 bp, Artificial Sequence
  Description of Artificial Sequence: Synthetic polynucleotide
cgggtttggcgttttgtttattttttcggacgggtagtttatttttttttattttcggttttcgtcgcgcgtattggcggcgttcgttttacgttttaagaatttcgttttttagggtgggtggggggtgtacgttcgatagggttaggttagggttaggcgtggagttcgcgtgcgtttcgggatttcgttcggggcgcgcgggaggcgtcgggggtcgcggaggcggggcggggaggggtcggcggcggcggcggcgcgcggaggagatcgtagtgcggtcggcgttaggattcgcgggggttttttaggtcgcggcgtttttcgtttttttttatttttcgattttttttcgtttttaaaatgaggaaacggagtaattcgttttaagttgtgtagtcgggatcgtttcggggtgtgtagtcggttcgcggaggtttttttgggggcgggcgcggggcgcggttcgggggcgttttttgagtaggtgagtacgtcggcggggagacgtggagagatttcgaggtcggggtggggggaaatttcgagggttttaggcgggggtgggttcgggacgtgcgtaggaagggtcggtgtgtgcgcgagtgtgcgcgtttcgggcgcgtagcgggtgcgcggttggggcggagggtgtttagaggcgatcggatttcgcgtggtggtggttggggttttttgggtgcgggtgtgcgcggttacgagtttcgggcgtgtgtattcgcgcgtttacgtggagggttgtgcgcgtgtggtcgaaaagcgtgtgcgcggttttgcgtagcgttttgcgtgttcgagtggttcggcgttggcgtttaggtgttttagtgtggggcggttgtgtgtgtgtcgggggcgggggataggtgcgtacgtttttaggtgtggagcgtttgtgcgcgcggatgcgcggggacgtgtgcgtatatttgtttttacgtggacgtggttttttgtttgtttgcgcgtagttgtgttcgagttttgtgtgtttttgtgcgtgtgtatgtattcgtatgcgtgtgagtatacgtgggattggaggattttatgggaggcgtattttggaggggtcgagatttattttttagtatcgtttattttttagttattagcggtcgg

SEQ ID NO: 7149 - DNA, 220 bp, Artificial Sequence
  Description of Artificial Sequence: Synthetic polynucleotide
cgtggtaaattcgggtttcgacgatagaggtagcgtagaagttcgtttttaaatgagataattttattaaaattataattttttgtatttttatagcgtttttttagtggcggagattttaggtgttttacgttagggtttattagagaatcggggcgatcgtaagtttagtcgcgggataggcgaggttcgttagttttacgaagcgttatcggtacgt

SEQ ID NO: 7150 - DNA, 1860 bp, Artificial Sequence
  Description of Artificial Sequence: Synthetic polynucleotide
cgtacggaagtttttgtttagttgttagcgcgcgtcgttaggggttgtattgaagttgtggattcgggatggggaggaggttggcggttttcgaagtagggtttatagcgggggagggttagcgtcgtttggcggtggttgcgcgtggttagtgcggatttaggttcggttcggtcggcgttgtttgcgtgtggttcgggcggagcgagggtttttggagttcggttcgttttgggttttaggaagttcggcgtgtagcgttagaggtcgcgtgtgttgggggagggaggagtatagattgtgtttgggggtatttaggacgaatttatagaggggtggttttgttttatttagggggtgtcgtgggtaaaggttttggggttatttgtttggtgttttggagggcgtagggtaggagtcgtcgaggttcgcgggttattgtggggcgcggaattttagattaggtattcgcggtttaattttcgggttaggggattcgcgggggttttacgaatttgtttggtttatttgtgtaatagaaattcgttcgcgtttagtagcgttcggggtcgtttgcgtcggattcgtagtttagtatttttcgcgttttggatttcgaggaggttaggtagagagcggttcgcgcggttttcgtttgcgtttttagtttcgcgttgggtagcgggatatgtttggtttcggcgtcgttatttcggttttcgtttgtttttgagtgcggagttcggagtttttttcgcggtgcgttgggttttagagggttagaggttattagggggtcggtatcggcgggagtttagtcgggcgcgttttcggtttttttttatttacgtttttcgcggtcgttcgggtttaggggcgtagcggggaggagatttcggttagggtcggggagcgcgagggcggggcggggttcggcggggaggggcgcgggcgggcggggatcggggcgggggtcgggttcgggggcggcggcggcgcgggcgggaggaggaggagtttttcgcgcggggtaggggcggagcgagcggtcgcgtcgcggagttaagtgagttcgtttcggagtcgcgtcgtcgtcggtttagtatttcgggcgttcgtcgttttcgtcgtcgtcgttagcgcggggatgtaggatgtaggcgggcgttaggttttagcggcggcggcggtagttgtagtagtagtagtttcggcggcggtagttttttttttggtcgatggacgtagagtcgtcgtcgtcgtcgttttgggtttggatggtgtcgggttcggtcgggttgtttcggtttagcgcgggggtcgtggttttttcggtgttgttcgtttcggtttcgtcgttcgcggtttcgttgtttttcggttttttcggttggtcggtttcgagcgagtcggtgttttcgttgttgtcgttgttttttgcgttagatttcgtcgtcgtcgtcgtcgcgtatttttttttcgcgttttacgggtaggtaacgtgttttcgtttcgtttcggttcgggtcgtcgttttttttgtttttgggcgcgttttgttcggttcggttttggttttcggttcgcgcgttttttttttcggcggttttcgtcgttttaaatttttaggacggagttcggtagtcgtgtttcggcgagaaagttcgtgtttggacgttcggtcgtttattttcgtagttttggtaggtgttttcgggtgtttggacggagtcgtggagggattcgtcgtttaggttcgcgtggggatcgtagggaattcgcgttacgtcgggggttattgtttatcgcgaggtgttgaagtggtttcgtgatcgtcgcgggtcgtggttgatatcgcgg

SEQ ID NO: 7151 - DNA, 441 bp, Artificial Sequence
  Description of Artificial Sequence: Synthetic polynucleotide
cgtcggggtttcggttgttagcgcggtcgttatcgtatggttgaaggggattgaggtcgagttgggtaagaattttgggcgtagattgtgaagttgattgcggggaggtttgggtttcgttatagtcgttttttatcggttttaattagtttcgttttttttttcgggatgtcggatcggtatttttattatttttaggtttttagggggttttggcgttttagttgtggattttttaatattcgtaggtcgtagggttatataggttgggtttttacgtgtagaggatataaagtagatagacgaaaattggagtttcggcggtagcgagaaataaaggtcgcgttaaatttcggaagtcgttttgtttgttttagttgcgggtttgattggacggtttttcgtttagtgttttcgattggataacgtttaaggtttcgt

SEQ ID NO: 7152 - DNA, 5587 bp, Artificial Sequence
  Description of Artificial Sequence: Synthetic polynucleotide
cgcgggaagaaggttttggggggggcgttttcgatttaattaggaaggagtatgtatatgtaaatgcgtttagggggcgggttttgggttcggagtttttcggggcgtttcggcgtagttttagttttgcgttattttcgcgcgtgcgtttttttttcgcgattttttattcgagtcgtgtttttggcgtagtaggatcgtttgtttcgatggcggcgacgttgacgaggtagtagtagttgtcgcgattgtggtggtgggcgtgtgggtcgtcgaggttgtcgcggtttcggggattgcgggatcgatggcggcgggagggttttcgggcggcgggtttttgtcgtcgcggtcgggttcggaggtggtacggttcgcggcgttcgcgttgttggcgttggcggcgttggttgggtcgtggcgacgcgggtcgttgttttggatgtgggatacggtttcggcggtttgtatgttgggcggcgcgaagcgcgagagtacgcgtagtatcgtttgggttttgtgtttttgcgtgtcgtcgtcgttgtagttcgatacgcggtattcgtatacgttttcgttttgtagtcgtacggtagatagtcgaagtcggtgtgagatgttattgttttggacgcgtacggtttgtaagagagtagggttagaggtcgggttgggtagtttttaaatttatttttttggttattttggtcgtcgcgtttttttattcgcgtattttaatatttttcggattttggtttgtttattattacgattcggttttttttttattcgcgtttatttagtggtatagggtttttaattttgcgtggacgttaggtagttagttttttggattgtgtttttacgtttttattacgttaattaaacgtttattttgtatttgtttcgtttatataaattaatattgtttgttttttcgtagttggcgttttagaagggtagagtttatttttttttttttttttttgtatttttaggaaattttaggttggattttttgttttttaatttttttacgtttttttcgtttcgacgcgttttaatcgatagtttcgttttagtcggttttttttatttttcggagtacggagggtttgttcgaatcgttttttaaggaaagttattttgttatcggatttcgttttttatagttaatattgtgtttttttaagaaggtaagtaacgttgaggttgttgtttggttttttggttatttgttattaattcgttttttcgcgggatttttagaagttttttagcgaagtgttttttttttgcgtttcggtggggatttcgggaagtattgttttacggtttttaataaatatttagggagtttttatttttgaatcgagtttacgaggaggtttcgttatttttaggtttttttacgttttaggtgggaagtttgggcgtatttttttttagagttagtaattttatgattcgggtttttcgtagtttggtataattattttttatttcgttttttgtaagtttgtaatatttcgtatttagattcgtaatttaggcggaggataaagggttgtagcggagggcgtagagtagatgtttagggcggggtagagggggcgggaagttggcgttacggtcgcggcgagggcgagtagtcgcgcgttttcggtgttaggaggaatgttcgtagagcggaggttggtaggcgcgagaggttttaagcgcgtagttcgattaaggggagttttataggttagcgtcgagtcgaattaggggatttaagttttggatttttgatttatataaaagagaattcgattttgtaatcggcgatagatggcgttcggatacgtcgagtagttatcgatgtaaggttgcgatcgttgttttatttgcgcggttttatatgcgcggtcgtcgcggtttgttaagggagggagttgcgggattcgaggcggttagaaggggtttttcgcggttcgcgttgggttttatatttacgttgattttagttgtatttttatttgttatttaaaatgtaaagagggagagagagacgtgaggttcgcggttttttggttaggggaattcggattcgtttttaggtaagggtattttttttcggtaggttaggatcgaaatcgttcgggggatgggggttgagggtataaaggacgttcggttttttaagagttttttaggaggaagcgggttttggagttagtatggtgtttgattaacgggtggttgttttggtgtatatttgtcggttgaattggggagattggatggatattagggtgggaaggaaagtttttttttttttttttgggtatttttaggttttgtcgcgtggtttaaaatttttttttagtttattgggagtcgtgaagaattggagggagggtcgttgtgtttggatagtatttagcgggaggtttagtgggagtaattttgggtgggattttgggagaatgtaggtgtgtgtaggtgtaggtgtgtgtgtaggtgtgtgtgtacgcgagtatattagagtgtgtaagagagtgtgggttttgaggtagataggtagcgtgggtttgttttcggttatagagaagtggtttttttgtgtttttgagggttggaggttttgtcggtttttcggtattcggttttttggtggtttttggaacgtagtcgtgggagttttggggtttttaaagtggtagagggcggggagagtttgatgggattaagggggttttttttattatttagtatttattagagggtcgtagttagcgagtacgagtaagcgattaggttgaggtgtggttttttaggggttgggcgtgaatggagttttgggaggtggtgggaatagcgatgttgttaaaataattgataggtttgggggtaattattgttgattttgaagatgttttgggatgcgaaggtggaagatgggttgcgttatagggcggcgttttgcgcgagtgaagttcgttgtttttttttttgggttagttttcgtcgtttcgggcgcgagtcgggcgcgcgtcggtatcgcgtgggcggcgggttattttgtttcgggcgttcggtacgttgagcgttagttcgtgtagtagttttcggggtggttttttgaggtattattattgaatttttagcgaatacgaggtggtttcgttggttcggaacgcgtagggtatttcgatgtcgtttttttttcgtattgttatatttttggggatttttgtgaatgtagttgggggtggggagagagagagaggcgtgattagttgtaggtcgggggtttggggtaatttaaagcgaggtagtcggtttttggttggttggttttgtgttttttatttcgtagttgttttttggcgtacggtcggaggggttagtaaagttcggggaagcggttgtagggtcgaggtagggatcggttatcggttgtttattgttttttttcggatggggcggggcggtaggggcgattcgtgtttttttttcgtttttggtcgtatcgttagagtttggttggggcgcgtttattttcgtttttcgtaggtatttttttcgtagtcggggtttcggcgggattgggaacgattcgggcgcggcgttgttgttgcggcgatttttcgtcgttcgtttttttttattttttcgggtttaggttgtatagcgggattgttggagatcgcgaagtttttcggttcgtttttttttttttttttttcggtggcggttttagtaaagattttttcgagtttatagcggtagtaaagttttcgcgtttatcgtcggttacgaagagtagtagggtatgtagtagtagaggcggtaggtattcgagggtatcgagtcggtttcgttgttttatttttcgcggggggcgcggtggcggcgggggttcgggagcggagaggcggcggtcgcgtgggttcggatcggtttcggttcgggttaggacgttttcgagtttgttatggtttcgcgcggcgtttttttttttggtcgtcggcggtcgttaattagtttcgttttttcgtcggtttgttcggtgcggtttcggcggggggcgttgcgcggggtgtgtaggagacgcggttttatcgggaggttgttggcgatcggttagtgtttttttttgttcggtcgtttataggacggtggggattcgcggtttagtttttgttcggcgggtcgggtaggggttgggtcgcgtcgggatttatttttggtcgagggagtgcgtgttacggagtcgcgagtttttgtttttttgtttttttttggttttgttttcgattgttatttttttcggttttcgtagtcgttttcgtcggttttttcgcggtttttttcgtagggcgagtgggcgtttagtcgcggcgcgtagatttggcgttcgatttagcgtagcgcggggagagcgggttcggcgtggcggattcggagtcggagagaggcggggagagggggaggggaggggaagggagggggcggttagtggttgggcgttaagtcgtttttatcgttgtatcgttttcgttttttttttttttgttatagttcgtttcgttttcgttttagagcgtttttttttttttttcgggggtcgttcggagggattatcgtttttttggttggagtatagtttcgtttcgtattcgtttgggttgggagtttttttatttaaattttttttggtttttttttagtttgtacggttcgagacggtcgtttatttttgtttttcgtgtgtttttcggttttttttgtagtttttagtttttaattttttattttagtttgggtaattagttgtttcgttgtttggtttaggtttgggttatgacggatgggtgggcgttcggggtcgcgagaagggcggaacgttgtgtttagtcggagattacgttgggtggcggcggtagcgtcgggagtttgtagtgcgcgagggagaagtgagcgtatagcgtttagcgagtaggtgtttgcggcgcggagagcgtatacgttagttagttcgtagcggtcgtgagtgacggtaggggcggcgggggtggggtggggtggggagcgtcgggtacgatttagggttcgggaggttttcgggagggggcggggtttttgtttttggatcgcgggtttttgtgtttttacgcgtttttcgtcggtcgtggttttttttttgttcggtgtaaagcgagatgtcgaggcggtaggaagtcggaatttatttttcgtttgttttggcgtattcggtatttcggtattttttttagtttttattcggagtttgttttttttttagttatttgagggagcgcggtttggttttcgaaggtaaatgcggggtggatatgtggttcggacgtagcgcgtagttatagttataggggcgagttttaaggttcgttttgggttttttttatttttttttttcgggagtttttagttagtgcgtttcggtatttttgtttttatttcggtttttacgttttagttttgattttaggttggggtggggtagttcggtggatttacgtgtttgttttttcggttattagtttttcggaggtatcgt

SEQ ID NO: 7153 - DNA, 3643 bp, Artificial Sequence
  Description of Artificial Sequence: Synthetic polynucleotide
cggcgcggcgcgattagtagtcggtttcgttcgttcgtagttttgtttttagcggcggttattgggatcgattgttcgttttcgatttaggtaagatgtttaattgcgatcgcgcgttttttaagatcgtttttcgagtttcgttataggtatacgcgtggtttaaatattttatttggttcgaaaagttagtagacgggggaaaaaaaaaaagttgtgcgagtagttagtcgggtagtttcggagttcgcggaggtcgttttttcgtcgtttagtcgtttagtcgtttatacgcgaggtcggttcggggcggcgcgtagttcgcggtatttcgttttcggttttgcgcgtttatttcggggcgcgtcgaggttatcgtagggtatttatttggtatttgtttttgagtgtgtagatcgtcgcggtttttatttgggtttttaaataagttttagggagaaagaaggaggtaaaaaaaaaaaatttaattatgtaaatggatttcggattgggaggcgcgggatggatttgacgtcgttattgtacgagttttcggagtagtttcgggtcgggtagatttatgggggcgcgttacggttacgttaggtttcgtcgtcggagtatttcgaagttaattaaagcggtaatgtttatttttttggcgatttttcgtgcgtgggtttattattttattattaaattcgatttcggcgggggcgggggttttgtttttacgttttttttttttttttttggtcgtttttttttttttttttttttcgttttttattttttttttttttttttcgtttttttaagtcgtttgttttttatttagtgaataatgaataaagatgtgagtgatgggaaaagatcgtttttttttttaattttagtagagagtaaagtcggttttaaagtaaaaatttagttgttagtattaaattgggaaagaaaatagcgcgtttttagttttattattttttttatatatatatacgtacgtatatatatacgtacgtacgtatattttattttaagtttatttaagttttggttggagattggggcgttaaggttagggcgcgcggggttgtttaattcgtcggggatattagggttggggaacggcgcgtgttttggttaggcgtgtttttcgcgtttattttcgtcggtttttttcgtcggtttttttcgcgtttttatatcggtcgattaggttcggcggttcgttcgggttgttcggtcgtcggatgcgtttagtaaacgcggtttttgtcggatttttgttaaattgtatagcggcggcggcggcggcggcggttgtcgggagaaggcgtaggaggaatcggagggtcgtatcgcgcgttcgtttatttcgtttttttcgttcgtttttcgtttcggtttcgtcggtcgtcggtttttattcgcgtatacgatttagtttttaggacgtatcgggtgttcgagtttcgtaggtcgggatatttcgtagttgtcgtattttttgttaaagtgaaaacgaaggcggttgataaattacgttttcggcgaggtattcgttagatataataatatttggtaaataaaattcggtcgtcgttgttattcgtacgcggggttgagatttcgttttgttttttttcggtttttagtttttggttattgcgtttttaattttaacgtttttcgttttttaatattttaattttttatttaattcgggaacggtggatatgttttttaataggtatatagtaggaattatttataatatagaagtgaaaagggggggatttaattttttatttgtttttaaagaaagttttgtcggagtttatttcgtagagtgaagagtgagtaatataggtttttttttgtttagttttttttttttttttttttttaattttttcgcgtttcgatttttttttattttatatatattcgtttatatggagatatttatattttaaattatttgtaaaattgtaatagatgggcgcgtcgagatttggatatttttttatttattaaaggaaagtttttttttaattttaatttttttttttttgtttaaaatatatttcgagtttcgtttacgattgttttttttaatttattttcgaaaaataatgttttgaagtaaatagaaaaaggtttattagtaaagattatttttattttagttatgtatttgcgttggggggacgggaggcgtttttttagattgtattttttttagacgtcgcgtaagttttgttttttttttgttttttagagtttttacgttcgtattttttcgttttgattggttttatttttttagtttgggattggtcggtttttttttttttataatttgttatttatttatttatttattttttttttggttttcggttgggtttttaggtcgaggttcggttggggtaggtgttgcgggcgtcgtttgcgtttgtaggcgttacggttttttttggggtcgcgggttcggattttggtattttagttttgaaattaatttttcggttttagtttggttaggttttcggggtataggaggtcgatgtaattataaaatggtagattttagcggttttcggcgttcgtaagtttgatatattgtaagtattagttaattttaattgaaaaaaaaaaaaggttgtaaattattttttttttacgggcggaggggtcggaatttcgtagtgagcgcggattagagaaagagcgtaaggcgaattttcgttttaggtagaggagaaaatggggaaagttatttgagtagaagttttcgcggttttagtttatttttttttttttttattttttttattttttagatttttttgaaagtttttcggggtttgagagtggttcgcgggtcgttcgcgggtggggggcgtcggtcgggttttcggagttggacgcggggtttcgatcgcgcgtcgggcgttaggtttcgggatttttttttaaagtaacggtttcgggatcgcgggcggggaggcggcggtttaggcgtaggtttcgttcgtcgtcgaagttttttagcgttatacgatgttcggtcgtagtcgtcggttcggttttttttttttttttttttattttttattcgttgatagtttttttcgttaacgttatagttacggatatttaattagatcgtattttttaatcgcgatggggcgagaaggaatcgggcggtaggtttcgtcgagatggggagggggaggggacgggggggtcgcgttaagagtttaaatttattttgttatttttcggacgtcgaagttgtttttttattcgtcgtcgttttttcgcgtcgcgtttttcgtatcgcgtcgcgtttcgtgattttttttttatttttgttttttttattttaaatattgaaacgcgggcgttaggagtaaattcgggtacgtaaacggagcgttgtaaaagattgtgtttaatgaataatgaaatatgtttatacgattgatttgattatttttcggggttgaggggggacgggcgttttgttcgcgcgttttattcgtttattcggtagagttttgcgaattgtttttagtttagtcggggtagggcgggttcgatttttattagtttttttttagaatcgtttcgt

SEQ ID NO: 7154 - DNA, 808 bp, Artificial Sequence
  Description of Artificial Sequence: Synthetic polynucleotide
cgggattttttatatttcgggtcgtagcgtattgtgcgagtggagggggtgagttttttagtagaggcgtaaggagggtgtagggtgcgcggtgtggttgtgggttgcggataggggtcgggggcgcgttcgggtcggtgtcgcgtggtgggagtagtaggcgcgtaggtagcggggagttttcgcgtatttagttcgcgggtgattattatgcggcggtagttgttttcggcgcggtgacggcgtttttaattgattttattatttttttttcgtaaggtgaagtgcggtcgttcgcggggttcgggcgcgggtagggtcggttggtagtcgcgggtcggcgggggtagcgttcggtttcggggtggtattatcgtcgggcgtcgcgttaacgaacgtaggcggcgggaggttcggcggcggggttcgcgtttttgtatcgcgatcgcgttagaaaatatttcggggttgggcggcgtttcggagacgtatttttttgttatttttatcgtttttggtaacgattattaatgttattatgttttatttttttttattttttttcgtttttagagtcgcgttcgcgcgttcgatttttaggcgtttcgttttttttggaattaataataatgatttttaattaattttttgttagggttgtttgttcgtgaatggggcgttttttcggttcgcgggcggtaggcgttttagttcgggcggggggttagttttcgttttttcggtcggattcgcgggggttcgtaattcgttcgggcgtcggttgggggtggtttcgtagttttttcgg

SEQ ID NO: 7155 - DNA, 3415 bp, Artificial Sequence
  Description of Artificial Sequence: Synthetic polynucleotide
cgggggtttttttgcgtgtttcgatatggtagtatggttgttgcgtgtatttcgtatagttcgtgttgtgcgtggcgggttgtcgttgtaatgtgtagtttattgatattgatggatgcgttaatggttggacggatagatgttagggcggatcgtatagcgttcggcgtttgagcgggggagggttaggtagcgatttagcggcggcggtcggttacgcggagattcgagtttaggtcgcggttcgtagtgggagggggtcgaaggaatagaggtttgtaagaatagcgaggggatggaaaggaggagaaaagcgcgattagggagaattatacgttttcgtgtgcggcgtttcgcgttgtgtatacgtcgtatcgggcgcgtttaagtgggagtttcgaaggtgagttgggagtcggcgggagttgatttcgtgcggcgtaattcgtttttaggcgataggagtttagcgcggttattagaatggtgaggtcgtcggcggtgtcggttaatttatcgttttttcgtttgtaagaagcgttttacgttttacggtcgcgttttttcggtttggaggagtagcggttttggtttttgcggtcgcgggtatttaacgcgtacggcgttttagttttcgagttcgttagttcgagagtttcgtcgtagttcgtttcggattttttgtttcgtttggggttcgtattttataatttcgagcgtttttgcgcgcggaaaggcgttggaggcggttttatagtcggggaggttagcggcggcgtatttgtattttgggagacgtttggatttagtttaagttcgtaggttgggcgagcggagatttttgattttatcgtgtgggtgagattattgtttttcggtttaaaagaaaagaaagtatgttgtgaatttttgaaataaatttgtaaaaatagtcgtagagaaaaaataaaaaggatatagggtagaaaaagagggagaaagagattaaaaaaagaaaaagataaggggagggggaaggaaggaaggagagaaggaggaagaagtttggggtttgttgttttaggagcgtttaggtagtcggtgttggagcgcggggcgttcgttttcgtcgggattgtcggtttcggggtttgcgagagcgttagagttttagtcggcgcgttcgggcgtagggtcgtttcggggatagtgggttcggaggtcgttttcgcgttttagtagtcgtcgttcggtagcgttcggagtcggtttcggcgcggtcgttttattttcggtttgagagttggtttagggagacgtaatcgagttcgtagcgtatcgatgcgtcgtcgttcgcgtcgttcgggtttcggttttcgtttagtcgtcgtcgttcgggggtcgttcgtatgagtttcggtttattcgcgtttttatcgtcgttcgtaagtgagttcgcgtcgtttcgtcgtttacgtcgtttagttagtttttttttgtcgcggttagtcggtcgggtcggttcggagttttagcgatttcgattattaattaataattaatttttttagtttagtagtttcggtaggtcgggcgcgggatacggcgcggcggttttttaggttttcggggggagtttttggcgggggatgggtaggggagttcggtttttttttttcgttttcgtttcgttttaggatcggttcgcgtcgtggatggggggcgcggttcggttttcgggggcgaggggcggggtggagggattttgattattttaaagttaggagaggaaatttgaaggaatttttttttatatcgattttcgggacgggtttaggaaagtttgttcggggaaaaaaaattgggggaagtggttacggcgggttttgggggaggagttgggtggcgcggggtttgagggttgtttttattcgtttcggttcgcgttcgttttttttttggagggggtttgttcgtgggttttggttttttcgggggacgttagtttcggttcggggattacgttgggggtttcggagtcggcgggtggagaggagtgcgagtcgggtggggtagttggggggtggttggggacgaacgttgggtgggaataggggtggggggtaacgagcgtttcgggacgggttcggcggggttggcgtcgcgttttcgcgtgtgcgtacggggcggaggcggaggggcggtatttttttcgttggcggggcgggggttttacgcgggtttggggtcgggggcgggggcgcggcgttttcgcgggcgggcgattgatacgattattttttttttttttaagtttgtttgttgtcgacgtcgtcgttttagtcgcgttacgggtagaagattggatcgtcgagtttcgggtcgcggcggcggttgcgcgttttttcggatgtcgtgattttcggtttaggggcgggggtcggggtagtatcggttcgggtcgttttcgcgtttttttttttatcgttttgttcgtttttttttcgttttttagtttcgaatttcgcgtatttcgtttggggacggggcgggggggggtagggtcgtcgttttttttcgttttttttttttttggtttttggagcgatttgttaaattttttatttcgtcggtagcgcggttttttttttttttttttattttttttttttttgtttttttttttttttcgtgttttttttttttcgagtttttttcgttcgttttttttttttttttcgtacgttcggggttcgcggcggagcgcggcgcgggggggacgcggagagtttgggcgtagtagtattttgcgggcggtcgtttttcgggggggaggttgagagtaggttcgtttcgttttttcgcgggttcgtcgttttttttttttttgtttttagttcggtagcggcggcggcggcggtagtggtagtcgtcggagaagtattatgtcgaggaggaagtagtaggcgtttcggcgcgtagtaggtacgagtcgtttttttttttttttgtttttttttttttttttttttgttcgtttcgcgtttttagcgggcgcgatttcgtttttcgtttcgtttttttgttcgtattgagtaatttcgggcgtcgtttttttgtttgggtgcgtgcgttcgtttcgggtatcgggcgtttttcggacgtttcgtcgcgttttgtttttttttttttcgtatttatttggggagtcgttcgcggagcgcgttgagtcgcgttaggtttttatttttttagtttttcggttgtagagggaatgggaagtaatttcggtttggttttttttgtgggtggcgggcggggttatttgagtttttcgggatatttttcgcgtttttcgagcggtcgatcgtcgggggattgtttggtgttcgtcgagttagggagcgcgaacgagtgagcgagtcggttttttcgg

SEQ ID NO: 7156 - DNA, 3415 bp, Artificial Sequence; identical to SEQ ID NO: 7155
  Description of Artificial Sequence: Synthetic polynucleotide

SEQ ID NO: 7157 - DNA, 1592 bp, Artificial Sequence
  Description of Artificial Sequence: Synthetic polynucleotide
cgtgttttttttcgttgattcggtcgtttattcgaggtagtttcggaatttcggattttagttatgcgcgtagggaattgtcgggtcgagcgagtttatcgaagtagtttcgcgtcgtgcgcgtttcgagcgttcgttttagttttcgggtgagcgtttttagtcgtcgttcggtcgcgtttgggtcgttttttcggttagggggtagcgggagtgtaggtagcgggaagggagtcggtttcgtaggtttcggggagcgagcgggcgcggggtaggcgtcgggcgggaggaagttagcgtaggcgtcggtcgagtttcgggagtcgaggttggaaacgttggagcgggcgttgtttatcgaaggcggttcgggatcgggacgcgggttcgagcgatcggagcgcgggttgtcgtggcgttggtcgtagtttaggttgatgtcgttggatcgggcgttgtcgttatcgtcgtcgtcgtcggatttcgttaggttggttcgtgggttgttcgtaggttgcgcgttgagtttcggaatcgtcgcgcgtcggggatttcgtttttcgcggtttagttcgttcgtttcggtttcggggtcgtcgttgtttttttttttgcggtttagcgcgggcgtcgtttcgtttttaggtttaggtcgcggttttcgtcgttttcgatcgggagagtcgtattcgggttttagttttcgtagggttagttcggttaggagtagggtcgtttcgttcgcgttcgttttggagcgttgtatggttcggttcgtcggttttggcgcgttattttcgttttcgtttttcgtcgtcgtttcggtcgggtcgtcgtatcgttcgttcgaagttcggagttcgtttcgggatttttgggcgcggggcggggcggggtcggcgtcgggtcggggtcgtttcggcggttacgcgcgggtcgggggacgcggcgttttgttcggcggcgcgcgcggcggaggaatgtaagtttttaggcgtcgggtcgcgtttttttttcgtcgcggtttcgcgcggggcggagggatttttttgcgggggtaggaatgcgaggaaggagacggcgttgcggtttttggaatgtggggggagtggcggcggtcgcgttgcgtcgggatttcggaggggcgtggaggtcgggttaggacgtaggggcgggcggcggaggtatcgcggggagagtttagggtttgcggggcgttcgggtcgtcgggtcgttgggaagagttcggattttcgtaggttgagttggaggtagttggcgttattcgggtcggagagatttaagtagtcgatagttttttttatatttcgttttattttttttttttgcgtcgttttgtttttcggcgttgtagggtcgatttagtttagtttggaatttacggcgtttcgttcgtttcgcgtttaggaatattgtgcgtttagcgtagatgcgtttttacgattttttgtttggttcggggttatgtggtcgcgtatcggtttttgaagtttttatttgattgttggggaaggcgtttagaattaggagcgggttggttggggattggttttcgcgttgggtcgtttcgt

SEQ ID NO: 7158 - DNA, 903 bp, Artificial Sequence
  Description of Artificial Sequence: Synthetic polynucleotide
cgggttcggttggtttttagtaggtttgtcggggtttttgtattttgtgttcgggatttttaatttgcgaatagtttggggaggttgagcgcgagttaggagcggattcgggggtgggggtaagcgttacgtgcgcgttaggtttttggtgtgttcggtaggcggcgttgcgtggttgcggttggtttcgagggtgcggggggcggcgattcgggagggaaaatttttgttttttttcggggtttgttttgttcgttttttaaattcgttttatatttttttcgattttcgtttttgtaagcgttatttgtagttttatcggttttcgtaacggtggtggtggttggtggggggtttcgaagtttgtttttggttagtcggatttcggtgggagatggaggtagaaatttcggttttttaggagaagggcgtttgtttatttttttatttttcggggtttggggagggggttgggtaggggcggaagcgagttggagtcgtgtttgtcgcggcgttgcggagtggaatagatggttggggaggggagagggtgcgtggcggggaggaggaggggtgcgggggtcggaggatagggaacgaggaatttcgaagtttggagttttttaggagaagttttttttttcgtttttttttagaaaggggggtatatatgcgtttgtttttttttcggagagttttggtttttgttttgtggtagattttgtcgcgtaattttttgttttagggcgcgttttttatttttaaattttcgtcgcgggacggggtggcggggttaggatcgttaggagcggttcgggtcgcgagggttaatggggtcgtttttttaggggcgaggaggcggcgggaaacgggttcggggtggggaacgagttttgggatcgt

SEQ ID NO: 7159 - DNA, 1592 bp, Artificial Sequence; identical to SEQ ID NO: 7157
  Description of Artificial Sequence: Synthetic polynucleotide

SEQ ID NO: 7160 - DNA, 382 bp, Artificial Sequence
  Description of Artificial Sequence: Synthetic polynucleotide
cgttttttatttttaatcgcgagataatacgggttagaggttaggaaattatgttagtattaatgcgggcgtttacgagtgcggtggatcgatgtggaagggtcgggacgtagttcgagttttagttttcgtcgtagcgatggtcgattttttagtcgcggacgttgaaagcgaggattttacgtcgatgatttttcggcgtattatgttcggcgggcgtttggttaaatagtttaagattgcggaattatattcgttattgtgtatttggacgttatttgtagatttagcgtttgcggggatttcggaaacgggagagcgggttttcggaaacggtgattaatgggaaacgtgattagatgttattaggcgaatagttcgt

SEQ ID NO: 7161 - DNA, 665 bp, Artificial Sequence
  Description of Artificial Sequence: Synthetic polynucleotide
cggggaagtagggtcgcgaaggtttttgggaaatgtagttcggcgtaggaagtagcggaacgattcgattttttttagtattaagttgcgtttttaattttttagagttgggttcgcgggaggtcgttcgtgtaaaatttaggttgagtttttttgcgcggagttgtgagttttggaatatcgtggtttgttttttaggacgcgtaaatagtgaagttagtttcgttcgggtgagtcgcgggggtttttgggaagcgtcgtttttggtgtaacggatcgagatttgtggcgtttttagttatcgatagcgtcggttttagtgtcgtttttgttttagttcgcgtcggttttgttattttggtagcgttaagtgtggaatcggggtttgtgttcgcgggtttggtggtgagttttcgggaaatcgttagttttgagcgtcggattttttgtgttgggtgggagtgggggttcgcggttttggtgttttaatttttggaggaggacgtcgggcggggcgatgtttgtgtttgtggttttttgaggtagtgggagtggcgtgtgaaggattgtgagagtttggcgtgaagtgattgttatttgttagatattcgtttggttgagtgtggtttcgggatcgtgttcgtaagcggatttcgtggaggcgt

SEQ ID NO: 7162 - DNA, 764 bp, Artificial Sequence
  Description of Artificial Sequence: Synthetic polynucleotide
cgcgggtatcggtttaataaggtgtagcgaatagtcgttcgttttcgttttaatttatagttttatattttacggtgttattgattttttcgtatttagttatataggacgtggataggtatacggggtgatagtttcgtattgaacggtattaatttttattcgtatcggagttatatagatggtttgcgacgagttttcggagatttatacgttattttttagtttattttcgatttgtagaatagaattggtggaagattttttttttgtttcgaaggttcggggaatttgtattcgggttttatcgttatttttagttggatggaatttagtttttacgggttcggaaagaagcgttttagttgttttcgttttcggaggatataaaggggtcgtcggtttaattttcgcggggttcgttgggaaacgtagttcggagtagaaaaggtcgcggcgtcgtagtgtttggtagtagcggtgtagtttcgcgtagggtttgtaatacggttttttttttattaggtttttttatattggttttttttcggttttttagagagttcgaaagttcggattttttgtagtttcgagtttggttcggttatagggacggggtttagcgttatattatacgggttggtgtggaagtgcgtaggtataagcgttttgcgcgttttttttagtaattagggcggggagttgagaatcgtaggttggtcgtagggaaaaggtttgtgcgtgggaacgcgttagtggcgcgt

SEQ ID NO: 7163 - DNA, 1394 bp, Artificial Sequence
  Description of Artificial Sequence: Synthetic polynucleotide
cgatgttaggtacgttataaacgtagatataaatcgtaaagattttagagattcgttatagttagcgttagagttaggtattatcgcgtagttttttttgcggtattattttaatttttcgttagagaacggtatacgcgtacgtagtagtttcgtgtacggaaatattatttcgttagcggttaggtattcggtttaggtacgcgggggcgcggcggtcgttatttagtaaatattataggtagtacgcgtcgcgttttggtttaggttcgcgatattggggttttttttatttaatttacgttagggttacggttataggtttagatttgaatattttatttttatcgggattttgtagttaatttttatttttttttaaatttttcgatttttcggtaggtgcggttttatattttttttttgttttttgaagggttttagcgttcgtttttcgcgcgtttgcgtattcgaggtagaagtcgatttttaaaggtttcggtgaggcgtcgttgggggcggggcggggttcgtagttttcgtttgttttcgagtcgagaattaaatgaaaaataaaaaggcggaatattgtttttttaaattttggatcgtagtgtttataggggagtaggtttggattatttttaatggtattggttagttacggggcggttattataggtagaggtttgaggcgagggatattgcggtttttttggtttcgttttttcggttcgattattttcgtcgagattcggttttacgcgtttttttcggttcggagtagttgcgggatttgttttcgttttttcgcgcgttagcgtattcgcgacggagataggcgttttttcgtattttggcgtcgttgatttttagggttgggttattttttgagtcgggtgaggttggggttgggagtcgggcgttattgtggtcgttgtttttttgagggaaaagagcgcggagtgggttaggttttgtaggtcgggttaaggtggagaaaaggtttttgtggagttttaggtcggtgtgttttttttttcgggattgagtttttgtagttttgaggtttggaggttcgggcggtagtaattgtgtcggattaggttcgtgggtgcggtttgtggtgtagttggagatcgaggtttcgcgtattttcgttcgcgttttagttatttaggttcggtcgtagcgaaaaggtttaagagggaagttagaggtgaacgttttaggatgaaggttttttgtaaaacgttgggatttagatttggggtgggtgtttggggtttaggaggatacgttggatagtttcgaaaagatatagtgggtggtttcgggcgtgggtaatcgggtgcggaattatagcgtattcggagttgcgaatttagacgcgg

SEQ ID NO: 7164 - DNA, 949 bp, Artificial Sequence
  Description of Artificial Sequence: Synthetic polynucleotide
cgttttagcgttttcgagttatatttgtgcggtttatttaacgcgatgtttggacgtagtttttagagaggaggtcgggattggaatacgtagtcggggaatggttgtaggtggtttagttttcgttttcgtttcgttttcgtttgggtttcgtgcggtttcgggtgcgtaggtgaaagttcggttttagcggtttcggttttgttatggatttcgcgttcggcgttttagattttcgcgtcgcgtcgttcgcgtttttgggtatttcgtaagtcgaggtgttggaggacgtgttgcgggagtagttcgggtcgttgttttagttggtcgttgtttgtcggtttaagcggttgttttcgggcggttattcgtttattgaaaatttttagttggtgttggagcggcggcgtgtggttaacgttaaggagcgtgagcgggtgagggatttttagggtcgacgttcgttttttttttttttgttttattattaaatatttggttaatattcgggggttcgtttatcgtttattttcgttcgaggcgatttcgagttttcgaggttttttacgtttttagtttgttaggagaatggtagtggttttttttttttgtattttcgtgtagttgttcgttggcggtcgttgcggtggtcgtttcgttcgttaattttttaggatttgtgtaggattcgggtttgggaggggatagaggaggggttttgataattttaaaaatgtttttttgggtaggtgttttaaaagtttcgcgtttagggggtgcgtttttattttatatcgtaggcgttggtgggtgtttgggacgcgtagggatttttttcgttttttttttttgttttttgtatttcggtttcgaagtatatacgagggtgaggagaaaggggggtttgacggaagtgattttttttttttaaagtaacgaaatacgacgt

SEQ ID NO: 7165 - DNA, 1365 bp, Artificial Sequence
  Description of Artificial Sequence: Synthetic polynucleotide
cgtttaatagtatcgttcggagcgtttatttttttttatttcgtaaaaaaaaaaaatagggttattggttcgggtcgagagtcgttttgggaagcgtttttgttattaagcgttatttcggggtgtgcgagggagttaagggacgcggagatcgggagtagggttgggtttttttgtagttttagcgttggttttttgtttatcgtatttaggcgttgcgtcgtttttatatttatttttttttattttagtagcgtgcgggggaagtttcgcgtcggggttttttttagtaagattgtcgcggttttcggttttaattgtaaggtaaacggtggtagagtttttttttattttagtcgtgtgtgatttttatatttagtgtttttttttgtattggggcgtcggtagtggcgatttaggttttttagttttcgtttagtttttcgcgtgcgggcgtcgggatcgtagtatttgtgacgtcgaagtttagtaggtcgtagacgggagttacgcgcggttttggtatagggtaaaaatttacgtttaggtaggcgggtagttacgatgtcgggtaagtttagggtagattttcggtggcgtatagggaagtagcggtttagaaggtcgggtggacgtaggcggagttcgacggttgggaggtcgtcggcgcgtaggggtcgggtttcgttaggatggtttcgatcgagaaaggggattcgaagcgttcgggagcgcggggcgtgttcgggttagtaggggatttgggcgtcggagagcggttagagcgcggaggtcggattcgagagttcgagggagcgggtggcgggttgtttcgcggtttggggttaggtatgacgcggtcgttgttcggacggacgtaaggaagggagttcgggagaagtgagaagattttgtaaaaggtagcgagtaagatcggttgtttgggaattttttggcgttcggcgaaggtttttaaatttggcggggcggggtatggggcggtttttttttattgcggttcgggcggggtttttaaagtttgtgagcgttcgttttgtgcgaggtaaggtgggtatagtattaaagagtgtgtttttttttttttttcgtttttaaaaatgtttattttggggcggtcgtggggaggattttgagttcgttggtgattttgggcgaaatatttagttatcgggtttcgttttttttttttgtttattgaagaagggatgttcgttttttcggggttttgtagaggcggagttgtgatttggagagcggtagggtagtgtttgcggttttggttttagttgattcgcgtcgtttttgacgtagaagtttcggttagatttatttaggatcgcgcgg

SEQ ID NO: 7166 - DNA, 2638 bp, Artificial Sequence
  Description of Artificial Sequence: Synthetic polynucleotide
cgtcgatagcgaagtggtaggtaatgggaatttgggcgggaagtaaagaattattacgatttatatcgcgtttaagtagtagtacgcgggaatttggtatatagtaggtaggcgtttatttaatatttgttatcggatttagtatttgggtagggagtttaggggtggagtggcggtttgggggatataaaggtttcgttagtttttagttgcgtttttcgtaacgcggggggcgggagtttagagttagagagagggggcgaaggaattcgtttttatttgtacgtcgtttggggttcggttaatttgtttaattatcgttttaaatgttagcgggtagtatataatacgcgtttattaataggtttaaagtgtcgtagcgttcgttttaaatgagaaaagtaggcgataaaagggggaaaaagttaagttttttaatttgaagaatgttttgggtcgtttcgaaattatttacgcgagtttaaaattcggagttagtttcgtagaaaagttgaggtttcggtgcgagggttgggggtgggaacgggggttgtgaataattcgttacgaaaattgggttttttaggaattagtttgtagtcgtttagtgaattcggagtcggaggataacgtcgttaatttagttttttaggttttttgttttattgttagagaaagttgatcgatttttaagaaggaaagcgagatttttttaaagcgggtataaatttaagtttttttcggtgtaggcgaagaattttggaggttaaggaagattttagaggtggattttaaaattttaattcgtaagaggggaaaagttaaagtaattttatttttatttaggtattggttagcgtagtttcgcgttcggtcgttagagagtagtttaatttcgtaaataagttttgtttgggatcggcgtagaaggttttattttttattttatggttaagttcgggggcgtattttgcgggtcgcggttttttatttttttcggcgcgttcgacgggtatttacggtgcgcgttttttcgggagataggggttcgttggagaggtacgggttgtttaggttcgggattattaggaaggggtatttagggtacgggggttttttaaagaacgcgttgttttgaggtttttttattgcgaataagattaaggcgaggtgaggtttaggttttcgggattgatagcgtcgcggtagggggttcgaggcgggagttggggattttagcgttttttacgcgcgttttacgggggttgtcgttaataaaggcggagggtaagggtgcgtttatttaagtaagggggacggtgggtcgttcgggttgagtagcggagcgtagcgggaatcgagagtggggggttgttttagcgggtatatattttcggcgaaatagtttcgcggtttttggaaagtgtttcggacgggttgcgggcgttttttcgtttgcggaggagatataaaggtaagagcgggtgagcggacgtagggtcgggatttttcgggggtggtcgcggtgtttttttattttcgagttcgagttgttgttttggtttttcgattcgttgattagggacgatttgatttcgtttaggtttcgttgcgtcgaggcgttatcgttgttcggtttttgtttttcgtttttttcgttttggaaggggattagttcgtcgttcgtttcgaggtcgtttttttcgtcggtcgtttcggcgttggagtcgtcgtttttttcgttgtcgtcgtcgtcgtcgtcgttttcgtcgtcgagttggggtatggtggggtcgcgggtcggggtcgtcgttttcggagtttttagtcgttcgcgttttgttcggttcggttcggcgtttttttcgttcgtttgcgggttcgttgcgttagtcgtcgtaataaagtttgatagggcgtggtttcgcgggaagcgggttcggcgttgttcggtcggggcgtaggcggttcggttcgggttttttcggtagcgtcgagtttagggttttttaattcgttatcgtcgtcgtttgtttcgtcggggcgttttagtttttggttcgtcggggaggggcgagcggggagggagggaggagggatcgtcgggttgggtaggggggtcggagggaggagtttcggttgtaagttgatattcgcgcgtttcgcggaattcggagagttgcggtgcgcgcgtatatatatatatatatacgtatttatatttatatgtttatattcgtattttttaggggttgcgtttttttgtaacgtgtatcgtttttaatttttttttgcgttttatattgtattttcggcggttttttttacggtttttttggagttttggaagttttgcgtttattttttcgtattttttaatttttttttaaagaatttttagaatttcgcgtaggtttttatttttttttatcgtatcggcgcgcgggcgggcggtattgttttttgcgggaaagtttcggacgtatatattggtcgcggggttttttttttgtttagagttttttcgagtgcgcgagttgatgtacggattaggatattggggatatttatggaatttcggaaaatgttcggcggtttttcgcgttttttttttgtggggttttaacgcgattttcgg

SEQ ID NO: 7167 - DNA, 1531 bp, Artificial Sequence
  Description of Artificial Sequence: Synthetic polynucleotide
cgaaagttcgtataaatcgtatagaaaacgaataaatgtttttcgaatgtgagcgaatttatagtttggttagaaaaatttaatattgattttcgtttttttaattatagaattttcgaggagaaggggatacgttaagcgggtttgttaataatttttatcgtatattttaaagcgttgtaaattatatcgattattttcgattggaagtcgatcggttgagattggacgtgaatttcgcgattcgattataaaaggttaggaggaaagaggtagaaaagttaaaaggatgattaggtaggtggttcgagcggttattttaagttaattttttagaaattattcgtattgttcgggttattttttttttaatattcgtggttttatttattatgatgttaagaaacgtgggttaggaatggggtgttgttttttgttcgaaatttggaggcgtcggttttttagacgttttcgggttcgggtagaggggcggtaggggcggggcgggcgggtttcgggtttgggcgcgcgggtaggtggggcgtggcgggggcgtggagagtttaggttcgcggttatcgtttcgtttcgggtcggtttaggaggagtcgcgtcgggttcggttataagaggtcggttagtaggcgtttcgttagtattcgttcgatttcggttcggagtatcgggcgtttagcgcgggtgaaggcggagtcgtagggttggtttttaaagggatgttttcgttcgagcggcgagattagtttcgttcgtttttcgtcgcggtcgcgtcgtagtcgtttacggtcgtcgatatggttttttattgcggcgataatttcggagtgtattcgtagttcggtttgttttcgttcgtcgttatcgtcgtcgtttcgggcgttttttcggtagttagggcgttttacgggttggtcgattacgtcgcgtcgtcggtcgtcgtcgttaatttttatttgtggtttaacgggttcggcgtgggaggttcgtttttcgtcgtcgtcgtagtcgtcgtcgcgtatttgggcgtttcgtcgtcgtcgtcgtttttcggggtcgcggtcgggttttttttgtagttatcgtttgtcgtcggtatttcggttgtttttagcggtttttcgcgtagttcgcgttcgtcgcgttcgtttcgttcgtcgcgttcgcggggttcggggagttgggttggttgtttatggttagtcgcgaggatttgatgaagatggtgcggtcgttttattcgtattcggcgtttatcgttatggttatttagagcgcgttcgagcgtaaatttatttttagttatatttattagttcgtcgtcgatagtttttttttttattagcgtagtaaggtcggttggtagaattttattcgttataatttgtcgtttaacgattgttttaagaaggtgtttcgcgacgaggacgatttaggtgagggtcgttggtaggtgttttttagtcggggagggcggacgcgggtcgtaagggtcggcgtaggggtcggtgtgcgg

SEQ ID NO: 7168 - DNA, 2045 bp, Artificial Sequence
  Description of Artificial Sequence: Synthetic polynucleotide
cggcgttttcgttttgtttgtatttttttttattgtttttttacgtttggaatgttttcgtttttgtagtttgtagatagcggaaatcgcgggtgtaaatgtgtaggggtcgttgatatgatcggttgtagaagtttatttagggttattcgaataggttagcgttcgggattgtataagaggttaggcgatgttgtgggtttttaaatttgtatagttgcgatattttgcgacgtgttattttatttttagtggggtggggtgggggatttttttcgtagttcgttgaaagcgaggtaggaattattgtaatttttttgtttaggttgaggtcgttatcgtttcgcggatgtacgcgttgtaggggcgtttttcgtcgcgggtacggcgcgggaagggatggggtttggtgggagtgggtaggtggcgggagaggcgcgtgttcgtgtattagaggttttcgtgcgtgatataggtcgatgagtttttgcgggttgtatttacgcggagttatagatcgaaaaggttagtcggtggtcggtgtgttaatatatatagagagacgttcgttaggcgcgttgtaggttgggacgaggttaggagggtttaggttggaggagggttgaggagggttgcgggggcgggtttcggcgtagggcgttcggagcggagggggcgggttcgaggcggggcgggtcgcggcgttgacgggttgtcgtcgttgtattcgtttttagttcgcggtgtcgagcgtaggcggaggtatatggtttcgacgggaggcgcgcggcgagtattcggagttcggttttttgtttgagtacggtagtcgcgttttcgttcgcgcgttttcgttttttcggtcggtagttcgcggatatgatcgtgtagtttttttttgggttgggatttgtttgaagattttttttatggaagcgatgtttttttagtaggagattttagggggatagtcggggcgttttttttttttgataggagtgtttcggttcgcgggaggtagttgtattaagaaggtgaggacgttgagcgggggttcgtgtttttcgtcgtcgtagtttttattgtcggcgcgcgtttttcgcgttcgttatagtagcgcgttaggcggacgtcgcgggaatttgacgttcgaggttcgcggtttttaatgagagttttagaatatttttcgtttttgacggttagcggtagcgtcgtcgtttttcgtagagcgttcgttttttcgtttttagagttttagttttttttcgagcgatttcgtagtttttttttcgtttttattcgtcgtcggttttgtagttcggttttttttttagtttaggcgcgcgggttgtagtgggcgatcgttttttttcgatttttcgtcgtgtttttgggtttttcgaagtggtttgggcgagtattgattgttttttggcggtgttagttttaaagttagggtcggcgatgtttgttcgggagcggtagtcggcgttgaagaaggtaggtagcggggttgcggcgttggtgggttcggtttttttatttgttcgtcgaggcgcggttgttttatagtagttttcggggggtagatatggggagtattgttttttatattagggttttggatgatttcgggttttttaggtgggggttatagtttgaggggcgattgtggatgataacgttcgatattacggggatatgtaggttcggttgggtttagaatcgagtagggtgggggcgggtgggttgtggttgggggttttgagggttgaggtgggggattttttttttgtattggtttttggtttttgggattttggtcgggttggatagggattcgggtgtcggtgtgggcgtgggggtagcgcgtgttttttgttaaagttgggagagggatgtaggtgataatttgtagcgttttatttcgataaatacggtcgttgtgttgcgggaggatttcgattcgggttaggtttcgttggaacggttttttgagtaagtgtacgtgggtcgcgggttgtcggtttttgtcgtttcgt

SEQ ID NO: 7169 - DNA, 476 bp, Artificial Sequence
  Description of Artificial Sequence: Synthetic polynucleotide
cgggcgatacgttttgggagggcgggttggcggtttttttagttcggagcgcgtggaggttgcgcgtaggggttcgggacgcgggatagggatttcgcgtagtttaggcgtcggggaatcggggttggagtcggggatttgagtttagcggacgtttttttcgtttggaggttcggtacggatcgggatattagggcgttcgtggtcgtggttcggtttttggttgttgcgggtcgcggtttttagtgggtttttaggatttttttttacggcgggtatttatcgaggttgagaggttacgtcgtgttgttggggtttttcgtcgattatatttttgggcgttagttcgggtagagatcgcggggattggttaggtcgggttaggtcgggtcgggggagggtcgcgttttcgggtttttgattttcggcggcgagaggaagcggtatttgggttatatttttttcgcgcgggtcga

SEQ ID NO: 7170 - DNA, 455 bp, Artificial Sequence
  Description of Artificial Sequence: Synthetic polynucleotide
cgtttttgtttagcgaggatcgtgtagaagcgggaatcgggtattggagggcgcgcgcggtacgcgtatttcggttggtattttttggtttcgcggggtcggaaagaatttcgaatattcggttttaaaaggtttttagttatttcgttttttttattttttatagtatagatggggaaattgaggtttggagaataagcgtggtatatttagggttatcggaagagtaatgagttgaattagagaggaggaacgggaagcgagatttttaagtaatgcggggtggttttcgggttatcggaggaggtatggtcgggtacgtttttaagtttcggtattcgtggtggttgtgttagtcgatatgagtttttttttttttaggaaggcgtaggattcggggaagttttcgcggttaggtcgtttgtttattcgtagatttcgggcgtcgttcgcgt

SEQ ID NO: 7171 - DNA, 749 bp, Artificial Sequence
  Description of Artificial Sequence: Synthetic polynucleotide
cggggattcgagttttcgggttgaggatcgcgggggattttaggtcgggacggagttttttttggttcgttgtgcgcgtacgtttggaaaggcgggatttaaggtagcgatgttgcgggaggttttgtagtgttaacgagttttcgaacggtttcgttttattttttttttgtgtgtttcgtaagtttttgtttagtaaatcgttatagtttcggcgcgcgagagtggcgttggtacgtttaaatttcggggtttttggttaggttaggggggcgggcgtgcggcggggtcgggtcgggtcgggtgcgtttagcgggtttcgggtatacgttttttatttgggcgaggttcggtgcgtaggcgtttagcgcgggggtagcggtcgggcgtttaagttcggcgcgggtaagagttggatagtttaggggtcgcgtcgggtcgagttgtcgttcgcgttatttttatcgtcgtcgttgttatcgttatcgttatcgtttgggttgtagtagatcgcgggagaacgtttgcgcgaagtttcggtgtagttttggcgggatcgtagtaattatcggagcgtgagtaatagtttttcggttggaggagttattgttttacgcgttcgcggttcgcgcgtcgaggtaagttttgggcgtttagtttagatcggcgttttcggattgggcgttttttgtttgttcggttttcgttttttttcgtagagcgagtttgtatttgggcgcgtcgttcga

SEQ ID NO: 7172 - DNA, 1134 bp, Artificial Sequence
  Description of Artificial Sequence: Synthetic polynucleotide
cgaggagggcggggcgttcggtttttagtcgcgcggttatcgtttgtttagtttggttggatttgagttcggttcgtcgatcgttggtcgaggcgtagttgaagtagttttttagtcgcggcgtttttattttttaattttacggtttttgcggcgcgggcgcgatgtagttggttcggggtgaaggtaaggcgcggggcgcggggcgcggggtattgggagcgaggtattggcgcgggatgttcggcgtaaggtgtagggcgcgggtcgtttttttttcgcgtttttttatttcgttaaagtttttttacgatggtttttatttcggttgggttagtttcgtaattttcgtttgttttttgttttttttttttttttcgagtcgcggggttttcggggcgcgcggattttcgttaggggtcgtgtaggcgcggagttttagtcggtttgttttgggttcgaagaaagttgtggtttggagttagttttttttttacgatttttgggggcgtttttttttttttttgagttcgcgatgggaaggcgtttttattttattttcggggtttttgagattttttggcgaggtggggcggcgcggtaggtgtagggttggggagggtttgatagttttggagagtgttcgattttagttcgtcgtcgttttttaggcggattttttagaggtaggttttagttttcggcgcggggaggcggcgcgttttagaggggcgtagggtgcgcgggggtcgttggtttttcgggtattttttttttgcggttttttcgttttttttcggagttggtgtttgaggtcgttgggattttagtttggcgttttttttcgtttcgagcgaggtaggtgtcgtgggcggtttcggttatttttgtatttcgagcgtttattttgtatttagttttaagtcggagagttttggggatagtcgagagtgttagtggttttatagggagattgagggttttgttttatttcgggcgtcgtgtgggtttgggttgtttatagtatttttgcgttttagtgataggagaagttaagcgcgaggttttttaatagttgcgtgtattttattttttaggtatttggaatttcggcgtttagaacgtgtttttcgg

SEQ ID NO: 7173 - DNA, 1645 bp, Artificial Sequence
  Description of Artificial Sequence: Synthetic polynucleotide
cggcgtttttttttcggaaaggacgttggatttagggcgcgttagtacgcgtagtagcggttcgcgagtcggtaggtgggtagtttcggcgcgggaggaaggggaagttatttttttttcggaagagggcgttggtttttttattttgtttttataataaggttatcggaggagaggaagtagttagttgtcgtttgcgttttgtaaagtatgtagttaggggagtagtttttggtgagtttagtgaatttgtttggcgcgtatttttattcgttggagagtgcgcgaggcggtagcggcgggagcgttggttatttttttagcgcggttttttttttttagaagttggatttagataaagcgtttaagaagtttttcggtagttttttttgcgaggcggtgagcggggagttcgtagtcgttagcgtaggggttttcgcggttatgtttagtgatatcgacgtcggggacgtatttgttagcgttgcggtagtggttaagtcggggttttcggacggtcgtaagggttttttttgcggggaggaggagttgtttttcgtcgttgtagtcgtcgtcgtcgtcgtcgtcgcggttgcggttattgtgcgttattttatggatagtttgagtttcgagcggtattatttttagtttttcggtttttaggggtcggagttggttgcgttttgtttatttttttcgtattaggcggcggttggggcgttttacggatttgtgtattcggtttttaacggggcgcgttatttttacggttttatgttgtttttcggcggttttttcgcggttgtgtgtttattcgggagggcgtagttcggtttaggagtcggtgcgggtagtggcgcgggcggtagtagcggcgggggcggcggttcgggtatttattagtatagttagggggtttcgttttacgggtcgtattttggagtcgtagcggcgggattttgcggaggattggggggtttgggggttttaggttttggttttcgtgtttacgtttatttgtgtaatcggtttttgtggtttaaattttatcgttattaaattgagatgattattacgaaatagggtaggtgagcgtagcgtggaggggtttttgggttcggggataaagggtgacgtgtggttttggggaaggttcgggatgagggagttgaatttagttgtttcgcgcggtgtttagagtgttttatcgcgcgtaataaattttcgtagatatcgtatttttaatgcggtgtttttttgtgttagtgtttcggcggtttttgtagggtgttaatgttacggttgtatatcgttttttttttttattatttttatttgaatagatttggaggaggcggaaatggaaattagggtatgtttataagttggattcgttagatttttttgttcggcggtatgtttgtgtatgtttgtatgtcggtaaggagttacggatagggaaggtttaagagttggttatttgagcgtagtagatgggttttcgtagttttaggcgttagggtttttacggggcgttttcgggaggtgggtatgaaggttagagcgtcggtttcggaagttcggtcggagtaggtggttagatttgttttggagttagatttggttcgggttcggtgcgcga

SEQ ID NO: 7174 - DNA, 4698 bp, Artificial Sequence
  Description of Artificial Sequence: Synthetic polynucleotide
cgtacggattcgcgttcgtattcgaagattttatacgtttttcgtattgtttttatagtattttacgttcgcggtgtacgtttatttgtcggtagacgagttatacgtttcggcggtttagattttcgtgtcgattttcgtgggcgagtttacgcgttgggtgttcggcgcgtttttaggagtggttgggatcgcgggttggcgtcgggtagggcggtgggacgtttggagtcggcgggaggagtacgtttaggcgggttcgcgtcgagttcgagcgagcgggcgagtcgggcgggaggggttatttgtaatcgagtagacgttattatcgttttttattcgcggggggcgggggcgggcggttaggtgacggcggtttatttttcgtcgtcgagtcgggtggtttttgttcgggaggagttttttggcgcgttttgattggaattttcgtcgtagtggcgggggaggggggatacgtgatcgttcggttaggcggttcggcgcgttttattcgcgatgggtattttattttttttttggaaaagtcgggggatatagagaaggcggaggagtacgcggggtgtaggagagtttattagtttttttagtcgtagtgttggtgatttcggtcgttgaattcggagaggaaaggtttttacgcggttagtcggttttgattgttttttcgttttgtttttggtcgtagtatttttttttcggttgtagtaatcgttttttatatttttaggtaagggtacgtttagtgtagattattgttattttatagatgttagtgttatttaagagtggtgttgggtttttttttttttttttttttttttttgtatattagtatattgtattcgagagaaatttacggcggtgtattgtagatatcgtttagttttagggttcgaagatttttcgattaggtttcgggatgtttgaggttttttaggttattacgtggaggaatttaggtttgttttttgcgtaggaggaggaggcgtcgcgggagttgtagttttcgattttttttaggaagtcggtcgggtggaaggggagagggtcgttatcgtggtgcgaatttaattcgtagtttttgggagtacgttgttaataaaggttaaattaaaataattaagtggtgtcggtagggacgcgtcgtatggttaggagaagttcggttattaattatttataaggagtattgtttttttggtgtgggagaatggggttgtgcgatagtttttcggagttgcgttttgttttgaattttaagtttttttagagtaagtggattgcgtagtttattattttatttttttacggtttttttttggggcggtattattttagatggtaggaattcggagaaaatgcggtgttacgttcgtcgttatgttcgtatacgcgtttgcgttaattttagtaatacgtggggatcgtgaatttgggcgtttgttttttatttaggtggttatgtgggtatatttatatgattattgattaaaattaaattggacggagaagtttgtttttatattggatttttttaaatttttgtttaagggagttttgcgttcgatttgggcggggacgtagtttttagttaagatcgtcgtagcgtttagtagagttcggggatcggtggtggtggtggcgggatggggaggaatagaggtttttgattttttggtattttattttttttttttatttagattagtcgggtaatacgtttttcgtttaagatggtttttttaattggaacgtgatttagataatgtggaagttaggggtttttgatttatcgtatttgggtttcgttgggtataggataagggttgggtaggtttatttggaaagggagtttattcgtaaagtttcgggtataaacgttagatagcgaaattttgaggaagtttaaagtttatttattgtaaattggtggggggtgggggagtattttatgtaaaaaggaacggttttattaaattagtaagtattttattttcgtagtggacgttttgttgtttttggttttttttttttttattttatttttttaaattattaaggttggagaaattttataaataaagtataagttcgtggggggggggggggggggttatttggtgttttaaaaaaataataataataaacgatttttgtaataagaaaggtgggtacgtttttatttttaggttttaattttaacgttacggttacgttaaaattgaagttgattgagataagagaattttagagtatagtacgtagatagataattttataattaaaaaatatgtattttttttttttcgttttcgttattttttttttttttcgttattatttattttcgtttggattaggggttgggagaggaggaggatgtagttttttcgagtgtataagggaggcggcggggttatttgttgttgtatcgttagaagagttaatttcgagcggatttggtagggagttaaaattttttttttggatgcgacgttttagagatcgaggtagacggcgagaatagatttagcgtttcgagatgtgttttttaatttgaattttggattatttttgtttgaaatgttttgttttgtacgtttgggaattattttgtgcgattaaacgcgtgatatatatacgtatacgcggggtcgtttcgtaggggggagggtgcgtggtataggagtttcggatttttaggggttttgtatttggggagtggtgcgagggggatcgtttcggtgtggttgttgacgtgagataggtaattcggaaaggttttttttcggttgttttggtaatgggaagttgtgggtaaaggtgtaggggcggtttcggagcgtatacggcgtagttcgtagtgaagggtagtggtgtggtggggtagagagattagataagggtaggcgggttttgtcgatttcgagtttattcgtttacggggttacgttttgttgagaaaatgcgcgatattcggtagggagagagtgatattgattaagtgtttttggagggtcgagtcgtttgttttcgggagggggtcgcgaggttcgttagtattcggttttcgcggaagttgtgttagcgcggtagtttcgtcggcgtttggttttattagtttttgtttttagcgtttttcggtggtatcgttcgagatttgcggagtagaagtcgaggatacgagtaattcgttgtgggtttgaagtgattacgttttagggttgtgaaaagttgtttcgtggtgatttgggtacgaggaggttaataaagtgtagaattagttttgatttttatttaaaatgaagttggtagtattgagcgtttaaatgatttcgttaggattttggaggttgtgggagcggggtgggagagggtaaatgttaggtttaggataatataggatatgtttaatttaaggaagttttttttttcgggttacgttttttgtagttttatttaattggaatcgtttttgtattcggggttattttcggtattatgatatttagcgttgttttttaaattttaagttttcgcggttatattttttcgtgtttgttggtattagtaagagtttttgtttgtttttttttttttatatggatttttttttttttatttttagatcgtagtgcgattggtaggtattttttcgtttttttcgcgtttcgcgtcgacggtgggaatagtagcgatagcgcgatcgtagttttttagtgttttcgttttttttttcgcggttatattttatttattttattcgttaaatttcgtatttcgtcgtcgttttttttttgcgcgttttcggcgttaatttagttagaagcgggtggaagttcgggtttatgtgtaggtgtttttgtgcgggagtaggggagtttataggttagcgattcgcgattttattttgtttttagttcggggtttatttacgtggaattcgtcggttttcgcgggtatttaatattagtttttcgggttcggttgtcgttttttcgaagttttagggcgtttttacgggttaatgattattttagtttttttttaagttagggtttggttagttgggaaattttttcgttttttgtttatattttttggtattttcggataaagttattcggtttttcgtttcggtatcgggaaagatgcgcgtggagagcgtttttaggcgttgggttacggtttcggtttttggtcgtgtttgttgtgtgcggagttggggcggcgggtatcgtttgcgcggggtaggtattttattcgtcgtttttttagtacgggtattcgatcgtcgcggcgttgtaggaaggaggtttcgtcgcgtcggtttttttatatttacgtgtttttcgtgtgcgcgttttcggtttgtagatgttataaggttggcgtcgtttggattttcgggcggttttatttttcgcggtcgttacgtttcgttttttgtatttagtttttttggcgttttcgttgtagtatttaagattaggcgtcgtttttgttagtcgtgttgtttagtacgtttgagggtcgttgtcggtaggttttatttttcgttcgggttttttatttatttttttttttggacggtggggtttaagttttgtattggggttgttaagttatcgtttacgattttttgtagggtgtagcgggagggcgttttcgaggcgt

SEQ ID NO: 7175 - DNA, 462 bp, Artificial Sequence
  Description of Artificial Sequence: Synthetic polynucleotide
cggttcgtaaattgattatgaaatatacgatgttaattcggagttgtattttttagttgggtattttcgcgcgttggttttcggggtttcgttttttattttttgtttttttttttcgcgttttgtttttattttttatttttcgcgttggttatttcgtttttttggtagtttttggcggtagcgcgttttattcgttttcgtgtttttttcgtttatggaattaattttggttttatttgttgttcggtttaggttggggagaggacggagggtggtcgtagcgggtttttgagtgaattatttaggagggattgagtatagtattaattagaggggggttagggggtgcgggattcgagcgagtaggaaggaggtagcgtttggtattagggttttgatttaatagaattgagatacgtttgtaatcgttggcgtgtttcgcgtataggattttagcga

SEQ ID NO: 7176 - DNA, 300 bp, Artificial Sequence
  Description of Artificial Sequence: Synthetic polynucleotide
cgttgtaaaatagtcgtcgggtgtagtgggtcgggcgttcggttattttggttgcgattatcgtagttttttaaaggatgcgggtagatgtagacggttttggtttatttgtttttaaaggtttgggattgtgtttgcgtgtttcgggagggtattcgaaatttgggagtttttcggcgtttttagtttcgggtatttggggttttttgttttttaatagtattaattttgagaataacgcgtatcgaaggcggaggtttttgtgttttggataagttcgttacgggtaagttagttcga

SEQ ID NO: 7177 - DNA, 554 bp, Artificial Sequence
  Description of Artificial Sequence: Synthetic polynucleotide
cgtcggggcggggattattttgtagtaggagttcgtagatattgtagaagcggagaacggcgttgcgtttttaaattatggttttttttttaaagggttggggaaggaacgagggggtaagtagatgttggtgagcggggtacgagagtgtagggtttcgttggtgtttttttttcggcgttcgtcggatttatcgtttttatcgttgcggtgttcgaattcgcggattcggatcggcggtagtagaagcggtagcggtaaagtattcgtagaatggggtatcgcgaaatagttttttttttttttttttttgttggtggtgtagtcgcgatagttcgttttttaggtaggggtttggagtttgtttttttttcggcgcgtatagtaagttttagagttcgtcggggttgttcgagtaggtggtgtagggatgtcggggtgttggagaaggtgcgggcgagggttgtaaggagtgggtaggttacggaggggaagggttgggggagaggaggagtaagtaagtagtattgtcgttcgcgttcggggtgtttcgg

SEQ ID NO: 7178 - DNA, 1153 bp, Artificial Sequence
  Description of Artificial Sequence: Synthetic polynucleotide
cggcgtatataagttgaggattgtcgaggcgttttttgcgaggtaaatacgaagtcgtttggttagtgagaagaaattcgaggtggtttttggggtagatagagtaggatttgtttttgttttttgtttttttcgtttttttttttttagcggcggcgatcgtagtaatagcggtagtggcggttgttgttattgttttgtcgttgtcgagtcggttatttgggtattcgcggagtcgcgtcgttgttatcgtttcggcggtttttcggagtgcgcggagggggcggcggaggagcgagatatttatagtaatcgaggatgcgaggggcgtttagtagtagcgagtgtttgggagttaggaggaggttttcgcgcgtcggtaatttttagtgttaggcgttttgtagttttcgcgcgtcgcgtttgggttcgtatcgttttcgtagtgagggttcgttcgagcggtaagtttttttcggcggttaagtcgatatttttttttcgtttcgtcgtttatttcgggtagtagtcgcggaataatggagagcgtagttagtagttttggagacggcgttcgggggaggacgcgtcgtcgtcgtcgtcgttgtcgttagggtaggcgcgcgtcgcgtggagtcgggcgggtgcgagggcgcgcggcggggggtggggggtacgcgtcgcgcggggggcgggggtagtggggggcgcgcgcgcgggttcggggagttcgcggggagagttcggcgttcggcgtagcgcggcgcggttaagtttcgcgtttttttcgttttttttcggcgcgttcgttttcgtttcgtcgttcgtattcgttgggggcgtttagaaagatgtatagaggtaacggttaggggagcggaggtttaagttatatgtttgcgttttcgggggttagagttcgttagttttcgcggatttcggttcgcggttagttcgagcggttcgggtgagtagcggtatagcggttttttcgtttcgcggttttcgttcgtcgagacgtggttttaagaagtggtgtcgtagtcggggtagaggcggaggaagtcgagtcgggtaagtcgggaaggttgcggagacgttttgtcggggtaggtgttgtagttttagttagcggtttttacggagggggcgg

SEQ ID NO: 7179 - DNA, 1603 bp, Artificial Sequence
  Description of Artificial Sequence: Synthetic polynucleotide
cggttcgtagggggtgtttcggggcgttttttgcgcgaggtttcgggaatagggtacgagggtttaggttgtttagttgtaggtgtagttgtttcggaggaggacgttgtttgcggcgtcggggagtttttcgcggttggaggcgaggggaattgtatttattatagtgtttcgtttgcgcgaggattatttatttgggtcggagagagcgcgcgcgcgtaagagcgagttcgggttgtggtttgggggaggggagcgagggggcggggagcgttttatcgcgaggacgggggcggggacggattgttaggtggggcgggtagttggggcggttcgaggatttttttcgatttaagtgggtatttgcggagttaaaagtaggggaggcgttgtagttgtgaagaggcgtgggggtcgcgggaatttttttttggtcggtgcgatgaaagtcgggcggacgaggtggtttaacggggttgagagtggttcggtcgaggcgcgggttgagtttttagtatttggtttgagcggcgtgggtagtagtttgtatcgcggatatttttaattttgtcgcgtttgcgtcgtattttggtcgtggtagcgatttttcgggtatttttgaggtcgtttttagttttataagtatttagtcgtttattttagagtagcggcgtcgatcgttttaagaggagttagttttcgatatcgttttttatttatttttttatatttttatcgttggagggggtgagtgtcgtggataggcgttttcgttcggggatagtttagcggcggtagttagttcgattttttttcgcgcgggtcgtttaaatttgattagtagagcgagcggtttagcgtagtagtcgttttcgcggtttttagttgtagaaaagtaaagcgtcgggaggaagtagtagagggggggttatatgaggttggaaagtggcgggtgtacggcgttcgggatcgtcgaggtttttgcgtcgttttgcggaggtgatttcgcggtggaggttacgagtatcgtcgtagttttgacgttgggatttaggggttttcgagcgtttacggcgtggtggcgtcgggtcgcgtttttttagtagtttaagggtcgagtggcgcgtggttatatttatagtagcgtaggggcgtcgtgggttgacggtttttttcgcgcgagtcgttttttcgcggtatttatttttttttcgcgttcgggtttttcggaagtcgaggcgcgggttatttggtgggatttcgcggttttcgttttagggtcggggtaacgcggcgtgttgattgggaggattttcggcgttcgcggtttttattatttcgtttcgcggcggaggcgggcgtttagggtagggacggagttcggagcgttgtagagttcggttaagtttagttttttttcggtttggtagtcgcggttcggatgtcgttagttcggcgttagagggggttagtcgataataaaaatgtttgtatcgttcgtaggtggaggcggtttattaggttaggaatcgaaaggagggagggatgttgttaggttaaatttaacgttttggttaagggcgcgttaaggaaatcgtatcgt

SEQ ID NO: 7180 - DNA, 1411 bp, Artificial Sequence
  Description of Artificial Sequence: Synthetic polynucleotide
cggttttcgttattcgggtggattttgtttatcgcgagcggggaggcggttgtttttcgtgtaggattttcgttgagggtttataataagcggttttaagcgggggtatatttttcgttattttcgcggttttttaaataaataaagaagttaaagtcggttgttttaagattaatgtaagcgtttaggaagttttgaggcgtttgagggcgaggtaggttgtcgtgggtaggtgtgaatattttagttttcgcggcgggtttggagtcgtttagcgtaggaagagggtagaagtgggttcgcgtttatgcgggtattcgaaatgaaaaagagttgtaaacggtataaaagttcgggggttaggcgtaggaaaatagagtaagggagttgttttagtttttaaatattgtatatggatgggtgtttcgcggaagattattttagattttgtgaaagaagtttttattgggcgtcggttacggtattggggtgcgcgtttgttttgcgagaagggttttttaggtcgcgcgggggaacgtaggagacgtttgttttcgggggaattagcggaggattgttttattttaaagtgaaaatttgtaggttttgggaaacgatatttaaaaaagtatataatttttatatgtcgtttaatggaggatttttataatttatagcggtagataaggttagagggtgtaataaaaaatttgaagttttttttttttttttcgtcgttttttcggaattgtattttgggtagcggagtagaattcggaatgtgaatttttttcgatatatgtttttcgtagataagtaaataatttggacgtgaaatggaaatggtaattaatgtagtaatgttgttatatttcgagtgtgtaaattttattgattcgtcgcgttacggggggtgtcgggcgtacggggatcggtggcgtgcgtttaggttgtttattttttttttttttttttttttttttttaggttttcgggcggggcgtttagaaatttcgtagggatgtggacgggttgcgggaagtaaggagttgtttaagcggcgttcgggattttcggttttcggtttttggaggattgggcgggtgttttgcgtttgtttcgatagtcgtattttttatttatttttttcggttattatcgtcgcgttagcgttagtagggttttttcggggttcgagtgtagttcggttttgaagtatttaggagagtttgagttcgggcgatagaggtttggaggtagagggaatttttaaatttagtgcggcgggtggttttgagtgcggcggttaggttttttttttttttttgtttcggggttaagtgttgtcgggttgtttggcgagagtttttttgaagtttttttttattttcgtatcgaaagcgttgatcgt

SEQ ID NO: 7181 - DNA, 2629 bp, Artificial Sequence
  Description of Artificial Sequence: Synthetic polynucleotide
cggtagtaaacggtagagtaaaggagtcgtttttttttatttgaaagtcgcgaggaggtttggagcgttttttttcgttggggttcgagttttttgggttttggtcgggtgcgggtagattttatcggggttttcgttattttttagtttagttcgtagagcgagtatcggtagattttaagggcgcgtgagtttggttgtcggttgggtttttgaggttcgttgggcgggggtaggtcggtttaggttgtgcggggcgtttataaaaagtgatttggagatgaattcgttcgtgcgcggttggtcgtttcgttataggggcgaaggcgtttgacgtaagcggaattcggtggagtttatacgaattagaatagagcgaggtttttggcgtattagggattttaggaggtagtttcgttagagacgcgggtcgtgtttcgggaaatcggggggcggggggaggggaagagcgtagaaaagaaaatttattaaggcggggattggtttgagcggggaggggcggcgaggtcggagtttttttttgttgggcggattttttatggttagaggttgagttttattttcgtcggtcgttttttaggggaaggggaaggagaggggagagtagcgataggtttttagtaagtaagcgcgggcggtattcgtagtttttagaagtttgagatttggtcgtaagcggattcgtgcgttttaattttttgtcgcgttagcgtttggagcggagagtagaggcggttcggtcgcggcgcgtcggttttgttatgatggttagttatttcgagttcgaggacgcggcgggggttttgttggttttagagatcggtcgtatagttaaggagttagaagggtcgtcgtcgagtttaggtaagggcggtgggggtggcggcgggatagtttcggagaagtcggattcggcgtagaagttttcgtattcgtacgtggcgtttatcgttatggcgattcgcgagagcgcggagaagaggtttacgttgttcggtatttattagtatattatcgcgaagttttcgttttacgagaagaataagaagggttggtaaaatagtattcgttataattttagttttaacgagtgttttattaaggtgtcgcgcgagggcggcggcgagcgtaagggtaattattggacgttggattcggtttgcgaagatatgttcgagaagggtaattatcggcgtcgtcgtcgtatgaagaggttttttcggtcgtcgttcgcgtatttttagttcggtaaggggtttttcggggtcggaggcgtcgtaggcgggtgcggcgtggcgggcgtcggggtcgacggttacggttatttggcgttttttaagtatttgtagtttggtttttttaataattcgtggtcgttatcgtagttttttttatttatgttttatgttttttgttagatggcggtagtcgtagcggttgtagtagttgcggttgtagtcgcgggtttcggtagttttggcgcggtcgttgtggttaaggggttggcgggttcggtcgtttcgtacgggtcgtatatacgcgtgtagagtatggcgttgtttttcggcgtagtgaattcgtataatggtttgggaggttcgtcggtcgtattttcgttttcgtcgtatttttattcgtattcgtacgtatattatttgtacgcggtcgtcgtatcgtcgtttgttttatcgtattacggggtcgtcgcgtcgtcgtcgggttagtttagttttgttagtttagttatcgtcgcgttttcggcgttcgcgtttattagtgcgtcgggtttgtagttcgtttgtgttcggtagttcgagttcgttatgatgtattgtttttattgggattacgatagtaagatcggcgcgttgtattcgcgtttcgatttttgagagtttatcgtatgtcggtgtagacggatgcgaggatgtagggacgcgcgacgtcggtttcggtcgtagtcgacgacgtcgtcgttagtttgattttatattttttgggttcgtttttggagttagcgtttagggtttttttgtgttttttcgtttttttaagtttttgtcgtttttttttgtttttttagtttatgtttttttgtgtttatttttttgatttttgtgattttgtatttttttggtttgaagttgtttttttgcgcgttttttattgggttcgttttttttcggagttttagcgttttttgtttaaatttatcgcggaaagggttcggggcggaggtgcgatcgggcgtcggtagcgtagattttttggtttttttttataggtcggtgcgttcgtttttcgcgtttttcgttcgattgtcgtgtagtttatggttagacgcgtcggataggattgatggcgggatcgcgttgttcgagaaagggacggattaatacgtgtgtttgtttcgcgaatttttttgaagttgtttagaagtcgtttgtcgcggggtttattaggcggggcgggggttgggatttagcgggagtcggggtagtttggttttacggtttgtattcggtttatatcgcgggcgggcgcggagggaggttgcgtttttttcgttattagtttcgtcgtttcgggtattttcgggtttcggcgg

SEQ ID NO: 7182 - DNA, 1686 bp, Artificial Sequence
  Description of Artificial Sequence: Synthetic polynucleotide
cgacgtttttaggtagttgttaaagttcggggttcgtcggtttttaggttcgtttgatagagttaggcgttcgtttggatttagttttttttcgggcgggaggcgcggggaggttaagttttttaaaggaatagggtgggtaggggagtggtgttaggttaggtttttcggttttcggtagttagagcggagtaggaaaggtagcggggagttttatatttcgcgtttttttcggatttcgtcgtttattcggagggtatacgtttttcggggagttagagacgttttgggggagtttgaggagtgttagcggggttttttttggagtttataagtttttattttattttcgagttgggagataagttatagttcggttttttttttgaaagtatcgtcgttgattttttttttaggtaggagtagatatttgtttgtttttacggcgcgttagcgttttgttttagtcgtttttgggttagagttcgaaatttatttattgcgtttttatttcggtatagatagtttttaaagttgttcgtattttttagatttcgttttttgtttagttttcggatttcgtttaggggttgagttgacgttcgcgggtggatttttttggttcgttgcgtagggaattgatttcgggaatttagggcgtatagaggttaaagaagttgcggtaagggagggtgggtaaatttagtttgagtttaggtttttgtcgtttttatttttaagtttgttttgttttttttttgggagaagagtaaatttttttagtatttatttttagtcgcgaggaggcggcgttgtcggttgttttcgttatcgtcgttgtcgttttttacgtttagcgttagtaggagcggtatttagtatagtcgtttaggtagtattttcgtagtagtcgttaacgagttgtagtcgtcgtttattgttcgcgtcggttttcgtttttcggtgtttgtcgtatcgtgggtcgtttcgtcgtgttcgatgggtgcgtttttagcgttgtcgtcgcggcgttcggtttcgggttttcgtcgttgcgtcgttagttcgtcggtagtagtcgcgtttattggcgcggattcggagcggtttaggcgtttatttcgggacggttcgtgacgttacggagggagggaggtggttcgtgtatatttatgaacgcgggtatcggcgtcgggtttcgcgtttttcgttttaaggtttcgatttttaattttttttagtcgtttttacgtttcggggttttgtttaggtttttttgtttagtcgggatcgggtttttagaggattttggtgggcggtttcggagagttttttagtttcgcgtttttatttcgattttcggaaaagttgtcgtaagggatggagggtttttttagaaagtggttattcgaggtttgagggttatttggggtggcgcgagggattttgatttgttatgttttttgaattgatatttgggcggagaggattgacgggcgtcgttaagggttttgtttttggttgggtttttgggcgttttgcgtcgattggtttggggagggcgttaggcgtatattagagtagcgtttagtggtgttaggggttgtcgggtagagtagatagttttggatttggatggtaatggtagggtttcgcgttattttcgagaagtaggggtagtcgcgg

SEQ ID NO: 7183 - DNA, 1686 bp, Artificial Sequence; identical to SEQ ID NO: 7182
  Description of Artificial Sequence: Synthetic polynucleotide

SEQ ID NO: 7184 - DNA, 2132 bp, Artificial Sequence
  Description of Artificial Sequence: Synthetic polynucleotide
cggttcgaagagttggtgagcgcgattatagggtagtttgcggacggttttttcggataggataagggcgagggaaacggtagaatggtgacgtatttgagtgcgtttattagacgaaagaagattaattaagttttcgtgtagtgcgtagataggtcgatatatatatatatatatatatatatatattaatatatacgtaaagatagtgagggagcgagaggcgtatttttaggtagttgataatgatacggtttcgattcggacgcgggtttaaagtttttcgattttcggagtgttttttttttcggcgattttcggagattatcgttggcgtattttttcgttttgttcggtttcggcgttttttttttttttcgtagtcgtagtttttcgtttttcgcgaacgcggttttttagtgttttttagaacgttcgcgtggttgtcgggtttcgaattttagggtcgattttagtattcggcgcgcgcgtcgtcgcgtcgtcgattagtttgcggttttcgtattaattattaacggggcggttcgggttgcggcggttcgaggagggggatggtacggaattcgagataggggataattttatttttcgaagcggtcgcgaaattttagtttgggaggttttcgttttttttcggtgcgttcgttttttttttcgcgtttcggttcgtatatttttatttttcgtttcgggggcggcggcggcggaggtattcgtatcgcgcgatgtttagttatcgttgtcgcgttgtcgtcgtagttagtcgcgtcgtcgtcgttgtcgtagcgcgggcggtcgcgcgtcggtagtaggggtttggcgaggaagtcgttgagtttcgcgcgtttcgcgtttttggcggtcgtagcgttgtttattaattgatttttttattgatttatttaatttttaggagcggttgttcggaggtacgggtttttttttaaatttgtagcgacgttttcggcgtgggtataaaggtttcgacggcggtcggcgggggttgtttagcgttcgggagtcggcgttagaggtcgtttgcgcgcgttttagtcgagtttcgggtattatgtcgcggcgtttgtagtttcggggcgcgggtataaaaggtttttcggtttcggtttcggtagtttcgggggtcgttcggaatttttattttgtcgtttttcgggattttttagcgtttgttaagtcgttgttgcgttgggacgaggtgttcgacgatttcgtggagtgttttattttgtcgggttatcggcgtttgtcgtgtacggtttaggagtgtttagtttcggtgttgaagtttattaacgagacgtttaatttttggacgtattttatttcgttgttgttgtttttgagtaagttttgtcgtttgttttttttgagcggcggcgacgtgtttttttattattcgtggttgttatcgttgtggtgttacgcgtcgggagtgttgttgattttcgttatgagttgtacggcgtacgtgtttagttgtttgtcgttgcgtttgcgcgtcgtttttttttatttggattacgcgtttattagttattacggtttcggtagtacggtggtttattattattatttgttgttaggttttagtttgttggatgttagagttatgattttatatttgtagtagcgtttgggttggtacgtggattgtacgcgttttatcgtcgtttatcgcgttttggtgttgtttgtggttttcgtgttggcggtggtttgtattgtggtttgttgtaagagtcgtatcgattggtgtatttattcgttcgcgttgcgtattttcgttttcgttatgtcgtttagtatggtttgttttattatgttcgagagttggtttttcgatttgcgtggggagaattttatatttttcgtgtatttttatcgtcgttatttttggttggtggtggtcgttttttttaacgtgagtaagattttcgagcgtatttagtcgggttttttcgatattatcggttatagttattagtttttttatatttttattttttttagtatttacgattaggtgtattacgtagaagagggtttgcgttagtttttttaggcgtcgtttgtcgtatttattttttcgg

SEQ ID NO: 7185 - DNA, 2954 bp, Artificial Sequence
  Description of Artificial Sequence: Synthetic polynucleotide
cgtttagagcgtggtagtttgcggggtcgtttacgtttttttttttggcgttaagtttgtggttcgcggtttttaagaagggtatgcggtgagttcgcgggtttcggttgcgtattatttgtaggtttttacggatgaggtcgtggcgcgagcggattcgtgaattcgttatcgcgcggggattacgtattaagtggatgattttgaggtttagggtcgggtttcgtagtagtggcgttaagatcgttacgtcgaagacgcgtatattttttatgattagtgtgcggtatttgcggtattttttttcgaaacgcgttaggcgttgtggcgggtattttttgtatacgcggtcgtttattaattttacgatttttttgcggtaggcggggtagagtggtgacgagtatattattttgttggtggttgcgtcgaagatgtttagcgtggtgaggttgcgtttttcgttgttcgcggggttatataattggaagatagagaggtcgtagcggtaaagagcgtttagtatgtttcgcgttgttttttgtagggaaacggcgtttttcggatatagtttttgttatatatgttatattggttcgtagagaaagaatatttcgggattttggttgaatagttcgtcgaagaacgacgagttagagcgttacgtggtgaatacgtatattagttgtcgtttgttttcgacgttttcggtgtttcgagtgttattgtttggaggggtcgtaattttcgttatttttgtcgcggttgtaggagtcgtttcgacggcggtagcgggagggcggtaaggagtgcggaggtttaaacgggtatgagtacggggcggttcggtcggaggcggttttgggcgtttttagttgttttcggttgttttcgttgcggtatttagcggtttatcggggttgtattgttgtagcggttttttgtgttatttgtagtttaggaggttgagtatagtgagtattagtagtagtgtatagttcgcgtataatattagcgtttttttacggaatatttttatttcgagaggggacgcgggttagcggcgttttgggcgtcggggttattgcgggagtagggtacgcggcgcggttgtaggcgtagtttggagtagtcgagggagcgcgttcgggggtagagttcgttgcgggttgcggtttattataggtataattcgggtcggcggcgcggcggaggtagttttgtagttcgggaaggggacgtagcgggttggttgttggcgtcgggattcgggtcgcgatttcgaggcgggcgcggcggttggtttttagcgtttaaggttggtttttttatggtagcggtttcgggtaggatttgcgaggggaagcggagtgagcggatgcgttttaattttttttttagttttttttttttaagtaacgtttattttcggttttgttcggttttttcgtttatttggagtcgagggcgcgttcgggagcggtttcggattatcgttcggcggattgttcggttgttattcgtttttcgatttcgttttttttcgttttcgttgggggttttcgtattttcgaggggtttggggagtcggtcgatttatttttgggtagttttcgggtagcgggcgttttgcggttcgggaagaaaaatttttacgcggtttagagtttcgtttcgcgtttcgtcgaattcggcgtttttcggttttagcgacgtttttttcgttttttcgggatcgtagttttttgtttcgtttaggggaacgaagtcggttgggggcgatggttgggggcggtttatatgggatttagttttcggtatagcggcgtagtttttttcgttttcggttttcgtgcggcgaatttttttatttttttggtagcggtggatggggtatagcgcgatttcgtagcggcggcggcggttgtttttattatcgggaggatgttcgggcggatagcgtaggtaattttcgtcgtttcgtagttttcgattggattaaaggatttcgaatatatagttttaggtaaggaaatttaggtgtgtagtattgttcgattcgatttaattcgttttcggtattagcgtttttggttaacgaggtatttaagtaaagaaagatttcgtcgtagtcgtcgtcgtcgcgcgaaagcggcgtttaggaggatgttgttattcgattttttttacgtcgggcgttcgtaacgcgttcggattagtttttgcgcggtttttgttagtcggcgttcggttggtgcgcgtcgtcgtttgtcgtcgcggtttttttttttcgtcgcgtagtttttttttttcgtcggtttcgttttcgtttttaacgtcgagtcggtttttatcgtcgttgcgtttcgggggttggagacgcgattcgttttatcgcgacgcgcgggggttgtagtttacgggttcgaaggtttagttttgcgcgtaaagcgtcgggatgcgaacgcgggatttggagttcgtcggtgtcgagagttgttagagagttggattttgcgtgtagttgtcggattcggttttatgtttttgtttttagaaagagttggtgatgaagtttgggtagaaattttttgtcggtcgttcgttttacgtttttttcggggtcgatattgttaattttttcgggtattgaggatatttttgcgttttggagcggtgggaggacgcggagcgtcgttttttggttttcgatattttgttcgttttttttagtgggtttgtggttgcgttttttcgaaggaagtaataaatttttttgattttgggggttagaggagacgttttagtttttcggaggggtgtgcgggcgggatcgttttttcgttttattggatttttggtcggggttgtttttgttttattgtgttttatatgcggagtttcgatgtttttcgtattttcgttcgcggtgttgcgtttattgtgattgacgt

SEQ ID NO: 7186 - DNA, 2954 bp, Artificial Sequence; identical to SEQ ID NO: 7185
  Description of Artificial Sequence: Synthetic polynucleotide

SEQ ID NO: 7187 - DNA, 885 bp, Artificial Sequence
  Description of Artificial Sequence: Synthetic polynucleotide
cgttcgtcgtttttttgaggttacggcgtaggagagaaggagggcgcggaaacgtcggtatcggttgggaagtttcggtgtttcgggttttttttggcgagggcggagaagtcggcggtttttgtttagaattttgtgattgtagggatcgagatattaagggcgggggtgtagaggattataagttttttagcgcgttttatttgtatataaatgtgttttgttttttaattttgtttttgttatttgtgtatttgttttttattaaattaattaattattcgtggtttaggaagaaattagaattggggggattgtttttttaagggggatatagttgaacgtggtcggtagtttttggtttttcgggtttgggtttagacggatttcggcgttgtttttaagatcgatatcgggtatttggtcgtcggcgtatttaggagtacgattttatgcgtgtgtacgttttttgttcgggttaggagttttgttttagttttatttcgggttataaatttttggtttcgtttagcgtagtttcggttcggagggtagtttgttagttaggttttgggttagggatggtttacggtgcgcgcggggatcgttatattttttagcgttacgttggggtcgcgcgggtcggagtagggggagggggttcgatgacgttatggaatagttggaggatttagttcgggaattcgtcggggagcgggtttcggggtcggcgttttatttaggtcgatagcgtttcgggttcggttttatttttttagacggtacggttgttttttacgtttagagcgggtttggggttttgaaggaaattagtgtacgatcgcgaggttaggaattttggagaatgggtacgtaggcgtgcgt

SEQ ID NO: 7188 - DNA, 2174 bp, Artificial Sequence
  Description of Artificial Sequence: Synthetic polynucleotide
cgcgttgtgttttttagcgttttaggggttcggtttttagttcggttttatttgggcgttttttcgttttttcgtgggtcggcgggtcgtgcgggaggaattttggttgtcgcgggttttgcgttttatttgttatttcggtggttttcgttcgggtttcgagttttttgcggagttagtattttagttgagttagtcggaggggcggcggcggtttcgcgcgtttagagttttagtttatgaatgggattttattttgagcgttttttttcgggtttggggaggcggcggcgcggcggcggggggcgtttcgtaagttcgcggttttgagcggttattcgcgtagtaagttgggcgagttggtagtcgtttgtatttgttttttggtttcggtttttgatttcgttttcggttttaagcgttcgggttgcgttttcggttgtttcgcgaggtagttttaggaggtttaggggtttcgtttgcgtttttggcgttagattatggtgggtagtttcggttaggagttttagtcgtcgcgagttaatatcgtttgtagttagttttcgttttattcgagcggacgcgcgggtattcgtagcgcgcgggttattttttttttcggtcgggatgggcggcgcgggattgagtgatcggttttgcgttcggcgggtaatttttatttgatttgttgtttgtgagttgttgattgtcggggcgcgcgagtttagggggtacgggtagtagcgcggcgatgatttgatttcgagttcgttagggcgtttttttttttttttttttttttcgttttttttgagtttgtgcggagattagttcggtgcggcggtttcgggtggattatggcggggagttttagttaaaggcgtgtgggcgtcgagttggagaggatattttcggtatcgttgttttttgagggggtttatttaaattattgagttattttagatttaggattttttaaataattattaattgtgttcgtttcgtgtcggaaagtaagcggaaagagaaagagcgtttatttttgggatttcgtagatcgtttttcgttggttttttttcgaggggtgtttggttttcgaggatttttttttttttttcgcgtttttttttttttttcgttttttgttttttttgtagtgttgttggtcgggagttgtttttatcgtagttggaaatagttgttttcgtttcgcgtttttatttagatttcgggtaatcgtttttatttcgcgtttttcggaattttagaattcgggtggtcggtttttggaaagtcgtagtcggcgcgatgtattttgtagattttattttgttgggacggattttttaatttttagaatcgcgggtcgtagggagttaaattgttgtttttttttttttttttcgtgcggttggtggtttgttttttaaaggaacgttttatttattttttagtattttttatcgggggcgcgttattcgtttgggtttagattttgttttgtaaacgggttttttatgtatgtatgtgtaggtatattttggatattttataacgtttgcgtttttttaatagaggtacgttttgttattttgggtatcgtttttttttttttatttggtatttcgaacgtagtgtgattaaattttttattgttttttggacgtcgatcgttttggggtgtaagtttggggtgtaaacgtttatttcgtaagagggtttgggatcgtttcgtttcgtttttcggtcgttagaggttggggaagtttatatttggatttttatatattttgtcgttattgtttagattttgattaattttgtgagcgtcgggttttcgatattgtagtttttttaaattttagtattgttttttcgcgattgttttttttttggtcgtttaggttttgttttcgtttcggcggagcgtaagtcggagggcgtagtagaggttggggtttgaggttttcgttgagtagttatggttgcggcgatagttagttttttgattcggtagaagcggtaggcgagggagtttaatagcgatcgagtgtcggtttttaagcgtcgttttagttttagtaaagacgggcgttttttgtgcgagaggtacgttttcggggtgtttagtaaagtgcgtttttgtagcggtcgtaagaggtcggtgaggcgg

SEQ ID NO: 7189 - DNA, 873 bp, Artificial Sequence
  Description of Artificial Sequence: Synthetic polynucleotide
cggtcgggtttagcgatgcggttgagttgtttattcgcgtttgttgaatcggttaattagcggcgttttcggatttagcgggagcgtttttatgtcgatcgcggtaggcgtgcgtttttcggggtcgtatcgttatggcgatttgtttatttgattcgtttcgggtggattcgtcgcgatttttgggcgtttaggtttttgagggtttaacgggcgacggttttttagttttagttgtgcgttttcgttcgggcgaggtggggttgatcgcggtcgtttgtatacgttttttttggttcgcgttttcggtttgggagggcggattcgtttattttacgatggtttcggttttggaagggattgttttcgtgattcgtttttttaatagtcgttaataattttttttaacgttttttgcgcggttcgtttttgagaattttggttcgggagagcgacgcggggttttcggggttgcgtaggttgcggcgttttgtttacgttggttcgagggcgcggttcgtttcgggtcggtttatatatttacgttttttgtcgggaggcggttgggacgcggcggggttgttttaagtgtagtcgcggtagtgttgcgtttttatcgcgggggtttttgcgggtcgcgtttgtttcgttcggttttcggtgtatgtggtttgcgaggcggtagaggagatgtggggatttagggtcgtacgtcgtgttcgaggtttttacgagaggttttttttcgcgggtttttgcgtaattgcgtgaagtcggttcgggaaagttaagattgtggtttaggaagaggaaggaacgcgggcgatagagttggggtttgggacgttgagggggtcggtggtagtttttcgg

SEQ ID NO: 7190 - DNA, 2174 bp, Artificial Sequence; identical to SEQ ID NO: 7188
  Description of Artificial Sequence: Synthetic polynucleotide

SEQ ID NO: 7191 - DNA, 510 bp, Artificial Sequence
  Description of Artificial Sequence: Synthetic polynucleotide
cgcgtagtcggagaggagggggcggtattcgggatttggcgcggtttttgttttttgcgttagcgtgagttcggttagggtttttacggtcgtgtttttattttttagggaggcgtcggtgattcggttatagttttagttttcgtcgttttgtgatttgcgggtattggatgattcgtagttgagatttcgttatatttttgaagtggggaaatggtgagtgtgggggtagggcgttttaaggttggggaggttttattcgaatcggcgggaaatggcggcggcgggacggagtttgcgaacggagttttcgttgtcgtcgtttagtttttagtttttggtttttttcggtgagggattcgggtttatgtcggttttcgtaaggcggttttggtttagtttgtagttttatttgtgtagttttgcgttcgtagtttcgtattttttttgggttgtggggtgaggaggagtttatcgggaaaacgtttgcgtggcgtgcgaggtgttcgt

SEQ ID NO: 7192 - DNA, 511 bp, Artificial Sequence
  Description of Artificial Sequence: Synthetic polynucleotide
cgttttgattcggtttgggcgtaagtaaatttaggtttggtcgtcgggcgtttgggtcgcgttaattcgtttttttttttttacgttcgttcggtattttttggttcgttaagttttagatgcgggtgtttgttttagaaaattttcggcggcggttcgtattgagtatgttcggcggcggggcgggtttggggttcggaagttttagcgattcggcggtattcgtcgttttgaggtagcgggtttcgataggcgatggatttttcgggttttcgggggcgttttacgtgggtgttggtcgggggttttttggtagtggttttggcgttggggggtcgaggttgtttcggcgttagtttacgttttcgttggcgttttttcggcgcgtagttatttcgggatttttaggtggtttttaggtttgggttcggtttgaggattttttcggggcggagcggggcggggttcgagagtagtacgtaggtaaggagggttcgattttaggtttcgg

SEQ ID NO: 7193 - DNA, 417 bp, Artificial Sequence
  Description of Artificial Sequence: Synthetic polynucleotide
cgtcgttattttttttttggagtagaaggggaattcgacgtttaagcggttgcgtgcgaagtttttaattaggtttaaggagtcgtagagtcggggtttcgggttcgtaggatttagaagttacgcgtttcgcgtttttcgtttcgtcgttgtttgttcggtcgatttatttggtgtcgcgtgcgttggcggttcgcgcggtagttaagttaaaggtcgaggtcgaggtcgagcgcggcgtttagtagtacggcgggggttagtagggcgggcgtcggtcgtagcgcgtttcgttttagtagtagtcgcgcgtcgtttttgtaggtcgtttcgtcgcgggttattcggggcgtttaggttgtcgtttcgtcgtatttcgtcgtttgttgtatcgttttcgttagggcggcgacgcgg

SEQ ID NO: 7194 - DNA, 1748 bp, Artificial Sequence
  Description of Artificial Sequence: Synthetic polynucleotide
cgcgggtcggggagttgtattttttgtaggttcggttttcggtttcgttttttagcgtcggagttcgggagtcgcggttgtagtttatttttttaaatgatagttgaggttcgggttttagttcggggtttgacgttagtgttttttttcgtgttgttaggagtagttagcgttatcgtcggcgtttcggtttcgcggtacgtttgtaagttgtcggggcggcgagttttttttgtttcggttttttttttcgttttttttacggagagtcgagtagtagttttagagtttttcgtaagttttttttatattttttcgttttcgttttaaaggagtagtagtttttttttgtttttttattgtcgtcgtcgtatcggcggagtttttttttcgcgcgtttttttttcgatggagttcgggcgtcgtcgacgtcgtcgttgtttcgaattttgagcggggtcgtttcggtcggaggaacgcgtcgtttagttcgagggcgtagagcgttaggagtacgcggagggttggggcgcgggtttcgggaacgagaaagtgtagttttttcgggttattgggtcggcggcggggggattatggttttgaaggatacgggtagcggcggtagtattattttgtttattagcgagatggttttttcgtttagttcgttcggcgcgtcggtcgtcgtcgtttcggggttttgcgtattttcgtttttttttgaagtagtggagttgaacgtaggcggttaggtttatgtgattaagtattcgacgttgtttagcgtttcggatagtattttggttagtatgttttcgttttttagttttcgtggcggcgttcggcgtcggggcgagttgtttagggatagtcgggcgcgtttttttatcgatcgggacggttttttttttaggtacgtgttggattatttgcgggataagtaattcgcgttgtcggagtattttttcgagaaggagcggttgttgcgcgaggtcgagtatttttagtttatcgatttggttaagttgttgtcgtttaaggttattaagtagaatttttttaacgacgagggttgttagagcgatttggaggataacgtttcgtagggtagtagcgacgcgttgttgttgcgcggggcggcggtcgtcgtgttttcgggttcgggagcgtacggtggtggcggcggcggcggcgcgtaggataagcgttcgggtttttttacgttgggttatcggggtttttatattatcgtgcgcgataattaggtcgacgttaaatttcggcgtgtggcgcgtattatggtgtgcgggcgtatcgcgttggttaaggaggttttcggggatacgtttaacgagagtcgcgatttcgatcggtagtcggagaagtatacgtttcgtttttattttaagtttatttatttggagtaggtttttgatcgtttgttcgaggtcggtttttatatggtggcgtgtaatttttcgggtatcgtcgttttcgttaattagtatcgcgacgataagatttggagtagttatatcgagtatattttttttcgtaagttcgtagtttcggcgttttttagtatttttcgttttttgttgagtcgtcgttagtttgagtttcgttggaggtttcgcgggggtgttcggggtaggcgttggttaattttttatagagagcggttttttttgtacgatttttttatgtagtagatacgatttatattttatcgattcggatattttcgt

SEQ ID NO: 7195 - DNA, 1748 bp, Artificial Sequence; identical to SEQ ID NO: 7194
  Description of Artificial Sequence: Synthetic polynucleotide

SEQ ID NO: 7196 - DNA, 648 bp, Artificial Sequence
  Description of Artificial Sequence: Synthetic polynucleotide
cggttgtgtcgggagtaaaggttcgggttagtgtgcgtgcgggcgcgggtgattttatttttagggaagtcggcgtttaattatttaggtagtagtttcggttgatttttttttttttttttttttttttttttttttttttttttgcgtgttttttttgtatcggttttcgtcgcggagttaggcggtagtatcgacgtcgtcgtagtttttgttcgtatcgcgttaattcgcgttttcggtttatacgtagtcggagcgattgagtcggtagtttcgggtttacgttgcgtatcgtgtgtacggcggggttggttgagttgatttgcgttgggtttcggcgtcgtaggcggttggggagggcggcgtgggagaggacgttgagacgtaggggcggtcgcgtcgaggtgataagttgcgtatttggaaagttattcggttgtttggtgaggttcgtgggtcgggggttttgggcgtcggggtgtgagggcgcgcggggagggacggggtcggggtgcgcgcgtgtgtatgttgtgaatgcgttgcgcgatgtgcgtttttattttatatttagtcggttttttgtttgtgttgttcgagtgtggacgtgtgtacgcgttgtattcgttcggtgtggtagcgtttcgt

SEQ ID NO: 7197 - DNA, 863 bp, Artificial Sequence
  Description of Artificial Sequence: Synthetic polynucleotide
cgatttttaacgttgtaatttgtgatcgtgattaaattttagcgatgcgagggtaaagcgttttcggcggtgcggtgtgagttatttttcggcgttgtttgttttttttagtagttttttaagggataggttttgtttttggtggtcgatttttaggttttcggtttttttagggcgattttgacgaggggtagggggtggttttcgggaggatttagaggaaaggcggggataagaagggaggggaaggggaaagaggaagaggtattatttttagtttaatcgttttcgatttttataagagtgttcgtgattttaaatttaacgtgaggcgtaaaagcgtttttattttttcgttttgcgcggttaggtaggcggttggagttgatggtttatttcgcgttttttgttttatttttattcgagatagggacgaggagtacgttgtagggaaagtagcgagcgtcgggagaggggcgggtagaagcgttgataaattagcggtgggggcggagagttgaggagaaggagaaggaggaggattaggaggaggaggacggcgacgattagaaggggtttaagagagggggcgagcgatcgagcgtcgcgacgcggaagtgaggtgcgtgcgggttgtagcgtagatttcggttcggttttttcgagagcgttttgggcgtttttttacgttttgtttttaagttttttgtttttttattttcgtgagcggagaattgggagtggttattcgacgataggttagcgggtttgttttttatttttttagtttcgcgtcgtcggtttatagcggttttttttggggatagtttttttcgggtgtcgttttcgttttttttgtgcgt

SEQ ID NO: 7198 - DNA, 1288 bp, Artificial Sequence
  Description of Artificial Sequence: Synthetic polynucleotide
cgttttttgcgtagtcgatttcgtttcggtttcggtttaggttagagaggtggttttcggagatgttgaagttatttcgcgtagggggaggggtcgttaggtttttttttaattacggtggtcgttttagttatttgtatatattatgttaataatagattttttgtttcgtttttatttaagtttttcgttttttttgggggtttttcgggtcggttcgcgggttgggttaaggtgaatatattatgataataaggcgggtttttgttttgttttcggaaggggggcgcgtagtagcgggagcggtaggtcggacgtcgggcgtcgggagggggtcgggggagggacgtcgtgttcggagcgcgcgcgtatttatatatttatatatatatttacgcgagtatcgcgaagggtatttaaggatcgcgtacgcggggttgcggagatttttcgggtagtcgcgatttcggtttcgcgagtagtattggttttttgggtttatttcgttttttttttttttttttattttagtcgtttttttcgcgttgcgttgtagcgtgtttttatagtttttttgttttgaattgaatgtaggtgggaaataggtcggcgtgtcgaaagatatcgagtaggtagaaataaggtaaatttatagaggcgtaataggttcggtttttcgtggttagggcgagtcgcggtttcgcgtggcgtttcggtcgttgttttcggattttgagcggttattgttggggttttcgaaagaggtgtcggttttttgggagtcggaagagttgtttgggtgggtttcgttttgttttttattttatcgttatttagttttcggacggagggtgttttttatttttagttgggaggagagaagaaagcggggatggtgtacgtttgcgggtttggacgttgagtaaggtaggggttcgtattcgttcgtgggtttgattttattaattagttgtgtagttatagggattgaattttggaggaatcgatttttttttttttttttaggattatttgaggtgtagagggtgggaagcgaagtcgagacggtcgatttcgttacgatgttgttgaagaagtacgtagggaaaggagggggtcgggagtttagattcgaggattcgatttttgtcgaatagtattgtgttcggattatgttttcgtgtgtcgttttggcggtttttttgttagtggtggtcgtggtgttttgtttgtatttgggtgtgaaaattaacgatttttaggcgaggatcgtcgttttcgaattcgt

SEQ ID NO: 7199 - DNA, 1275 bp, Artificial Sequence
  Description of Artificial Sequence: Synthetic polynucleotide
cgtttatttcgttttgtttgttcgtttttattgtttttaagttcgtttcgttcgcggtaagtgcgtgtttaggcgtagttatcggcgagattaggagcgtagcgttcgtagtttgagggaatcggcgtagggtagtagcggttgtagttggattcgcgcgttttagcgtttagtggcggcggtcgggatattttgggtagtatttcgtatcgtagtattttagattacgagtaatcgtgttcgttttcgtcggggttggagggcgtagggtcgttattttgtaagttcgtgggttttcggttatttttatgagagaaggcgaagtcgggcgaaggagtaggacgttcggtagtaggattttttcgtaagtttcgcgggttttttgttttcgcgtttttcgggcgtttaagaagtaaaatgtaattatcgcgttatagttgagaggggaaggggttagcgttattcgttcgttcggaattcggttttcgcggcggttgcgcgtttcggtcgcggttttttcggttcgggagtgagtagtagtaggaggagaggtagcggttcggggttggtcggggttggggaggagggacgggacggagggagggcgcgggggcggggagggggtttcggcggataaagatggtaatgttttttatttaagcgtgttgtagtttggtttttttaatatggttgttttttttttgtttcgtgtatttgttttgtttggattttatcgtggtcgagaaggaggaatggtatatcgttttcgtgaatattatttacgtcgagttcgcgtcggatttcggggtcggggcggcgggcggcggcggcgcggagttgtatacggagaagacggagtgcgggcgttacggagagtattcgtttaagtaggacgttcgcggggaggtggttatggttagttcggtttacgatcgtttggtttgcgattttaatattaagttcgtcgtttcgattcgcggtaagaattggatagtttttatttttaagggtaattgtacgtatagggataagattcggaacgcgtttttgtagaacgttttagtcgtggttatttttaacgtgggttttaatattaacgagattattattatgttttacgcgggtgagtggtttagcgggcgcgggggaggggagtcggcggggacggaggtgtttagagggatttagcgtttgtttttaggttttttttgggaagttcgtgcggcgcggaagacgtgtttgggttttttggatcgattaagttttgtttcgcgt

SEQ ID NO: 7200 - DNA, 1071 bp, Artificial Sequence
  Description of Artificial Sequence: Synthetic polynucleotide
cggcgttgagttttgtttagcgcgattcggatcgacggacgcgtagagattttgtcgggattcgttttttagtcggcgttcggggagtcgtcggtcggttttatttttcgttcgggagtcgggtagggcgagaaggtagcgcgagtggcggtggcgattttcgtcggggtttttgcgacgagcggtgattagtagcgttcgtagtcgcggtttcgttttttattcggacgtggttaagcggcggcggttacgacgttcggtttttcgggatcgttcggttgcgttttgggcgtatttgcgcgtttggtttcgcgtttcgcggagagggcgatgggtttcggttaggattgagtttttttttttttttttttagtttcgtttggtatttttttttttgtttcgagggcgagttacggtttgcgtcgtcgttttttttttcggtgttttcggttcgtcgttttttcgcgtttttttttttcggattcgttttcggggttattatggtcgcggttatcgttagcggtttgattcgttagaagcggtaggcgcgggagtagtattgggatcggtcgtttgttagtaggaggcggagtagttttagtaagaatcgcgggttttgtaacggtaatttggtggatattttttttaaagtgcgtattttcggttttaagaagcgtaggttgcggcgttaaggtttgtgggggttatggtcgggagatgcgtttcgggtcgtttttttttcgtttaaacggagtttttttaggttttttttttttttcggttttttcggtttatttcggtttcggttttttttttgagtattttgggtgtcgtcgcggggattttggagttcgttgtcgggtaatttgtagtcgtcgagaagtgtagtcgttagagatggtaagttggttgtttttcgtcggcggtttttgtttttcgcgtttttgtaggttgggttttgggaaatttgttttttttgagtttcggtttttcgggaggatagggattggtattggttttggaacgcggggtatttttttttgttatattcggggtcgagttatcgttcgt

SEQ ID NO: 7201 - DNA, 694 bp, Artificial Sequence
  Description of Artificial Sequence: Synthetic polynucleotide
cgttagggttgtcggatagttcgatgattaggagttttcggttttcgaagttgcgttttatcgtgtaaattttgttgatggcggtgtattgtagttatacggatacgagcgtttcgcgtagttcggggtagcggtggtattcgaaggagatgtcgtttttttgttgtagtcgtcggcgtcgttttatgttcgtcgcgggcgtttcgggtttttgggtttcggcgtttaggagttattcgtaggtagttagtgtttcgtatagagttagtagcgcgttgttttttcgttcggttatcgttgcgtttcgtcgtcgtcggtcgtgtttttttacgcgggcggttttttttgtttgttcggttttgggtttagttcgtcggcgttgttgggggcggtaagtttcgtattagtttttattcgttttatttttttcggttgaatgagtgttagttcgcgtattggggttatttagaggagacgggtaaagtcgcggttttacgggttgtattattggtcgcggagtttaggggagttgtaggagaaattattgcgaggagggggtcggcggagagacgggtcggcgtggatttgggagggttgttggcgttatttgttggttcggaattacgttaatagttaaatggcgttcgggacgacgtaggtgaaatgatagttaaggttcggggttcgggaacgt

SEQ ID NO: 7202 - DNA, 694 bp, Artificial Sequence; identical to SEQ ID NO: 7201
  Description of Artificial Sequence: Synthetic polynucleotide

SEQ ID NO: 7203 - DNA, 1424 bp, Artificial Sequence
  Description of Artificial Sequence: Synthetic polynucleotide
cgagagttcgaggcgtcgtttttgtcgtttcgggattggcgtgaggagtttttgacgatatatattaattcgagcggttttaaagatgtagttgtatatggagattttgttgggaaaattcgtttgttttttttacgtcgtttagtttaggagaattatcgtcgttatttcggagttttttcggttatcgcgtagagtttttcgagagttcgagtcgcggttttcgagttttaaggtttatttagggttttagatttttgtttcgaaaggagaggatttgagaaaatggatgtattgagatttttttgaaaatttttcgagagagcgcgagaggagcgaggatacgttattcgtagttaaaattatatttaaggattaaaataataataattaaaaattttattaaaataataagcgtttaagaatttagatcgggttggtggggggaggggaagaggcgggaaggggagggtcgtacggaggtagttttgtagtgagtagtcgatttcgtcgtttttcggtatagttggatcggtttttttagtcgcggtttagattcgtttttggatttcgggttagtttcggtgttaggatcgcggttcgggtttggattttcgagatttcgcgtattagtttcgcgggagtttcggtatttttgtatgagtacgagaggattttgttttcgcgtagtagttcgggaagtaggagtcgaagcgcgggtcgtggagtaaggcgggaatcggaggcggcggcggcggcggttaggggcgtacggtgttaggattagttcgtcgcgttttatggggagtcggcggtcgtagcgttgttgaggcgggttcggttggttaggcggggggacggggttcgggttgtagtagttttttttgcggttgtcgggcgggttcgggcgttcgggggttggggggtggggggtgggggaggacgtcgagcgttgaggtaggggttcgggtcgagggcgcggcggggttgcgcgtacgttggggcgcgtggaggggcgcggagggcgaaatgagtttggtaggtggttttttttattattcggtggtgtattacgagggttattcgtttgtcgtcgtcgtcgtcgtagttgtcgtcgtcgtcgttagtcgttgtagttatgaggagaatttttatttttatggttggtttatcggttatttcgagatgtcgtttttcgattatagtatggttttgttttatagtttcgagtatgttagcggcgtcgtcggtttggattatttttattacgggggggtgtcgtcgggcgtcgggttttcgggtttgggggggtcgcgttcggtgaagcgtcgaggtatcgttaatcgtaaggagcggcgtaggatttagagtattaatagcgttttcgtcgaattgcgcgagtgtatttttaacgtattcgtcga

SEQ ID NO: 7204 - DNA, 1215 bp, Artificial Sequence
  Description of Artificial Sequence: Synthetic polynucleotide
cgtgcgggagggaggataagaattcgggagtggtcgaggataaagcgggggttttttttattttacggtgtttagttttttttcgttgtacgtggtttagggtggtcgtattatttttaaagtcggtttcgttaatcgttagtttcgggattgaatttgttttttcggtcgttcgtttttcgtaggggataggggcggggagggagagatttagaggggggtcgggggaggtggggtcgtcggggaggaggcgagggaaacggggagttttagggagacggttttcgagggagagtgagaggggagggtagttcgggttcggtacgttttttttttcggtcgtttttttttatataagcgtaggtagagggcgcgttagttatgttttgtttttgcgttcgtcgtcgtcgtcgtcgtcgtttagttcggcgcgttttggaggattttgcgtcgcggcgttttcgggtttcgtcgtcgttagtcgtttcgtcgtttttttttcgttttcggtatcgtcgttagcgttttcgtcgtagcgttcgcggttcggttttttttatttcggggaaggggagggaggagggggacgagggttttggcgggtttggaggggttgaatatcgcggggtgttttggtgtttttcgtttcgtttttttaaaaagttatatcgacgcggatcgcggcggcgttttttttcgttttcgttttatttcgcgggtttcgaatgcggggagttcggatgttcggttttttgtgaggtttttatttgatattcgtcgttttttttcggtattggttgggagggcgttttgtaaagttgggaacgcggagtttcggattcgttttcgtcgttttcggttcgtttagggggggtcgtcgggaggagttcgggggagagggattaggaggggttcgcggtttcgtaggggcgttcgcgtttttatttttgttttcgttagcggatcggttttttattttcggtttttttattatgtatttgttgggttttttttttgtggcgtgttttttgttcgtcgttgcgttgttttcgggttttcgcgaggcgttcgtcgtcgtcgtcgttttcgagttcggattcgatttttcggacgcggagttcgacgcgggcgaggttacggtaggtttgcgttagggtttgcggagaattcgagagtttgcgttagggtttgcggcggattcgagaatttgcgcgg

SEQ ID NO: 7205 - DNA, 1184 bp, Artificial Sequence
  Description of Artificial Sequence: Synthetic polynucleotide
cgaatgttgttttcgtatcgatttaaattcgcgtcgagtttttttttatttcgatattataagggagaagagcggagtcgtcgtcgtcgtcgtcgttattatcgttatcgttatcgtcgtggttttcggagcgagcgagcgattttgtcgcgcggggagttttatcgggagtcgcgtttcgttagttcgttttaggtcgtcgtcgtcgtcgtcgtttatttattttgtcgcggcgcgttttcgttgtggtcgtgaggaatcgagtttagcgttgttaagttgtttgggtttggagcgtatcgtgttatagcgtttggtttcgggttcgggttgcgcgcggcggttagatatgataggttgaggtttttttgtttatattcggtcgtcgagggggcggtgcgtcgtttaattttttcgcgtcgggtcgttatcgtcgtttttcgttagtttcgcgtttagcgtttcggttcggtcgtcgttttattttttcgttttattttttcgtttcgttttatatacgcgggtcggggtttgtgagtagtcgtgtttttagcgaagacgggggaattgtattgagaattcgttttcggtatttttcgaagatttcgcggggcggtatttttttttttatatacgtacgttcgcgagtcgtttcgggtagcggtcgtgtttttcggcggggtttcgtcggcggtttttgatttcgttttagagttgtttttcggtagcgttattttttcgtgtttataaaagtattttttttttaatttatgaacggatttcgatttttgttttgttattatttatgcgtttcgtattcgaggtgtcgtttttatttatacgttttacggtttcgcgaaattcggttttttagttcgcgggacgcgttgtttgttaggcgggttcggcggtatttcgggggcgggaggggtcggtcgtagggtttttagtttggcgttcgcggggcgttcgtagcgaaggggtgggtgtcgttcgtgaacgtagtagggattagtttagttcgcgttcgtttttgggtttcggttatcgttttttcgttattttttcggtttttgcgtggatcggttcgtggcgggggttgttttgcgttttcgttttcgtagtagtcgcggatttttattaacgttgacgagttagtgtcgcgattcggggagagaagacgg

SEQ ID NO: 7206 - DNA, 5820 bp, Artificial Sequence
  Description of Artificial Sequence: Synthetic polynucleotide
cggagggaaatcgggtcgacgataagggtggttattttcgggtttttcgcgttcggtttaagcgtttttgggtggggtagtttaaacggggagaggggtttcgtgggtcgagggttcgaggtcgtagcgagtttagcgtttggttaaatttggttcgcgcgtttttttattgttttgttagggttgtgtgatttttcggagttttacgttttcgtttaaatagtttttagcgtttttgttggtattcggggcgtttttattttagtttttgtattcggcgcgtcgcgcgtagatcggacggaggggaaagttggtaagagcgcggcgttcgcgggagaaagcgttaatgggcggtcgggtgggagtagcgcgttcgttcgtttacgttacgtcggtgcgggttcggttgacgatcgcggcgtttggggacgtcggcgcgtttcgttcgttaggtgtttcgtttggaaatgtttttattagttgtcgtcggtttttcgttggagcgcgcgcgtcgagttttcgcgcggagttttcgcgggttgtcgggagcggtttagcgttatcgtaggtaggtgaggtttttcgttttcgttttcgtttcggggtttcgagattttttttttttttcgaggaggcggaggtttcgcgcggtcgtcgaggggagcgggcggcggcggttgcggcgatttttcggtgcgtttcgggttgcgagttgtttttcgcggtttcggtagttatacggcgcgggcgggagtttttttagtttaggtagggagtgggtttcgtcgtataaattttgcgaggattgtttttgcgtttaaggggataaagtttgttattcgtcgttaggttttttagaggtcgttgcgtttgttgtaagttgcgggaagtagggtgcgcgggtcggcgcggggcggggggtggggggttcggagtggttaggtttgagttttggacgttcggacggcgtttcgtttagttttaggtcgtatttagggagtaagcggcgggggcgtagcgggagagaggagggagagggtcgcgggtttttatggagggcggttgggaatttagagatttatcgtttgtttttgtggtttttttttttattattggtttcgagggggtttcggggttgtgaggaaatgatttgttaatttcgaggttcgttagtgcggcgttagcgatcgtgaggttttttaaatttatattttagtcgggtgtttcgagcggtgggcgggtataggcgtttttaaggtttttggttttaggttttagaaagaaaggtttttgtttggtgtttcgggttttcggtttcgtttttggttggagttaatttttttgggttggaaggagtttttttcggacgagtttttggtgcggggaattggtggtttttagggtaatttttgaagtattagggttaggttggtcgaagaagggttagggttcggtttgttttttcggaggttttttatggtttcgacggttaacggtaatttcgttaaaataggcgattcgtttgcgtttcgcgttaggggttgattattttttgttttttttgcggtttgtttcggttttggtttttcgtttttcggagcgttttaggttagcgggagtattttattttttcgaagttgagtcggtgttgtgtatttcgggagtcggttgatttttggtttatttgtttacgggtgtatttagtatcgggggtttttagagggaggaaggtttagtatttcgagtttatgtagacgcgtttagttgatatttgagatgttgagcgttttatcgttggtgaaagggatattgggtgttttcgttttaggtttggttttttggtgaaggtatttggaaaatattttagtattatttatgggagaagggtggtttagtgagaattttcggtttgggtaggcgggtttaggttaggttatagggttttagtgagatgtttcggtggtcgttaatttataggttggattgattttgtgttttggaatgagtagtggggtttgggtgaggtcgggcgggttaggaggttttttgggtagttgcgagtttttcgaggtagggtgattgtgattgggttcggattttaggcgttggggtttgttggcgggtaggaagtggagcgtgtgtgtgcggcggtttgggaaagtcgatttagaggttaggtttttgggttacggagaaagggtcgttcgttggtggggattggagcgtcgatttatgtatataggttggaaaggtaaaagagaataggagaaggtggcggtggtggttaaaggaagttttcgaaagggtttttacgtattggttgttttgggaagtggaggttgttttttttagattttgtttagaagatgaatggtcgtttgttttggggtttcggttttagttaagtttcgtcgggtttggaaggaaggaaatgtattagttttaggtttgggtgggttgagttgttgtattagagtttagaggtgtagggtataggtggttgggtttttgggttttggtttttttttttagtcggcggagtgtttatagtcgtcgaggttaggttttcgagtataggtgaggaaaggataagttatagttgaatgttttttttttgggggtttttattttttattttagtttttggttcggttgggtttatattttttttttagtcgggttttattatttggagagagcgagtagtttgtaaataataaataatgggaagtagaaggatgttcgggaaaaattagaaaattgtaaggagtggggaggagggagggtgggagaggggaggaaggagggtgggggaggggaggagtaggaggagagggaaaggggttgagagatttatttttagcgagaaatttcggtggttagttttttattatttataggaaggtgatattagcgatttaggtgagaaagaaagaaacgcggtttgtcgcgaaattaatatagaatttagaaataattattaatgttatttgattcgtgttttttatatatttttcgcggttatcgacgttaaattgtttgaataatttgtatggagcggttatttattattttcgatggtttttttttgtaagtagttcggacgtggttcgtttcggtttaacgcgatcggagaattcgtatttttatttgtaaattaaagtaattacgtagtagatattatatgatgtgtattgtggtttttagatagttattaattatttttaatcgagttgttaaaagagtaggtagatttcgtttttgggaggtaggtttgtagttggggagagggcgaggacgttattattaattagagggtgattttggggcgatttataggtttgaatttaggaatttttttgagtaagtttgtataacgttgttttgtacggttttttttttaatttattacgggaggtcggtttagggggcgagggtaatcggggcgagtttcggtttcggagggcgatggcgtagaaggcggggaacgggttcgggatggttcgggcgtttttttgtcgtttttttgtcgtttgtttattggttttcgttttgaatttgggtaaggttttagggagggtattggtcgagggagttttggggtgggcgttcggttttttttttcgattgtttcgtgcgttttagatagaaagttgggtaaaatggataggggagggcgttttcgttaggtatttaacgttttttttttcgtagttagttttgcggggcgtcgggagggacgagtttagcgggaggggtcggggtttgggttgaggaatttgttttttcgagcgcgtagggtcgttcggtagttttcggtttagtcgcgaggggtagggggaagtcggcggagtacggtcggcggaaaggggatcggggaggaaagtcggggaggcgaggtgggggcggtgggttgagcgggaatttaaaagatcgcggtggagaagatggggcgtttttcgcgatattcggttgtttagaggtgtaaagtcggtgggcgtacgttcggggcggttttatagttttcgggtcgttagttttagggtgtcgggttttaattaaggtttcgaagtttttacgtatttgagggtattttgattagtttttgcgggttgttttgcggtcgtagtgggttttgaaagtttatttcggcgtagggtggaaatcggcgggaggcgttgttgattttcgattaaataatagtgacgagacgcgtgcggggcgtttgcgagtttttttttgttattcggagtagagcgcgttagcgcgaggtcgggtcggtcgtttgcgtagcgtcgggttaattttaattgttgattatatttttagcgtgtttttttataggttttatttgtaattgagacgaatgattatagtggggcgggaaggagtagttgtttattaattaatttttaattaaaagtgtttttcgttttcgggtgattaaagagaaatatcgttcgttgggcgatattgattcggatggaatttatttgttaacgttcggaggaatggttttttcgtttatcgcgcggtcgggattgttttggtttttttcggtttgagtcgtcggcgagtgatcggcgagtttgcggttaggtcgggttgcgcgaggtggggttgacgttagagtttttttcgttttaagtcgcgtatatttgatttgacgggttcgcgcgattcgtttttttttttttttttttcgtaaaatatgtatttttgtcgtcgttgcgaggtcgttcggttttagagttttttcgagttttcggaatgcgaagttaaaggaatcgcggcggttatcgttgtttattttgttattcggttagaaaagtttgcggagcgcggggatggattaatcggtttttttgtttcgtttttttagcgtttagaagtttgtagtttcggagtagtggtcgcgttacgtcggttttagcgcgtagaattttgtaggtttcgttcgttcgtttcgggtcgcgttcgttatgttttattcgtagtttggatatttttatttttcggttttttaggtaagcggagtttcgtttcgtttaggttatcgtaggtgtcggtagggcggatggggcggggacggggggtggggagtgttcgatttacgattgtttgcggttttcgagttagtaaggtttgggtcgcgcgttttttacgtttaatttttgttttttaaattttcggggaaaggtcgaggcgttaagaaaattcgacgggtcgggttcgggttttttgatgtttgaattataaggtttaggttgtgttttaggggagttttaggattttaaggaatttttggggaaggaggtttggcgcgtaaatggcgttagaggttttggaaatttttcggggaagggtgtaggtgttcggttgggttttacgtggcggaggaggttagacgcgtataagttagtggaaaggggcgagtattttggtgtggacggcgggaggttcgggggtattcggggtacgttttcgtgggcggcgcgcgggattggtaaggtttagggttttagtttttagttcggtttttcgttagttttcgcggtttttttttgtagtttttgatggttattaattttttgagtacgtgttgcgagttcggaggtcgtacgttggcggatttcgggttcgtcgtttcggtttaggcgtcggtttattgttcggtttacgagagtcggttgttggttatcgcgcgttacgagtttaattcggtcgcggcgttgggcgtttatgggggtttttatggcggatcgtagggttatggtaattacgtgatttacggttcggaggcgttcgttttttattcgt

SEQ ID NO: 7207 - DNA, 1233 bp, Artificial Sequence
  Description of Artificial Sequence: Synthetic polynucleotide
cgtcggttgcgtagtttagtataggttataggtcggggggtgggttcgggttttgcggagtgggcgggtttgagcgggttggaacgtttcgtcggttttatcgtaggtcggtattttagttttaggttttatagcgggtttttcgtttttattttcgcgggttttgtagggttggggttgtttttgagtttttggtaaggttttcgggagttttagttttgcggagattaaagtttttatattttcggtagagttcgggcgagtgtttcgcgggtggcggcggttgtggggtcgtttgggatttttcgtagtattgattttgtaattttttgtgtttgcgtttcgtggtgaggggcggcgggatgcgcgcgatttttttttgatttagttaaacggaaaagttcgcgcgtttcggttggaaggtggaggttaggtaggattcggtaaaggtatattttaaacgaagtagattttattttttatttgtagagggaaggcggtgtggacggatagaaacggtttttatagttatagaattatcgcggttatagtagcgcggcgttcggtagggagcggatcgtggtggaggtttttgagtcgagtaggttacgtagattcgggaggcgttgaagcgggcgtagttgcgttttggagtaggtagattaggttacggcggagggagaggttcggggacgcggcgtagtttttgcggagaggtacgggggcggcggggacgtttttttattggttgaaatgttagggatcggtttgggcgtggagtagtcggggcgagttcgtttttaggtatcgtcggttgttttaggtagggtttgtaggagtggttcggagtcgggtatcgaggtatcgaggcggggatttggaggggtaggggtcggggtagggtttgttaattaagtttacgggggtcgtcgggtggtggaggtgggatgggggaaggaggttgagtattagtttcgggcgatttaagattttttcggtttaattttaggagggaggtagcgttggcgggtgaagtcgttattttttttcgggaggtcgtttagtagttgtttttttacgtttcggggttattgcgtcgggttttggttattatttgggttttggtttacgtttagacgaggggtagcgcgattttttcgtagttttattttagcggttgtcgtcgtagagtatgaagaggtttggtttttgtagaaacgtagtttagcgcga

SEQ ID NO: 7208 - DNA, 2865 bp, Artificial Sequence
  Description of Artificial Sequence: Synthetic polynucleotide
cgttttttgttttattcgggtggatgttcgcggttttggggttttttttatgttttgattttggggagtttcggttggtattggttcgcgaaggtgatttgcggatagattagttagagattacgttggttggtcgcggcgcgggttataaagtttagcggaggtggggtaggggattaagttgtttcggcgagggaagaaattgttgtttttaaattattgcggttggaggagtcgatttgcgttttagcgtgttaggataagggcggcgcgaggggtttaggggttaaatggggcgttgggtaggaggggttgttttttgtaggggaggaggaatggttttttgttagggatttggggaaaggtaatagttaggaggggatcgggtcgtaagaagtttattttggattgtagtacgggtagttagcgcgaatttagttaggaggtttacggggatcggtaaacgagaaggggatgcggtgaggacgtcggattggcgtttttgtcgcgttgatatttcgattgtttttttttcgtatcgcgttttttagtttgagacggggaagttatttagggtatcgcgtttttaaatagcggggaaaaggcgttttgggcggcggttgagtgatcgagggatcggttcggagttaggagttgggaggcgcggggatgtggtggggaggaggggagtgggggtagtgagggggtttaaattttgcggggacgttcgtttattttgtcgttgcggttagttttttgcgttttttcgacgtttatttcgcgtcgtattagcgttcgtagtagttttacgttgttggcgtaggcggcgcgtaggagggtcgtcgttttcgggacgtttttcgggacgtttttcgggacgtttttcgcgttttcgacgtcgtgttttttttcgttttcgaaagggtagaaagagtcgttcgaggcgatgttgcgggtgtttggtagattcgagaagtttttaaatttttcgtagttagcggggtttttttcgatttgcgcgtttcggggtggggacggcggtggtggggttatgtagcgcgtttcgtcgtttttcggttcggtttcggttagtagtattatgtcggcggtcggggcgcgggtcgggggtcggggcgcgggtaggaagagcgggacgcggggcgcgcgtcgaggttttcgtttttcgtttttgcgtttttagagaagtcgtggttcgcgcgttttagttcggcggaaatcggtattaggcggttgcgtttaaagaaaaaagttttcggaggttgagcgagtttttggggtgggcgggatcgcgggggtttttcgaggcggggcggggcggggcgcggggatacgttttttttcggggtttttttttcgcgtttttttttggttagagtttagagttaggtaggcgttttttcgagcgcggggattgggtatttggtagcgttgttttagagttggggatagttggcgcgggagaagtagaagtaattattaaagaagtcgaattcgagtcgcgggcggtaagcggtttcgttttttttttcgtcggttcgcgggatgggggcggaggtggcggcggggggacgtcggggcggagtcggtttttagtttcgggaatttcggatttttggagtcggttttcgtcgagggcgtcgggttttcggatttgggtggggtcggtttttttcgtcgttttagaggagtagagcgggtttttttttttcgggggatttcgggtttcggggttgattttattcggtcgcggtcgtttggaggtcggggaattttcggggcgtttggcgggtagaggagtcgggcgcgggagcggagtcgtttatttgggatttgtgttcggggagcgttgcgggtcgggttattttgaattgggggcggtcggttgttgtgggggagttttagttcggaagggaggataatttttagagtttttcgtttcgcggaatcggggtcggtcgtggtttgagggttggttagattttgggatggggggcggggtgtttcggaattttagggagtatttgagtgggaacggacgacgaggaatttttcgtttttatgtttggtttgtgttacgtgcggggatttgcggatttattttcggaggttgcgattgggcgttgattttacgtttggttgtttaaaagagtagggtcgcgggcgatagtcgtagtttaggtttatagtttttttggttcggttttgtttttttttcgttagttttggcgtcggggatgggcggggaggaggagggcgtgtgaggatttgttatagggagtttttgatttcggggtaggaggcgtcgtgagttaattttgggggaaggtttttgcgtaaaggcgcggaggtgcgttcgcgttcgtcgtaggttaaagattgcggaggttattagttttgtgtttttttagttttttttttttttttttttttttcgattttgatagcgtgtttattagttgttagtcggtgggaggttttcgcggttttaaggtgaatatagttaggttggcgtagtcgttggggattaggtttgaggtttacgtgtcgttgggtaagttgaggggtacgagggtatcgaattcgaaatagtcgtgggaggtgtaggatgaggatacgtttaaattgcgaagtcgttcgagttttcgtgttatatcgtattggttcgattcgttgttttggtcgtttggttttttagtgtttttagtaggagttaaagggtttgttggcggttttcgattcggtatttgtagggtttcggagggtggggcgcgcgggagtatcgatttttggtgaagacgttttcgtatttgggcggttttgagcgagtagcgaattgagattcgt

SEQ ID NO: 7209 - DNA, 1154 bp, Artificial Sequence
  Description of Artificial Sequence: Synthetic polynucleotide
cgtgcgtttttaaggatgttcggtttttttttaattcgcggtttttttttttttttttcgcggttgtcgttgttgtcgcgaaaattaggagaagtggaacgcgcgcggcgaagcgtcgttttcgcggcggtattgggtatgtttcgtattcggggtcggtttcggcggcggggcggacgtttttttattagtcgggcgttcgggtcggtcgtcgaggtttaggtggaggttgaggttgtcgcgcgtcgcgggaggagtttcgttttcggcggttgaggcggcggcggtataggtggcgcgggtcgcgcgcggggcgtagttcgggagcgttcggcgtcgggcgtcgcggcggttttaggttcgcgttcgcggcgatagtcggttgagcggagttgcgggcgcggcggttgtttttttagttcggtcggttggcggcggcgttcggagtttcgaggagttcgtaggagttcgtggagttcgcggagttgggtagggggcgttgcgttcgtcgagttcggaggggtcgtcgggtcgggcgttgcgtattcgcgtcgggagtcgtttttcgttcgcggcgttcgtttttgtcgttcgttagtattttttgtttcgcggtcgcgtttagataataaaagcggaagatgttgtagttgggtaaggttaggattttgttttgaagtcgggcggcgtcgcgtacgttttttttcggattgaggagttgtcgtcggcggagggtgtatgtttgcgaggaagtcgtcgggcgtcgcgtttttgggtgagttgcggggttgggcggtcggggtcgggcgtagttttttttcggcgtcgtttttttttttttgtcgttggtgggggtggttttgggttttcggtcggtaggcggcggcggcggttgttgcggggtttttgtttgtttcggggaggatcgcgatcgcgttaggtttttttcggaagtcgttgtgtttggaagggggttcggggttagtgttttttttggagcggttattaagtggttgttttgcgtgttttttttttttgttatttattttttcgggaggaagcgtatttagggtaatatcgataatgttgtttttcgttattttgagaatatattcggtgtatttatgacgtttttaatatacgggaggagacgg

SEQ ID NO: 7210 - DNA, 1154 bp, Artificial Sequence; identical to SEQ ID NO: 7209
  Description of Artificial Sequence: Synthetic polynucleotide

SEQ ID NO: 7211 - DNA, 396 bp, Artificial Sequence
  Description of Artificial Sequence: Synthetic polynucleotide
cggcggtttttcgttttttttttatttttttcgtttttatttttattttttggtcgttcgaattttcgatcgggagtttagagttttgttagcgtcgtattgtgcgtcgcgtaagtcgttcgatttttttagcggtatcggttttaagtagtaaatatttgtgcgtttttgagttagggacgcgcgtggggggtgggcgtgtacgcgggtgggttagcgtagagtgggagtttgtgggtgtttttcgtcgggatttttaatttagttgttttcgagagtttaagttgagcgtcgtacgtgttcgtgttatttgttgtattggacgtagtttaatagcgtagagaggtttttattcggtatttagttcgatgtgggtcgtttttttttttttagcgg

SEQ ID NO: 7212 - DNA, 438 bp, Artificial Sequence
  Description of Artificial Sequence: Synthetic polynucleotide
cgaggagtaggggttgcgggtcgggtttttgttgttcgcggttttcgggggtcgcgtcgcgtcgggttacgtgggggttttcgtttttcgagcgggcgtcggtgggaaatttgcgcggcgagagatagggggatggggcgtttttgacgcgattgtggggtgcgggtagttttggaggaggatgttcggttaagtttattttgtttaggtgtcggatttttagtttaggttgcggtttgttttgggttcgtgaggcgaggtcgtagcgtttcgacgtcgggtgggcgtgtgggtggagtggagatttgggtttttcggcgtatgggagtttcgtcgtttgcggtagggaatcgttttttatttttggttcggttcgggtcgggagtcgtgtttcgcgttgattcggtgtaattttttagtttatttttttttacgcga

SEQ ID NO: 7213 - DNA, 438 bp, Artificial Sequence; identical to SEQ ID NO: 7212
  Description of Artificial Sequence: Synthetic polynucleotide

SEQ ID NO: 7214 - DNA, 411 bp, Artificial Sequence
  Description of Artificial Sequence: Synthetic polynucleotide
cgcgtttcggttttcggggagtcgttttttagatttgtttattcgggagtttttttttcgcgtattttttagattttttttgagattcgagagcgttggtttttttttattcgcgatagttttgggatgatagtgcgggtttttttattcgtagtttttattatttggcggttaggggttcgcggttcgggcgggcggcgttagtgttttttggagttgggcggggagggcggggcgggcggagcgggtatggtggggtgtcgggggtcgtaggcgtagcgttttcgttttggttatggagcggtcggcgttcggcgaggtggttatgagttaagttatttagtcggcgtacgttattgcgcgcggcgagttgagcgcggggtagttgtttaagtggatcgatattatcgt

SEQ ID NO: 7215 - DNA, 1137 bp, Artificial Sequence
  Description of Artificial Sequence: Synthetic polynucleotide
cgcgtttgttaggtttagatttatacgtacgtcgtttttgtttgtatatagtgcgttttcggcggttcgttcgtttttttttagtttacgttttattgttttttaagttagaagtttcgtagtcgtcgcgcggagaatagcgatagtcgagcgttcggttcgtttgtttgtcggtgggtttgtttgttcgcgtagtagattcggggcggtcgcgggagttcgcgtttcgttcgtcgcgtttttgtcgggatttattcgtagcggagggttgagttcgtcggcggtttttcggagtttatttattttcgcgcgtcggagcgtaggtaaaaggggaggaaaggtttttttttttagttattattttcgttttttttaagaatttgtttaataaagcgttgaggaaagagaacgtttttttgaattttttagtaggggcggagtttgttgttgttttgcgttgttatttcggttatattgtttttcgcgacgatttttgattagtcggggttacgttcgggagacgggattatgaagcgttcggtagtcgtttggtttttggtcgggtttagtttcggtgttttttagttcggtaaaggtaaggcgtcgggattcggatagttgggtgagggatgggttgggagttttttgagaaacgtcgcgtagggggtcggaggcggttttttcggcgtgttaagggtggcgagcgtcgttggcggcgcggaggaggcgtcgagttttgggtgtttcgagaaagtgtttgtaaagtttgagtagagtgcgcggggtcgagcggggagaagggtgcggggtatcggggtgagatataggaaagaggaggacggtggggagcggtagaagatagcgtttttaggattagcgattttgtggtttattcggttattgggtttcggcgtaaattttttttaggtagtgcgggcgatgttgattgtagacgtcgggtagggttttcgtgcgggcgggagcgggggaagttagtgcgttcgggcgttagttagttgatgcgggaagaggttggggagttgtagggtcgttcgttttcgggtgcggtgttttggcgtagggtttgggttgagtcgttcgtaaatttagattcggcgttgggcgttttggtcgcgg

SEQ ID NO: 7216 - DNA, 2383 bp, Artificial Sequence
  Description of Artificial Sequence: Synthetic polynucleotide
cggattttttaggatcgcggcgtcggttggttgtttcggtttttcgcggtcgcgtgagtttttttttggtggtggagggcgtattttaatttggaaatttttagtttttaatttggtttcgtagattgacgtcgttttcggtggggcggtgggggtaggagggtaaaggggaggtttttttttttttggattgaggttgtaattaatagtttcgtgagtttttatttttggttgattgcgaatttttttattttaggttaggggtcgggattttatagaaagattcgtttttatttttaattttgcggtttttgttcggcggggaagtttagttgcgggttagtttagttgcgggttcggttaagtttggcgcgtttaggtattttagtttttggttcgcggtcgggcgaggacggagggggaggggaaggggttgttgtttttttttttaaattcggtttttaatcgttttatttttcgtcgtttattcgttttgtataggtagttaaaatagagttagcggttaattgacggggacgggaagtaaagtcgtttagcgtttcgttttttttagtcggtttttcgggttttttttttcggcgttcggattttggttttttttttttttttttatttttttttttgttttaatttcgtttttatttttcgtttattttttttcgtattcgggttcgttaatttttttttttaagttttttttttagttcggtttttttttcgggttcgttttttttttttttaattttcgttttttttttttttttcgtttttttttttttttttttttttttttttatttaattttggtttttttcgttttttagtttcgattttttttttattttgttttcgtttattttgcgtcggttttttagttcgggttgagttttacgtgtggacggtcgcgtttttattgatagtcgtcgttcgtcggttcgtttcgcgtttcgtcgggtttttaaaattttcgcgtcgcgttttttatcgtcgtattttttttagcgtttagtttttcgtttttttttttgttggtcgtacgtttcggtttcgcgtattttcgttcggtttcgtagtcgttattcgcgtttcgttgttttgtgggatttcgagcgagttcggagggaatttttttttttttttgggggcgatttttgtttgtttgtttgtttttttttggtgatttttgtagttttttaatattcgttttcggagcgtacgggaattcgtcgagttttgcgtgtaggttttttttttttttgaggtttatattttttgaaattttacgttagggtttttgtaattttttttttcgttcgttgacggttttggagtcgttcggggttttaggtcggttatgtaacgtgtatcgttcggggttgtcggttgtattttcgtcgcgtttcgtcgtttattgcgttagattcggcgtttcgcgtttcgtttcgtgggtagttagggggtcggcgttttgtcgaggtttttagttagagtagggagttcgagttcgagggagttttcggagtcgacgaagggtttattagattttgatttttttttgaggcgcgtagattttgtttttgattatttttttttcgcgggtttacggtcgcgcgttttcggcgtcggcgatggggagaagacggaggttgtgtttttagttttattttttgtggttgggttgtgtggtgttttgggcgtagggtacggtcggttagttttagtttttttcgtttaagtcgtttcggttttagtcgtcgtcgtaataggttcggttcgttatagtaggttttgaaggcgggtttttagcgttcgagtatcgcgaggagggtgtcgtagtggttagtcgcgttcgtcggcgaggatagtaggacgtgtttcgagggtaagtgggtaagcggtttcgtatttagggtttcggtttgggggaggggggaatttttagtttggcggttttttggtttatttcgttttagattttttagttggagtttagagttgtagttttttttgttagaatatttaaagatttttaggagcgcgtttttttttttttttttaatttcgtagtttagcgggcggaaagtttttttttcgggggttgggcggcgggtggttagggggtttaggggtgtcgatcgtagagcgtgtgtagagttcgcgttgcgggaataggttttgaatgttcggcggtaggcgggtttgggttcgtttgttgtaggggttagagaagtttgtttgttttttacgtcggggtcgtcgttcgtgagttttttgtttgaggacgtgtgtagggtttatagtttatttttttatcgttaattcgagcgttttattttgcgacgcgttttttttgatacgtcgg

SEQ ID NO: 7217 - DNA, 2367 bp, Artificial Sequence
  Description of Artificial Sequence: Synthetic polynucleotide
cgggtcggtttttcgtttcggaggttggggagggggtcgtgggtttttgcgtttttaggttaagcggttttggaggtacggattagtaggacgtcgaggtggcgcgggtcgcggtttttttcgtagtagttgtcggcgagaattaggtagggaggcgtcgttgttgattgtattttatgaaagatttaggttcggttgtcgcgttgttatttttcggtattttgcgtcggaaacggtcgttttggagttcgtggtcgtcggcgggtaggtttagtcgttttagtttttgagaaaggtaggttatagttcgatttgttttgtggttttattttataattttaatagtaagtaggtttaggttgggtatttcggggtattaggagtaggttcggttaattggtttttattatgaggtttcgcgtatagggttatttggttacgaggtaacgttggggagttttgtggtttgagggtgggtaaaggataggtttttagtttttttgcgtttagttcgttttttagcggtagttagttaggaacggtttgcggggttataggggtggaggcgttatcgttcgtaggttcgtagtaggatggtcgttgggggatgtgtaggtataggggttggataaggggttttagaagtgtttgttttgaggggttggtgtgttttttttttattagtttagtttttgaggagagggaagaaggtaatttttttaattagggtaggtcgggcggttgttttattttaatattttttatttttaaatatagaaaatttggggtttgtttttaaatttttttggttgttacgttttgggtagcggattttttttgttaatacgtaagattagttttttttcgtaggttgagtagaaagaagaaaggtttaattttaaaattttaaattcgattattagttttcgtttaaacggaagtagggttagttttttacgagttaggtgggaaattgggtttagggagagaaagtgttttagggttaggttgggattcgttttggtttcgttcgtatgcggtagggtttttttacggaggttttagggcgcgtttttcggtttcgaggttcggtcgttagtcgcgcggattttagtttacgtttcgagggaggttaggatttttagtcggcgggattgcgcgtcgttttttttttcgtaggtttcggcgaatatttagttttttttttttttatttttttcgtttttcggttagtgttttcgtttttttcgcgggcgacgggcggcggcggcgggaggagcgggtcgagtcgaggaagtttcggtttcgcgcgttgggatgtagcgaattagtaggggtcgaagaatcgtgtagtgttagagttagagttggattcggggttttagtcggagtcgaaatttgagttagagttcgcggcgggcgagttcggagtttacgagtcgtagacgtagcgttgtttaggtggggtaagagacgttgggttaggggcgtagggttttcgcggtggaggggcgtagggaggtggcggtcgagttttgcgtagtttgtttttggcgtgtgtgggtttattcggcggcgcgggatagcgtaaggcgcggaaggttaggagttttcgaggtagcgcgaggagttcgtttttgcgtttagggtatagttatagtcgtcgttatcgggtgttattttatttaatcggcgggattaattttttgttttggtttcgggtattttaagagggtagtagtttcgggggtacgggttacggtttcgcgaagggtataatttgagaagttcgtggtagtttttcgtagcgtcgggtgatatagggtttttttatttttaggagaagtgggtaggagagagggtcgttcgttgtttttcgttgcgtttagggatggagggttttattatttatggaattgttggtttttttgcgtggttcgggattttagtcgtggtttcgcgttaagagggtattttttttaaacgaaatcgtttcgttcgttcgttcgttcgttcgttcgggtagtaatgtcgtagaaaagtagtagacgtcggttcgcgttttggtttttttcgtttcggatttcgacgtttcgtcgtagcgttcggaggtgtttttagtttaaggtagtttgttttcgtcggtataggtcgggttttttttttttaggagagaaattttaatttttttcgtaacgtttaataaagatattttcgcggttttttttaggtttggttgttgacgtagggtttcggagtacgtagtcgttttttaagaatcgggtttcggatttttgaaattgattagtttcgtaaattggagtttattttttcgcggtaaaggtagggttttaaagtcgggatcgt

SEQ ID NO: 7218 - DNA, 1235 bp, Artificial Sequence
  Description of Artificial Sequence: Synthetic polynucleotide
cgaagtttagtcgatttttgattgttagtatttcggttataaggtttaaggcgaatagttgtcgtacgtcggcgcggttgtggttgtcgaaggagtaaataattttatcgttggggtttttatttagattcgttgtaaggatttgtattacgcgcgtgtcggagggtgtattttttaggacgcgcgttcggtataaggattggttgaagataggcgtattgttattcgcgtttagtattttgatgtgaataggtaggttggcggagagagttggggttttttcgtttaacgtcgttagtattaattggagattaggttttcgttttcggtttagggcgcgttttaatattagtttcgcgtatttggtgttgttttttcgcgtttgtacgcgaagcgtaaagtatttatttcggtttagtttataggtttgtaaagagttgttttttatatcgggatcgtgcgcgttttcgagcggaaagcgcgttttcggagttacggtttcgttaatttttaattttattttttgggtagggaaagtaggattgttgtcgttgatgttttggattattatttttacgttgaatagttttagcgggttttttattattaattttagagttatagtgtaagagggtagtgttttatatagtttttttcgatttagacggtcgtttataaatattttttcggtttttcggtttattttaaagaattttcggttagttttagatattattcggaatttgcgggttgagaggttatcgagatttaaattaaggttcgcgattacgttgtttatagcgaaatttttttttttttttttcgggattttatagtgaatgatcgtggaagttttgtttaaggtattaagtagaagtaaaatttttattattttttcggtgtttattagttcgtttttttaggtttttgggattattttatttaaaagtagttttttttagcggggtttagatcgtttttgagatttcgttgagaaatttttagcgggttagcgtttgggcgttgggcgtcgagttcgatatggttttttggatgtcgttgatttgttcgtcggttgtttagtttttgttttatttcggggcgtagaaaggggacgggtaggggttcgatttttagcgtttttattggtcgatagcggtatatagagttttagttaataattgtacgaagaatgagttagcgtcgggttttttgagtaggatacgcgttagcgt

SEQ ID NO: 7219 - DNA, 3043 bp, Artificial Sequence
  Description of Artificial Sequence: Synthetic polynucleotide
cgatttaggagagttcgatacgtcggatagttgcggttagtcgtggttattttggtttttcgttttcgttttttttattttcgcgtgtagtcgggatacgggaaaggaaagttttggaagttaagcgtcggttaaaagatgatttgttcgcgtgttttttcgtttttttttttagtcgtgttatatggcggttttaattaggcgggtagtgcgtttcgtcgcggagatttagggtcgcgtcgtttgggtagtgggtgatgaaattttttaggcgtattatcgtagagggcgcgggcggggcgcggggcgggggtgggggatcgagagttggtatcggggtttatttgttttttaggaggagggtggggacggggggaggggcgagtgcgcgttaacgtcgggtgcgtgttttggggcgtttgggcgcggcgttcgtgttttcgtttttttttagttttgcgagtttttcgagttgcgtcgtggggtgacgggatcgagagtagtttttgttttcggtttcggcgcgggggagacgtgagcgtgtatacgtatatatatagtaggggaagaggcgttttaagcggcgtttaattttttttttttttttacgggtcgggtgagaaagtagtcgggggttatttcgattcggcggtttttggggagggggtcgaataagaaaagggaggagatggagataattttttcggatttagtttttttgtttttgtttttgtttttattatttttatcggatgattggagagtaaaagggaattcggagcggggtggcgagtagcgttttgagaaaatgtaggagtgtgtttggagacgcgtaaagttgttttttaagttttggttttcgggtacgcgatgtttcgcggcgggttgatttagggttgttttgggtttttttgttatttttttggaaatgatgtaagttttgattgttatttggatttttgtagtttagtttggaatgcgtttggattaggggaaagacgagaaacgatattttaggtgttgtacggtttattaaagcgggaagatagggtagttgtttagattaaatattgtatttagtgtttttgtttttatttttaatcgtggggttttttttaatgtaaagtgttataaggttaggaatttttatgtgtgtttagttggtttatagtattattgtgtttaggaaattgttttaatttattaagttttttgggttgggaattttattgaattttaaacggcggaaagaggaaatttttttaattcgatgtgggtgtgacgcgagttaggggttttagggatattgttttagagtatatcgtttttttttaatagtaattggagtttggattcgtttttatattgtatagttttttcgattattgttttggagtattcgtatacgcgtacgtattttcggtcgcgtttatatatatttatatatacgtacgtaaacgcgtggtcgtcgttaggtcggtaattttgttcggcgtttttagcggcgttcggtttttttttgtagtagttgagcgtaggtttcgtttttcggtcgtgttgttaaaagggtcggggtttcggattggtttagtcgtcgggataatatttgttcgatttttttatttaagtgatattagagtttttagggatatttgaggtattatttttgttattgtcgggtattcgcggcgttgttaacggtttggttatatgtttttcggagagttacgggagggcgttgggtaatttttattcgagtcgcggtcgcgaggaggagggaaaaggcgagtaaaaaggaagagtgggaggaggaggggaagcggcgaaggaggaagaggaggaggaggaagaggggagtataaaggatttaggtttttcgacgggaggttaatattaagaattatgtgtgtcgagcggttgggttagtttatgattttggttttggtgttggttatttttgattcggcgcgggggatcgacgttattaatttattcgagggtttttaagataggagtttttagtagaaaggtcgtttgtttttgtagaatataggtaagtgtatgtgttttcgtagtcgggagttattgggagaggatatcgtgtatttacgcggcgcgttttaggcgtttcgtcgggagttaggcgtttatttagggttacgtaaatttttgggatggtacgggacgtgtaaagggaagcgcgaggtaaggcgaggttcgcgtcgggtttcgagggttcggaatttgtacgtgttagtagggtgatgaaatggttggggtaggatttgttgttgttttttttagggtcgaggggaaatgaagtagcgtttgacgttgttagcgttagttttcgttttcgaatttcgggttcggtgtaaagcgcgttttatttcggtcggtacgcgggaggtttagagggttttcggagttgggttgcgttttgcgttcggagaatttttttttttggtttgtcggttttagtaagggtgtcgcgttttttttttttttaaaagatgttcgatattttagaattttgtcggcgagataaatggtattgcgaattttttttttgggggtattgttttcggaagggagcgtgagggtagcgtaaagcgtattttcgcggtgttgtcgttatttttagtttttggttaggttagtaagttaagaaatggtgatacgattcgaatcgtgcgttttttttgttttatcggtttttggtttatcggtaagttgtaaagtagagttaggcgtgtagggtacggggttggttttttttttagttcggaaagagaaagaaaatttgtttatagttttttcgttttacgatttttttttcgattttggggggtcgtgtgaacgcggtagcggcggcgtgcgtgcgtttatcgtacgagttggaatgtacgagtgtttattagggacgttttaagtgagtgaatggcggttttgtgcggttttgtttcggcggcgcgtggggttttacggattttgtcgtttttatatgttggggtcggtatttttattatttcgagattttcgt

SEQ ID NO: 7220 - DNA, 864 bp, Artificial Sequence
  Description of Artificial Sequence: Synthetic polynucleotide
cgcgatttaatttttaattcgcgatttaatttttaattcgtgatttaatttaaaattttcgatttaaattttaattcgcgatattaagtttgcgatttagtttagaattcgcgatttcgtttggtttattttttagtagcgatattggcggttttcgattttttagatttagtgagtttcgtaaagtcgttcggttttcggaagtcgtaggtgtaggcgtcgttgggttcgcgggtttttttggttggttcgggttgttttaggattacggacggaaaatcgtaggcgcgcggtttatttcgttttaaggggagggttcgtttggtcgtgtagttcgtttcgttttttttttcgaagagagatttggtgttggtatgggtatttcgcggttatcggagtggtttttcggatgagtttggtttcggcgttgacgttttggttttgggggttgtttggttggtgttaggtagcggaagacgtttggagagttattcgtttttttttttattcgtttttatcgttgttcgtgttaggacgcgtagtttgtagttgtagtttaggtattggcgcgggatggcggagttttttttggatggcgttagggttatcgagtgtatagtttatttggtttgagggtttgttttttttggatattttttcggattttgatttttggcgttgggtaatttataggatgagatttatcggttgttggcgaagtcgatcgtttgattttgttgtttgggcggttggtttcgggattcgcgttgttggggacgcgggtttggtttgcggtgtttagttatttgttgcgggcgcgttacgtttaggttggtggttgtagtcgtagtttcgcgtttgcgg

SEQ ID NO: 7221 - DNA, 2071 bp, Artificial Sequence
  Description of Artificial Sequence: Synthetic polynucleotide
cgttcggtcggcgtcgtttttcggaggttgtgtttttggggtggttggcggcggggttttttcggttcggttcgcggcgtttttttgtcgtcgtttcggggtgtttttgtttcgttgcgagttcggtatcgcggcgacggcggcgcgaagagggaagcgggcggcggcggcggtcgcgttaagatgcgtcgggttatcgtaggttgaggcgttcgtcgttttcgttttttttttcgttcgtttttttttttttcgtttgtttttttcgttcgttcgtttttttttttttttcgttttttttttgcgttttttcgttcgttttttcgcgtttcgtttttttcgtttcgcgttttgcggtgttgtagttgcgggcggttttagttgtttttagatgtgggttgggcggttcgcggggaattttcgcgtcggttgcgagtgcggggtttcggttgtagttcggttgttatggattcgtcggcgggagtcgttcgtcgtttgttttgtttcgtgttgttgttgttgttgttgttgttgtcgtcgtcgtttttgtcgtcgtcgtcgtcgttcgcgaacgttaggttcgtcgtcgtcgtcgattttttaggtaggtgcggttcggtttttatttttcgggattttcgtcggtttggttttgtttcgcgtgtttcgtcgttttttttttaggcgtcgtttagtttgatttgggtaaatttcgcgcgtttcgttcggggttaagttggttaatttcggggtcgggttggtcgcgtagggggcgtttcgtatcgttttcgagcgttttgggtcgggggagtttcggagtattggcggtttttgagtcgcggagggtggggacggagggtcgggaaaagtttcgcggttaagagcgtagagttagttttagcgggttcgaggggggagttagggcgaggcggcgtcggggttcgcgttcggggacgtttcggaggagtcggttgtcgagcgcgtagttttgggttttaaggattggttggggcgtttcgtagggaattttcggagatcggagggattttgttttattttttttagttttcgggcgttcggggagacggggtcggtagcgggttgagcgggagttggataggtaggataggtcgttcgtgttcggggaagtcgagatttcgtcgtttcggaggttggcggtgagggtattcgggcggtaggggttcgtcgaggggtcgtggtatacgggtaagggggttaattcggaatggttttcgagtagttttacgttttgttaaggacggtaggtgtaagggtcgggggattttttgacggggtcgttttttcgggtacggggaggtttttatcgagttttaattttgaacggggtagggggtagagtttttggtaggtaaggttttcggaggagggaacggttggggagtggcggagtttcggagtggtggttttgttaacgttttttttcggttgtaggaaagtcggggaggtgtaggttggtttttggggtcgtttggcggaatgtttttttttttcgtagtggggcggggtttgggggggcgtggtttgtcggcgggtttttgaggtattggggtttcgtggttttcgtcgatttaacgttttttttcgttgtaggcgggtttttggggtacggagcggagcgtattttggcggtgttcgtgcgtattgacgtttagggtcgtttggtgttttacgtggtgtcggtagttacgtttagagtaggggtacgagttcgtagggtcgtttcggttcggatttcgagttttttcggaggtaacgaggaggagtttggtagttattttttttataatgttacggtttttggtcgagatttgtatttgcggttgcggtttaacgttcgtttcgtggcgttcggggttattatggagtggtagggcgagaagggtattattcgcgtggagtttttgttcgggagttgtttttacgtcggagacgtggtcggtttagtcgaagttttttttgtggcgtttagtaattgcgatgggttggtgagtacgtatttttttagttttttttttttcgttgttttcgt

SEQ ID NO: 7222 - DNA, 1170 bp, Artificial Sequence
  Description of Artificial Sequence: Synthetic polynucleotide
cgagttcgcgttaagagttacgtcgagacgcgtcgtcggtggggttacgcgagatgtaatcggagagtttaaaattagtttaggattaattttttagggattcgtttaatttttttcgtagaagagtttaagtggggtagtggtcgttataggttgaggatgattttcggacgcgttttaggcgcgatcgtattattcgtttttagtttaaagtttgagtgatttggtattatttttttaattgttttttatttttttcgtatttttgttgtgtttatcgtttttacgtatttgagagtttaaattatgttaagacgatttggagaaacgttcgatttgttttttaagttacgtaaggatttatttagacgtacgttcgcgcggagacgtacgttggtatacgcgtttatatacgcgagtatatatacgcgtatattattcggttcgtgcgcgcgggtcgttgtttttgttgtattatgtaaaggtggttgggaaagcgcgttgatttatatttatatagtttattttttttttatagtatgtgattaatacgtatttcggggaggagggagcgcggttgggggtgttaatcggaagggaatagatagtgagtgttattttgttgggaggttttagaagtaaagcgttaacgacgatagtagcggtggttttagttttattagtaattgtcgttggtaggagtattatacgttttaggagtttttcgggtattaagtatgggtttagttcgttttagttattttttttttttatggttttattttcgttgttagtatttcgattttagtttgtaattttgattttgggtttgattataaatgacgaaagatcgcggtagtttttaaagtgcgggagcgagtttcgtattggttagcgcggcggagggatttttttaggaggttttaagtttttaagtttgtggagagatttggtaatagttggtaaggtttgttttagttattttcgttggttttttgtttttgtatttagcgtttgagggcgttattcgttttttttttgcgttttacgtaagcggtttaaggaatttattcgattcggatttcgtttcgtatgttttttaagttttcgttattttcgtaggcgttttagaaaggcgtgatggttttagtttagtgttcgttagttcga

SEQ ID NO: 7223 - DNA, 2168 bp, Artificial Sequence
  Description of Artificial Sequence: Synthetic polynucleotide
cgcgttataaacggggatttaatttattgttcgatttttgttagaggcgatttatttgcgtttttgttatcgtattttcgttcgcgtttttgcgttttaggtttttcgttgttttttcgttttttgtagcgcgggagcgttgtttcgtttggtttgttggttttttttagattttggttatttttttcgtggtaggaagggttatatgtattgatagatttttcgttggtggtggttgggtggtggcgaggcgtgttttcgggcgcgtttaaaatttagtagttttttttaagtagtagttttttttatttcgtttttaggattgaggatttagttttcgatgtttttttattttttttcgttttatttcgttattattttttaatttttttagtatatttttaagttttatacgggcgtttgttttttttttgtattttttagttttcgggcgtttcgttcggttgaagtttacgtattttgggatttaattgtttttaattattcgcgtagtttaagtttcgcgtttgtttggttttcgtttcgggagtttgaagttatcgggtagtttattgggtgttttcggggaaaaggtttaagttgtagagatgagagaagtggggttgggggaggggagaggttttagaaggaagattacgaatacgtgcgaagaaataaaagttattacgtgtgtacgcgcgcgggggtttaagggcgcgagcgcggagtacgttttagggggttagggatagtggttttttgtagcgggtatagtagggggcgcgggtatttatacgaaagcgtggtagatgaacgtttagtcgcggggtttttttagtacgttgtataggtagttttgtattcgtcggtatttgacgttgcgtcggtagttttggttattcgtgtaagagagcggtttttttagtaggtttattcgggttttttgtttgtttcggcggtttttttttaggttatcgtcgtcgttatcgagcgtggtcgcgcgggtgtttagtagtagtaggtcgtcgtttttggcggttgtcgagtttagtagtattttgtttcggtcggattttatattttttatgtcgttgtttaagcgtttttcgttcgtcgtcgtcgtcgttgcgtcgttttttatttagagttcggcggcgtcgttttttttttttttcgcgtggtggcggggtatggtattattacgggtatcgcgagggggtcgttagcgtttgcggcgggggtagcggttttatgtgcgtcggcgggttttaaggaggaagtcggcggtcgacggggcgttcgttagttagagatttttgagtcgggggcggggaagtaggtagttagtaaatcgttcgggtttcggggcgggaaaggaggggttgtagaggaggtcgaggagttttaatttttaatagtttttagtttcgaattttaaattcggatttgtttggggcgttattttgagagggttttttttgtttttttattttcgcgattattatttttttttttttaaattgttttcggggatagagtgggggagtgcggggcgtttcgaggcgcgtttttacgcgcgtatatttagttttaggtttttttttttttttttttattttttacgttttgtagcgaaacggttttagaagttttttttcgaggcgcgagttcggtttggttttggtaggggttttgtagttgttcggaaggtgaagttagttttgtgttttgaggagaaattggagatgtaggtcgttgtgttttttcgttgttacgtcgttgcgtcggattttgttattttttcgtaaggggtgagagcgggaatagttttgttttgttttttaggtattatttagtttggaggttggagcgtaaggtaacgtttcgggaagtggtattcgggttttcgtatacgggcgagtttttagtagtttagtggatagattcgtaggacgcggttgttaagttcgcgaggtaaggattaggtattttttcgcgttttattttagtttgcggattgtgattttttattttagtattagataagttcgcgagtaattgaatattttttttagtttatgggtggggtgtggaaagggcgtaaaattttaaagtggttttttcgcggtgagcgagttgtttcggggttttgtttgattgtagcgcga

SEQ ID NO: 7224 - DNA, 2053 bp, Artificial Sequence
  Description of Artificial Sequence: Synthetic polynucleotide
cgggaagatttggaggtcggtaaaacggagcggtgcgggatgatgtttgggaatatcggtaaggtgttataaaatgaacgttaaggcggttataagaggacggtcgggaatcgaatttagcgtttagtacggggtttttgtggtcgacgtgacgtggtttcgttaggtggaaatcgtgcgattttttttcgatttaatttacgagagataaagatgtttaaataattacgatcgtcgtcgtatattttgtagggtttcgggggcggaggggaggggagcgttttttcggtagaagcggcggtttaggtttgtttggaggttcgtaatttattatgataaatgtaaagattaattaaggtttgattcgtgtatataggaggtagacggcggttgatagtggaaataattaacgagtatgttttttaatttttgtcgcggttgttgagtatatcgcggttttttaggcgttcgtcgttgtcgttttcgagttttagagtttttagttcggttttggagtggggcgtttttttttagcgaaaaggtgcgaggagcggggtttcgggtggtcggggagggggcgcgtcgggtcgggaggcgcggagttagtcgtttacggagtttaattgtttgtatcggggatcggcgggcggggcgcgttcgagtggtttcgtcgggaaagggcggcgggcgttggagaaggcgtttggcgcgaagttgggcggcgtttcgagggcggaggataggtggtcgcgcgatcgtagttaggtagcgaacggttcgggggttgcgtagcgcggttttaaagtttagttcggtttcgggtttagttcgttgtcgtttgttacgggagcggttttgcgcggagggagggggcgcgagatcgtattttcgggttcggcgcgtttcggtttttgggttttcgtttttttttttttttcggtttagttcgttgttttagacgtgattttcgcggaaggtgttggcgatgcgcgttgttcgggagcgtgtgattaatggtttcgaggtcgtgggcggcgtatgtattagtttttttttggtttggttagggtgtgagggtattcgggagtatagcgaggttatggtagcgggggttttcgggagcgcggcggtggaggaggaggaggaagaggagaagtaggtgacgcgggtcgaagaggtttgttttttttggttttagggttggcgtcgcggcgggtttttcgttttaagtaaagtttggggttacgggcgttgcgtttaggttttttttcgcgtagttttttcggcggggtttgtgtcgtcgtcgttgttagggtaggataaaggtttattaatacgtgatgggatcgcgttttataaatgggattggagcgagagggagttagagatagcgcgagcggagggagcggtagggattgcgcgagcgggacgaggcgacgggcgttcgggttggcggagacgggcggttttacgtcgggttaggcggggttcgcgggaggatttagtgaagagtttgggaaggggcgaggttcgtcggcggtcggagtagcggggcgttagtttcggtcgttgtcgcgggcgggcgttggagatcgggacgtcggcgttcggacggattgatttgttgatcgttcgtcggaggtatattttattttattttatttcgtttcgttagtagttcggcgtcggcgtcgtttttcgtacgttattttttttgttattttttttttttttatttttttttcgttttcgtttttttttgtttttcgcggcgttagcgtttttttttggttcgggcgggggtttcggttttttgtagagtttttcgtagttagtgggggatatttcgttttagcggataattagtttttgagttgggcgagaggtgttaagggagtttttgtttcgaggattaggggatgcgaagggtaagatttggtagagttgcgtttggaaatatttttttcgtttttcgttttttcgggtacgattagtgtggtttttaagtgtttttcgtggagtttttatttcgtgtgagcgaatcgtgcgtcgg

SEQ ID NO: 7225 - DNA, 1679 bp, Artificial Sequence
  Description of Artificial Sequence: Synthetic polynucleotide
cgttttttttcgggaagattcgttataagtcgcgtttttcgtcgtttttaatttcggggtcgttttggtcgtttgtgaagtagacgtttacgttattgtcgtcgtttttgggatttttaggtttcgggggatagtcgggttcggtattcgggtcgtcgttcgttttggcgagtagattttggttagggtggcgggatttgatatgtcgttttaggtttcggcggcgtataagtattttgtcgtagaattcgtagcggtagggcgtattgttttcggcgtgtagtcggatgtgtttgttgagattgttggggtcgtcgaagggtcgtagatagattttgtatttgagtggtttgtagttcgtgtgcgttcgtatgtggattttgagtttatatttgcgcgagtatagtttgttatagtagaggtataggtggtcggttttgggtttatttgcgtcgttgttttcgttgtcgtcgttttcggtgtttttcgtcgtcgcgacggtcggtggtaacgttttcgagtttaggcgttcgcgatttttttcggtagttatttcggatagttgttgattgtgtatggcgatttttcggtcgatgttggttagcgattttagttcggcggggtttagggcggtcgttgtaggttcgttgaagtaggagatggatttcggatattttagtagttcgtcgaagtgtaatttgagcgggtaataagcggtggtggtcggtgagtcgtagagtagtttttcgttgtagattgtaaaggtcggtatgacggcgggtaggtggttgtatttattattcggataggttttgagatcgttcgggtcgaggggcggtagcgcgtagcgttcgaggggtaatttcggcgtagggggtagttgcgtataacgcgtttttggtagcgcggcggttgcgggcggggcgcgttttacgtgtttgaaggcggacgtttttttcggggggacggagagtagagggaagtcgcgtagggttttagagtagggtaggttaggcggcggcggcggcggcgggtttttagcgagtaggtatttgggatggtggtggtggtgcgcgtggtggtgatggtggtgattcgcgtcgttcgtcgtcgagtttttttcgttttcggggcgttcgtacgttcggttttcgtttagtagtttgtttaaagcgaggtcggttttttgtttgttgttgtttttttttcggtaggggtcgtcgtgagcggtcgtcgtcgttttcgttaggtcggcgggtttgaaagttgagcgtacgtcggggtagaaagttaggttgtcgattttcgtcgaggagtcgtttacgatgtcgaggaagtgtttttgttttcgggcggtttcgtttatgtttagggtacggtttagttgttttttgttttttttgggttgtttttatttgtttggggtcggcgaggtggtcgagggcgcggaagaggtttcgcgtttgatgttttttcgcgtatcgtaggtttgaattggtggcgggtttagggggtggggtcgtaaagtttttgtttgggaaggcgcggcgaaatcgggcgtcgggggttttggggagagatcgaggttattagtcgttgggacggcgttttggcgagtcgcgtgttcgtggtgtaggaaggcgtcgtttttatcgtcgttgaatacgtagtggaaacgt

SEQ ID NO: 7226 - DNA, 1474 bp, Artificial Sequence
  Description of Artificial Sequence: Synthetic polynucleotide
cgcgtgttagaagtttttttcgcgcggtttttttttttttttttttcgtagtaggaggtttgattttcgcgttttgtattcgtgtggattaaacgtttagtttttttcgttataatcggacgggaattcgcgcgtttttcgggttattttttgtttgtgttgagttatgggcgaattttttaaaaaggagatatacgagtgggtcgtttaattttgaggggaaacgaggatttttttttttatttttttttttgatttttttttttattcggatcgtatttttcgaattattttcgtaaggaggaacgacgaatgtcgtcggttttacgagattgtcgttttttatttatgtttaaataaggatagaattttgtagcgaggcgataagaaaataaataagcgggcgttttaaatcgagttttcgggtgtgtagattcgtagcggagtcgcgggagcgaggtgggaaattttggtcgcggcgtcgggtttcgttcgtcggggggcgcggggcggcgggcgtatgcgcgtgcgcggtgcggttttagttttggttgtcgtcgtttgtcgtcgtcgtcgcgatgtttattttagttaaagcggttgcgggtttggggattcggttcgggtagcggagttttcggattcgtcgattcgtcgaggagcgcgcgtcgggttttcgtcgagtagttgagttcgtgtgtttcgcgtttcgcgtttcgaagttgtcgtttcgaattttggtcggcgttgtttaggtttttcgttagggattagtcgggtaaggatgggaggcgtagttgtagtcggtttttttttcgcgtcgggttgtgtgcggtttcgcgtttttttggttaaatcgggaagcgaaagttggattttagtttttcggggagtaattttgtcggttttggcggtagttgtttgttttacgcgttcgggtagtcgggggcgtcgttttttgttttttttcgttggtcgcgttttcgaggggttttcggtttttggaggtcgttttttttttcgggtttgggcgttgcggttatagagatttttaacggttagcggtcgtcgtttaggttaggtagttttagcgttttcgggttttcggttttatcgagtgtcggttttcgcgttttgcggcggtaagttttttggtgagtttcgtttttgtttttttcgtcgagttttcggggttttttttcgttttttgtagggtcgtttcgagtcgcgtagagtttgcgtgtagtcgggcgcgcggtgtcgtttatttcgttttcgttcggagagtagggtgggttacggcgtttattttttattttcgcgtttcgagagcgtttggtcgaggaggatcgttgttacggattttttttttttaaggagcgaggttagagggtttcgggagagcgtcgatggttggggattcgaggttcgcgttatttattcgtaattttttttttcgagtttttgggaacgg

SEQ ID NO: 7227 - DNA, 675 bp, Artificial Sequence
  Description of Artificial Sequence: Synthetic polynucleotide
cggtttcggtaattttcgtatttcggttgcgtcggtcgtggtcggacgttcgagacgcgcggaggtatagtagattttggcgtataggttatgtcgtcgtaaacggggggcgcgtatttttttttaaagtttttagaggagatacgtatttggtggtagggggtgtaggcggttgcgaagtagggttgcggaggattatagatttggtatataatatttagatagtttatgatttttcgtagcggagacggttaagtgtttttttattaatttttttttttcggagtttaggggtgttgtatgggcggcgtttggattcgcgttttggagttattaggcggagtaaagttagcgcgtttcgcggttcggaatttagttggttcgttatttttttatttttgcgattttattttcgatcgcgttttagggtagaagcgtttgagttttcgttagtgggtatttaaagtttatgttcggcgggcgtgttgacgttattcgggggttgcggagcgggagggggcggtggggggcggggatcggggggttaatggggagcgagggacgtttgttggaggggtagcgagtgtgtttttcggggtttatttttgataagtatgcggttaagggtgtcggagattatgcggtttttagcggattcgaggtttcgtatcgcga

SEQ ID NO: 7228 - DNA, 1133 bp, Artificial Sequence
  Description of Artificial Sequence: Synthetic polynucleotide
cgtcggttatcgtcgagtttttattttatttaattagatcgcggggaaggatacgtaaatttgtcgagggttcgggggtttcgggttgttgttgttgttagcgttttgggaagtgataggtattaggatttgttggtgcggcggcggcggcggcggtagttttagtcgcgttcgttatatatatttttattcgttcggtgtatacgtcgcgtcgcgggtagtgtcgtttgcggaggcgcgttcggggttcgtaggggtagtagcggtagtttggtagcgtcgtcgcgttttcgggtatttggttcgcgaagtttcgtttttgtcgtttttcgcgtcgttcgttttacgttttttagcgcggtcgtcgttcgacgcgcgttcgttttgcgttcgtcgcgcgtcggtttcgggggcggtagaagcgcgcgagggtcgttgttcgtttttttgcgtagttcgcggtttttaggtattttgcgttgttgggttcggcgggcgggggtggggcggggagcggggcgcgggtcgagcgggggcgtttcggtttcgcggttttcggcggttgttgtagcggttgttgcgcgtaatgatgcgggttcgcgtcgcgttttagtagcggcgttgttttttttttcgtttagatgtgtgaattttttttttataataaattttttattttgttttttgtcgtttttttttagggggttaattttgaggatcgtaggggttgtcgtttaggcggtcgtaggcggcggtgtttaggcggaaaggagcggcgcgaaagcggcggcggcggggatcggggtttcggggcgaggagtttgggcggtatgatcgcggtttgttgagttgaagtcggtcgtgtttttagagttatttcgcgggagcgaatcgagtgtgtgtgtgcgcgcgcgttcgggggagaagggattaagaggagggttagggaaggaagttggggttatggaataggggtgtaatcgaggtatttagagcggtcggaaagttcgagtggcggagaggttagaggtggcgagaaggggcgcggcggtatcggacgtatcgtttagtatttggtttttttgggttttcgaggatttgaagggtcggagcgcggagagttacggagtcga

SEQ ID NO: 7229 - DNA, 1808 bp, Artificial Sequence
  Description of Artificial Sequence: Synthetic polynucleotide
cgggcgggggacgttcggtagttttgtaaacgcgtagatacgcgaattttatcgtttcgcgcgttttttggtttcgttggtgcgtgtcggggatgcggtcgcgtaggcgttcgttttttggttttttggtcgggtagcgggcgttcggttatcggagtttagtttaagggtttagtcgaggttttttcgcgcgaggcggttgcgttaggtgagcgggtatcgcggtcgcgttttttttgttatttatttagcggttagaggtattttgcgtttgggagttttaagtgttttcggttgggtgtttttgttcgatttttaaaaggaaagtataaatttcgggtgcgagtttaatttaggatcgaattttttcgcgaatttgaagttattatggggcgggagttattttagcgtcgcgttcgttcgtttttcgtatcggttaggatgttgcggaaggtaggggcgtcgagaggtaagggtgaaagacgtcgtttatatttttaaagttcgaatttgtattttttttgcgaggcgtagggcgggaggatcgttgtagttgggagtcggtttcggataggtaaagcgattcgataggtgaacgcggcgggagggagtaaacgcgtaaaaaattttgtatttattttttcgttggcgtttttttcgggaggcgttttggttgtcgatgtattttataaagtttaaaatgataaaaagttaagaaattagtcgtaagtgtatagtaatttagtaatgtttttttttttttttttttttttttttgattgttaattatatttaatgtttttaaaatatatgtaggtgttaggcgtatatagatagtgttcgagtagcgggatttttttttttatattcgataggcgtgttgtgatggtaagcgaagtggggcgggtggatagggaaattaattattgtatttttaaattatttaagtattgaattgcggcggtttcgttggggtggttggtatcgtcgcgaatcggggttttaggagtcgtcggggcggtcgtaggtagtatgttgtgcggtaattgtcgtaggcgggattcgggcgggcgagcggcggcggcggcggttgtagcggcggttttttgggtttagaagttgcggcggttgcggttgtagcggcgggggtttttggagcgtaggggagcgggcgtcgtcggtatagcggttatggttaaggggcggcggagagatttcgagttgtttttggcgtgcgcgagtaggagacgttttagtgttgggttgggttttcgggagtattatataggggaggaggaggaggagggtagggaggggggagggagaggagggtagggagggggagaggaggggggatggttgtggggggcgggggggagttcgggggcggggaaggaaattgttggagtaataattttgagcgattttaataatttttaattttaagagggaaagagggagttggaaaagtataggcgttgcgttttggtagagggacgggaagaggcgtttaaggggtttcgggtttatagcgtagtatttttggatattgtagtgacggtcggagaattttagttagaagaatggggaaagtagtgcgtgcgaagagtttttttagaagggtagttttggcggggagatttgggcgtattggggttggtaggtagtgttgaggtcgaagattttttatttattttagttcggttttttttcgcggttttaagttaggcgtattcggttgtcggtggtcgtgcgtttttgcgtttttgtgttttagcgtttttattttatttttagcgtcggcgcgt

SEQ ID NO: 7230 - DNA, 1323 bp, Artificial Sequence
  Description of Artificial Sequence: Synthetic polynucleotide
cggtttcggttgcggtggtcgtttatttatttttttattttcgttagtattttttttttttttttatttgttttgagtatcgggttttgggggtcgggtcgtttttttttgtttttagttttggttttattttaggagttgtcgggacgtcgggcgtttttggaggcggacgaagaaggcggtagggtcgggggcgttagcgggaatttcggtcgtcgcgggtagtcgcggtttttttttttattttagggttcgggcggttatcgcgggcggatgagttaggcgagggggcgggtggtaaggggtgtaagcggacggagggtgggggcgtttttatgttcgcgtcgggggggtatcggaggtttcggggtaggggatgcgtcgttgtcggtgtttatagagggtcgtcgttattcgggcgtagagtttaggcgcgtttgttttcggagggtatcgggcgtagtaagtcgggtaggggagagggagtcgtcgtttaggcggcgtcgttatcgcgtttaagaaagataaaagggatcgggaacgggaggggaaaagttttttgttcggttttagatggattttagttttaaattttacgttataaagtttcgaagaggcgggttgggggcgggggtcggggcggatttttaggggcgtggttgcgcgtttgcgatttcggatcgtgttaatttcgtcgtcgttttaaaatttgtgggaaattttagttttgttatttattttttttggaggacgtagataggatttgttttgtaggagtttaggtcggtcgattcgcgtttcggttataaagttgtatttcgagagtttaaattattcgtagataaaatttatttttgggaataaagtattcgtttgtaggcgtttttttcgggttggaaggttggcgtgcggaaacggatatatttattcgtggggttcgtttttagttatcgcgggattatcggttatcgagttagggattcggtttttttagtttttcggagcggttggggagttttagtcgattcgtagtattttcggagtaggtatcgtaggattttggttttacgtttttcggacgttttttttttagatgtcgttcggcgggtcggggtttttttggcgggttgcgcgggcgttgcgcgagttaaattaaatttggtcggaaaagacgcggttaaggttcgttcggtttacgtttttcgtcggttcggtaaggggtttcggagaacggtttgggggggcgagaattatgggcgggggaaatggaagatagagggaattgaagtacgggggttttcgatgagtagtgcggatgttcga

SEQ ID NO: 7231 - DNA, 1501 bp, Artificial Sequence
  Description of Artificial Sequence: Synthetic polynucleotide
cgttattcgagttaatgaacgcgattgttttgataaggcgtttttaattttatcgattttggtaaattgtaggagatatttagtttacgttatataaaaattattaaagtgggatcgtcgtagttgaaaagttcgattagtgtttggagattagaacgcgagtttttaaagtatatacgtattcggtatcgggaaagtttaggcgtttgtgatttttcgaaggattttgggttagtattttcgcgtttggattatttagggggttattagaaagtaatatacgttataagaaagatgtgggggagatttcgatgttcgcgtttttgttaggtggaggcggggtgtaggtagaagtcgcgcgttggattgttggatgaatttcgttacgcgtaggtttcgcgtcgatttcggaagggataggtaggttcggaagggatttttggggtttggggacgttttttagggtagagagtatcgttgcggttcgagcggttcgggtttttaggcgtggggtattcggtttttaagcgtttttcggggacgtaggcgtttacgtatcgtttagttgcgcgtttttagtatttagcgttcggcgttttcggcggagtttcgcgtattttttcggaaagtttgggggtttttttaatttaggttttttcgggagttttggggcgggggttggaagaaggggttatttatttcgtcgttcggttcgtttcgggttttcgaagtgtttgttttagtcgcggtttagtgcgttcgtaattaagtatttattttcgttttttttagtgtcgaagtttttttttcgcgttgtgtttttggtgaaaataggatatttttttcggttattttataataaatagcgtatataagcgggggagaagcggggcggagggagaagtcggtttcgagggggaggaggaaaggagaggagttaaaatttcggattgcgataggggggaaaggagaagaaaagaaaatgagagagcgcgtttagtcgtcgtagtcgttatttttcggtttttttcgtagttttttttttttttttaaggtagcgataattttacgtggataggatggaagttttgcgcggaagtcgggaacggtcggagcgtgcgtcgcgttgtcggtagtttcgtatttgcgtagggaggtggggcgggggcgacgtcgttatcggttattgcgggttcgtgaggtcgtcgggggtttcgggggaggtcgttagggacgcggggggcggcggcgcgcgggggatttatttcgtttttatttgatttcgggtgattgtttattgttatggtttgcgatttcgcgtggggatcgtttagggtttcggggttttggatgtttcgggtggcgtcgtcgtaattttcgtgtttttcgcgtcgtttttatttcgtttttattcgggtcgattcgagcggttgtagtttttaggttgaggggagggattcgcgatcgcgtttttttttttgggtcggagagttattgtcga

SEQ ID NO: 7232 - DNA, 1744 bp, Artificial Sequence
  Description of Artificial Sequence: Synthetic polynucleotide
cgttttcgcggttgttttttttttagggtcgtcggtggtttaggatttggttatcggggaggggcgtggttttgtcgaagtcgatgagttatacgtcggcgcgatggtagtgatcgtgtataaagaggagcgagttgtcgattatttgcgagtttcgtatcgttaggtcgcggttttgtttagagacgtttttgtcgggttttcgttttagttttcgcggttcgggtattcgggtagtcgtcgtttatttcgtgttttttgaagaattcggatatttttagggtgtttcggatttgttgtaggcggtttagatatcgtttttgtagagggtggggtgggagaggagggtaaattaattaaacgttaaatgagtttttgttaacgatgaggagtcgggatttacgttgtgtttggtaaatgtcgttaggaggaggatttagggtttcgtttagcgtggtttagaagggaaggagcgtagagtagttgcgagttagcgcggtgagggttatggtggggatatagtcgagggtattgggttagatgataggggtagttttcggttttaggttttttaatattttagggtttgggatttcgtttttattagtatttttttatttttttgtataaattttttaaagacgcgaagtatttgttttcggtttcgcgtagttttgaagtcggtgttgtaggagtcgttcgttttttggatgtgggataggagtgttaggggtttcgggttcgttagtggggaagaggatagcgtagagtagcggtattttttagttgtaggggacggcgaggcggtgggagagggcggaggggtaggcggggcgggagcgggggatcgggaaagatagcgcgtagtggggttgcggcggtgttagcgaagcgcgtttgttttattttgatgttttcgatgcggaagtcgagggtggtgttggagttgatgttttttcgttattgtatgtagcgcggtttggtgacggcgcgttgcgcgtgtttttttttcgtgggagttttaggatttatcgttagtatttttttgtatatgttttttcgtagtttgggtcgtttacgggttttggttagttttttttttaggtaagttttgtgggggcgtaggtagcggttagggtatgagggggcgtatacggagattttttcgagtattcgtttcgggttttttttaagtagttgtttcggtttcggatttttatttgatttttttaatcgatttggtagggtacgtatatttgacgtttattttgtagtcgagtatataaggttcgtcgaagttatcgagtaggttttgtagttgtaggtagttttcgtcgtcgcgttttattacgtcgtggaaggtaggtacgtagtcgcgtagcgcgttagttattagtcgcgttaggtagtagcgtttcggtttcgagtagcgttttaggattagttcgttggtgttcgtcgttttaaaattttttgaggatcggtattcgttagcgtcgtttagttttttttcgtcgcgggtattcgtttattcgttttattgtttattagtgtgttttgttagttgtatttaggcgtagcgttttttgaaagggtttatgatcggtagattgattatggttcggattttttgttagtggtttttttgaaagcgatagggttaaggtttgataatcggcgtttcggtaatgtataagttttttttttattgaaatagggtttcgttacgttttcgatttatcgg

SEQ ID NO: 7233 - DNA, 1801 bp, Artificial Sequence
  Description of Artificial Sequence: Synthetic polynucleotide
cgcgtagtttaggatagtagcgcgcgggttacgggcgagtggagttgtaggggttcgggcggagagtcgttgttatttagggaagttttcgggatttcgggtttttcgcgaagtttcggacgggcgttatcgaagtcgagagtttcggtcgagttttttcgtacggtgggcgtcgcgtttaggcgagcgcgcgaggtcgggcggggtcgggggtcgttcggggagggggcggggtcgggattttcgcggtcgcgcgtaggggttgggaagttgttttttcggtcgcgtcgggcgaggggttgcgtcggttcgcgaggcgtatgcgcgttgtcgagcggttttcgtttttttttcgtttatcgttttttttttttttttttttttttttgtattttcgtcgtttttttttttttttcgtttgttgggtgttgaagttgggcggatggtagtaaatcggtttcgttagaggatcgagtcgtttagtttcgttttttcggatttatcggcgcgttgtttatatttttaggcgatcgggtaagacgttgtttttaaaataagcggtgttaagtaaatgatattaaaatgtttgttttgtattaatggatggattttttttaaggtaggggggaggtgaaggaaggagggggcggagagcgcgatcgtttatgtttcggcgggggcggttgcgcggcgttggggttttagttgtggtcgcggcgttttgagcgggagcgggggtcgcgtcgcgggttcgggaagttgaatttcgcgtcgttgtttggacgcggttcgttcgtcgtttttagttgttgtagggaatcgggcgagtgttttgttcgtcggggaacgttcggttaggttttagagttttcgcggagagcggggcgtttgttgggggcggtcgggagggtcgggttaggggcgcgggagatttcgcggggacgcgaggtgttgcgggttttgtgcggttggttgggaacgaggagaatgtgttattaatagtgtttaatcgattgattattttgggtgttgtgtttttttttttatttttttttatttttgggaaaatgtattgtttaggtggggaaggtgttcgaagaagaggttgcgaaaatgaattttttgattagtagtaaaatatcggaggggtgtgtgtgtgtgtgtgtgtgtgtgtatgtgtatgtatgtatagggggtggggggttttttttgtttttttttttttttttagttaaaggaaagggagttttggcgtgtgcggcgcggggtggattttatagttatcgagggggcgaggacgaggaacgtttattaatcgcgagtcgttgttcgggtgggcgtatcggagttttttttgttgtaggtgatggtggttttttcgtgatcgatggaattatagtttaatttttgttttttcgttagtttttttgttgttttttatcgagtgttgcggtagaggttgggtgtagatacggtcgttttttttttttttttttgtttttttgtttttttgaataaatgtcggaggattaggggatggcggagggatagagttggattcggaagtcgcgggtgggagttgtttttcgcgagttcgaggttgttggtattttgtcgcgggtagttcgcgttagtttcgggagtttttgggtttcgggagagcgagtcggggtcgtttggttataaagatgttcgcgcgttcgttttgcgtacgggattcgttttgcgttttgagttttgcgtttcgttcggagttcgggacgtcggtttacgtgggagaatttttgtcgttcggggacga

SEQ ID NO: 7234 - DNA, 1801 bp, Artificial Sequence; identical to SEQ ID NO: 7233
  Description of Artificial Sequence: Synthetic polynucleotide

SEQ ID NO: 7235 - DNA, 1684 bp, Artificial Sequence
  Description of Artificial Sequence: Synthetic polynucleotide
cgtttttttcgggcgcgcgggttttttgtcgtttggagtcgagttggtattggagcgttttttttttggagcgtagaggtattcgacgttttgcggtagttcgtagttttttttttacgattttttagaatagttttgttttgttttttttcggtttttcgagtgcgttcgttattttgtttcgcgagaggtgaacgcggagaaagtaggatgattatttacgttttcgagaaattttgggtaaagaaaggtattattttagttcgtacgttgaaagtcgtttttttttttttttttttttcgttgtgtttgaatttttcgggatatttagacggttggagtttttcgattttaaggcgggcgacggtaaagttaaacgttagcgcgttgcggttttcgggtatcgaggcgttttcgttttcgttatttatatagggcgttaagtgtttcgattcgcgagtgacgaggacgtataggttagtgatacgattcgtagttagtattgagcgggacgacggggttcgagcgtaggagggtgcgcggggagttgaggagcgtcgggggttcgggcgcggcgcgtatttgaggtcgtcgtcgaggaggcgacggggagtagcgcggttaagagtagtagcgtcgtttaggatagtcggcgcggcgcgcgtagggtcgtttcggtttcgggggttatcgagagttcggggtgggtcggggttgggtgtttgcggttggtaggggggcgttggtcggagtttggggagtgtcgaggcgtcgtcgtcgggttttcgtcgtcgttcgtttgttttgcgcgttttgcgcggtgttcgtcgcgtttttgtttcgcggcgatcgttttcggtcgtatatcggtagtcgcgtttcgttattgaggtcgtcgatttttcgtcgagttttttagttgcgttcgggcgttttttgtcggtgtgcggggtcggggttagggtcggcgggggcgattcgggcgataggggcgacgggggcggcggggttcgggttggaggcgggcggggcgcgggacgaaggggtcggagcgtttcggattgatttagcggttttgaatttggggcggtcgttgtgtcgggttaagtggttgaggaagttttttttttcgtttaatttttttattttttggttggggaagtcgtttatcgcgtcgaggagtgttttttgtttttttatagaaatatttttgcgttttaagtggggattcgggtcgggattttttattcggttcgtagcgttgtagtttttgtggttagtttagtttttttacgtttttattcgtattcggcgcgtttacgttaggggtttttagcgtttttagattttgtttcgtttggttgttatttttagggcgcgtacgatgcgggtcgaaaaggaatttagtttttagtgtgttttgttgtttaggttaaggatttagcggatttcgttttttttttttttgtaattgtaatattgttttaggtttttttatttttttttttttttatttttttttttagtttggaagtttcgcggttttttagatggattcggagcgtttttggaggttatagtgatttaagttttaggaaggtcgggttttggacgtcgcgtgttgttgttcgtcgtcgatcggtgttttcgtagagataatttggttgaatttatcgtttagcgt

SEQ ID NO: 7236 - DNA, 6657 bp, Artificial Sequence
  Description of Artificial Sequence: Synthetic polynucleotide
cgtgcgtgattggacggttttcgcgcggagcgaggaggttcgtagcgtcggggggagggcggtttagtagggagggcgatgcgagtttggggaggggttagcgattcggttaggaggtgaggatagttttttaattttcgggaagggaagggtagggggtcgcgtttggggggcgtcgggtagggtgcggacggcgaagggggacggaagggagagaggcgttggggaagggatttttcggaggtacggggtagcgtgcgggttgcggtagcgatttcgattcgggttttcgggttttgtcgggttgagtttgcgttcgtttcgtcgtcgttaagtttttttaattttgttcgttgcgttcggatcgcgcgttaggtttgggggcgtagtaggggttgggggcgtacgttgcgtattcggggacgttcggggttcgaggtggcggggggtttggtcgcgtcgtttttcgggggtggttcgggttttaagttttttaggtttagcgttcggtcgcgttcgtcgtttatttgttcgttcggtttcggtttcggggttgcgttcgtagtcgtcgtcgttttttaagttttaatttcgttttcgggattgaaatttttttttagtttcgtttatcgatttgcgcgcgcggtttcgtttttcgtcgcgcggtcgggggggaatttaagttcgttttgttttttttcgttttttttttttttttttttttttttttttttttttttttcgtttttttgttcgtttgcgcgtttttttttatttttttttttttcgtcgcgagttcggttcggagtttttggttttttttttttttttttggtttttcgagttttttgtttttttcggtttttcgcggtaattcgttttttttttttttcggcgacgcgtaggggttggggaaggaggggaggttttagaaagcgtagggggcgttttcgcggttcgttttcggtttttttcgtttatatttaaaaggtggagggggtgggtgggtgggtggggggagtgggggcgatagttgttggttgaataagttattcgcgatttttattattttaagtaaagttaaggcgtttttaggttttttcgtcggttcgttttttattcgggagggtagggatttaggggcggagaacgtagggcgtaggtcgggttttttttgtttagttttggtttcgttttttttttttatttattttaatttttgtgaggattttagggggttttggagtatttttcggtttagttttattttgataatttgtttgtgcggaagttttcgttcgtatgttataggaagggaaattgagttaagagaggtttagaatttggttttatatagcgcgtcgaaggtagagttttaggggtagtttggattttcggtaggagtttcgggattttacgtttgggtcgggtaggtttcggcggtgtttggataagttcgcgttcgtagaacggtcggcgtttggggattttttttagttttcgcgtagttcgcgcgttttcgtcggcgtttttttttcgttttttgtttttcgttcgtttttggttttcggttttagtattttcggtacgtttttcgttcgtcgttagtagttgggtaatttaacgagtatataaaagagttgatttaatttaaaggtagtaaattaagataaattttatagtgtgtggggatcggagagggaatgtgaatgaacgtttacgacgtcgtttagttttgtatggatcggtttagttcggttgtagggtttgatacgttcgggttttagggttttttaggagttagaatcggagagtgggttttgagttgttttggtttttaggtttttagtattggttcgaatttagtaatttagagtttgtggtttttttcggttggttgggtggggttttcgtgataggggtgtagagttttgaaggggagtgttaggacgaaagttagtgcgtttttacgattttatgtaaatattggggggtaggggttttggaaatttagtatagttttaggggtcggtaggaagggtatcggtggtttggaatatttaagttgtggtttttttttttttgtttcgatttggattacggttagagttaggtcgtaggttaagagtaggtttttgtttatttattagatagatattgtaagtttgggatgtgttaggtttgggtttgtggaacgaggtcggcggtgagcggggtatttttttttttttgtttgtttgtgaggtttttttagttgtagttttattagggagaagttggtcggtttttagagtttttttggttacgtttggaaggttttagtaagttattttttagtttttggtttggttagttttgtgtagaagatgattatcgggtttcgggttttagtttatttatttcgtttgttaaatataaattttaagagaggtattggatttttatttttagtaggtttttttaggtttgtgttggttaagtgtagtcgaagttttggaatgagttttttttgttttcgtaggtgtttttcgtgtgttttgcgttgtgttgggcgtttgttcggaggagtcgcgttaggacgttttgttattttttaggagtaggtatgatgagtttattttttcggggtgtaaattgaggtcgagggtttttttagagcgtttttgatcggtattgtttgattttagaggttagttttgcggttattcggggtttgagatttacggagaattttagaggttaatttgaggggcgggtaggggtacgcgcgcggggtcgtgggaggcgagatttcgtaatttgaggagttaggattttagtagagagcgaaatttggagttgggggaggggacggtagaggattggaggtcgggttgtacggtaggggtcgagttttcgcggtcgttttttttttttatttcgagcggaggttgcgtcgttcggttgcgatcgagttttcggagtttcggtcgggtcgtttttttttcgtggtcgcgtcgattggcggtttgttgttattcggacgtcggcgtcgtcgtcgcgaggatatttgttcggggtttaacgtcgcgttttacgttttttgttttttttttagatttagaatcggggagaggacgcggcggtgaagttgggaggttggaatttggagggcggcggagtttcggagttaacggggcggggggcggggtcggcgttggttttggggataaagatttttacgttgtttgagggttgggttttgtagatatcgaggtaggaagaaggatttcgtatttttcgttttttagatttttaaatttatttaggtttagatttgagtgtttaggtggggtgggggagatcgaatttttttgggttttcgaggcgcgcgaaggcgacgttgaaggggggacgtcgggacgttgttttttttttgtatacgtcgttcgagttgtatttttaaacgttttaggagtttcgcgggttttttttgttttttataattttcgaagttgtttttagcgattttttttcgtttttagatggggtcgtaggggcgggcgaatgtgttgcgttcgtcgtgggttgggaggaagggcgcggattgtaggaagtttttgtttttttttgggtagtttggtttcggggattcgcgtttagttcgcggcggaggattcggtcgggaatggtgttgagattgcgcgggtacggtttagggtcgtgatcgggtggttatcgtgtagtttgggaagagaaaaagttcgggggggggtcgatatttcgagatcgaagagggaaaatgggaggaaagtaggcggtagggagggaagagcggcggaagagggattaggagagttgggggttcgttttgggtttcggggtttcgttttattcggtagtttagtttagtttagtttcgttgcgttagtttttcggatcgggagaggttagggttatcgacgtttattaatagtcgcgagcgggtttttttcgggagtttcgtagcggtcggtagagtttagttatcggttggggtgggggcgggggtttcgtaatatttttttcggaggtttaagcggcgcggggcggggcgttgcgtttttttacgtcggttttgcgaagtcgaggtatttatagtttattttttttttattttcgatttcgagattaggttttagatgaagaggggttcgtttgtggtttaatttggggcgtcgcggttattttagcgtattcgaaggcgcgtttagttttttttttttttttttgtttagtcggttttttgtttttagcgcgtttcggaaagtttcggggttttcgcggcgtttttttagttttaggggttcggagttttggtttttttagtcgcggcgtcggggagggaagtttgttcggtttaggttcggcggtcgttaatttcgggtgcgttcgttttcgaatttgggtgggtggatggggacgttcgggagtcgcgggtttcgagcgtcgtatttagagtttcgcgggcggggagattcggttttggcgcggacgtcgaggttagggtattagggatggggtggttcgggttgcgagagtcgttggggattttgcgttgtttttcgtcgttttttttagagagtatttttttttttgttttttttaggggcggggatttttcgatttcgtagcggcgatagaggggtttttcggtttcggatagttttttgttttttaggtttttttttatttgggtcggggtgcgggtttcgggttggaggtattgtcgcgggcgagtagagcgcgcgtatttcggtttttcgagtgcggcggcggcggcggcggtttttttttttttttttttttttttttttttcgggttcgttggttttagatagtttttttttttttttcgttttgtcggtttttttcggagttcgttcggttggattcggtttgcgattcggagtttagcggagtcggcgggagttaggttgcggcgtttattgcgttaagcgcggggcgagcgcggggcggcggcggcggggatcgcgcgttcggagttcggggttggtcgggtaggcgggggagcggcggtttcggtttcgattcgggttcgggcgcgggcgtagtggtggcggtcgcggtagcgtcgaggttgtagtatattttttttgagcgtgatggaaggttttatgtgggagagcgcgcggggagggatggggagggggcgggggtcgcggcgggggcgatcggaggggcggggggcggggtcgttgttcgtacgtcggtgggttggggggtggtcggaggggggtttcggaggggaagttggagttagtcgcgggggcggcgtgggaagtcgagtggcggtttcgttttttttttttggttcgtttcgttcgttttttgttttcgttttaggttatttagaggtttttaggtttcggtttggaagagaagcgttcgaaggtttgggggtcgggattttggtggcgttgggaggtgggtttttgggtggggatacggttgtgtttataggcgttcggtaatttcgtggaagttgattttaagttagattttttgtgagcgcgcgcgttcgcgagggttaaagtatagttcgtaggacgcgcgtttgcggggcggggggagagcggggtatttgggggcggggaggtggagcgagagggtcgtcgggtttttggcggtttcgcgtttttagagattcgtttttttttaaggtcgtcgatttttttttttttttttttttcgttgcgcgtcgtttttcgtttttcggtcgggaggagggggaggcgtgggagcggttcggcgtttttcgattttcggaaggttcggtttagcggatttttttttttttttatgtgttttcggaattttagcggattcgaaatcgcgttttcgggttttgagtcgaggggtttttcgtcgttttttggtggtttcgagttttcgtcgagcggttttacggttttttagggcgtttttcgtttttattcgttttttttttagtttgcggttttcgtgtgggttaaaaattttaaattaggtttaagagcgttttcgttcggttaagttttcgcgcgtcgttttataaatcggtcgcgtgcggagttgcggagttcgggatttttagcgcgcgttgggcgcgatattttggatttcgttgttagcgtcgcgttttttcggtcggggagttttatatcgttaagagggtagggagaggggaggggaggggattattggaggggagggggttgtttttcgggtgtttttttcggaggaggtttcgggataggggtgggggtggcgcgggaggtcgtagatagcgcgtttcgaggatggtcgggtcggggatgggcgcgcggggtttttgttcggacgtgggtttaacggttttttcgtagtttagaaatttcgtttagttcgcgggacggtcgttcgtttttcgatttcgagtttttattatatttgtttttgtaggacggggttggggggattgagatcgtgattgaggtcggggtatggaggaagtgtcgtcgtttgttttcgggattgttggatacgaagggtggaggttaaggacggagtttttgtttgcggttgtttagtttttagtttttgcgcgggggcgtttagatttttagggaatagggagatagagcgggtcgagttcgg

SEQ ID NO: 7237 - DNA, 546 bp, Artificial Sequence
  Description of Artificial Sequence: Synthetic polynucleotide
cggaggcggcggggtcgcgggagggagggggtcgggtttaggcgattggtagcgcgagttcgggagttttttcgtgttttcgttcgtttcgttttcgttattatttgttcgggatttggcgtcggcggtttcgggcgtttttagtttcggttcgggtttcggtttcggtttcgggcgtcgattaggtttttttggttttcgtcgcgcgttttttaatttgttgttgtcgtcgtcgcgttttttaggttttgttagttattcgcgttttgagttcggggttagatttttatggaagcgtcgcgatgttcgtttttcggttgttggatttttagaagacgaaatacgcgaggtgagcggcggtcgcggaggttcgcggggagggagggaggggcgcgcggcggcgggggtcgcggaggttattttggttttcgggtttcgtcgttcggagcgttagaggggatcggcggatttttgattttcgttcgagaaaattaggatttaggtagtttcgttttttcgttgggatggagtaatcggggcgttcgc

SEQ ID NO: 7238 - DNA, 288 bp, Artificial Sequence
  Description of Artificial Sequence: Synthetic polynucleotide
cgcgcggcgtattgcgggtcgggaacgtgttgcgcgttgatatcgggttagttttttgtgatgggattttttttttaaaaacgtaggcgttttttcgggtcgtagtcgtagtcgggagattgagggttagggcgcggtcgcggggttttttgggtcggggcgcggtttacgttttaggtttttgcggttttgattagaagtcgttgcgtttttggtcgttttttattcgtttcgttttcgtaattttaggtttagggttatagcggtttagttttttttttttcgcga

SEQ ID NO: 7239 - DNA, 947 bp, Artificial Sequence
  Description of Artificial Sequence: Synthetic polynucleotide
cgtgaggtcgcggtgttagtttatattttattgtgggtggcgggttcggtttcgcgaggaggcgtcgtttttaaattttacggtttcgcgtagcgaagaggcgaggcggtcgcggaaggtaggcgtagtttatttttttcgagaggtttcgatatttttcgggtgagtttcgaaaagcgcgcggggatttcggttgagcgttgggtcgttagtaattcggtttttagagagttatacgaaggaggggaagcggttttttttggggtttttgggaggtttggttcgggtttttttcgtagttttcggcggttagtttcgcggttttggggcgttcggatcgagtaaaggtttcggcgggcgggtttttttttcgttttttttaagcgttcgtttttcgtcggtttagcgtaggttttttcgatttcgttagcgtagggggcgcggttgtcggggatttagtagcgggcgcgcgggtaagtgcgcggcgggcgcgggttgcgggattcgtttcgggttttatttcggattttttttggtttgtttgggtgtttcgggtcgggggtagtcgaggtcgcgcggcgttttttttttgggttatttttttttcgtttttttttaggggagacgaatcgattggttgttcggtcgtcggaacggtaggtttcgtcgtttttttcgtttttcgtattttcggttcggtttttttttattatcgcgtttcgttttaattcgtagttagtattttttttttatttttttttcgttttcgttgttatttttttttttggatgttggaagcgtagttggtattttcgtttttttaattttttaaattttttttttttattcgtttattttttgtgtttcggttttttttttgggtgttgcggaggttttttcggttcgggggcgtgtgtgtagggaggcggatcgcggaatagatacgg

SEQ ID NO: 7240 - DNA, 1313 bp, Artificial Sequence
  Description of Artificial Sequence: Synthetic polynucleotide
cgagaatttgtcgtagggggagatttcgtcgttaggttttgggaattgtttgggcgtcgttaaagttcgagtcggagttgttatttggggtagcggtcgggaagaggtaacgatgttagtaagaaagtagcggaggtaggaggcggtcggaggagtggattggagcggacggagtttcgtcgttttttagttcggagcgtttggagcgaaagttaagcgtttttcgagggcgatttttttttttcgggcgcgcgtttattcgttgtagtcggtagttcggcgggagaggtggtagttgtagtttcgtatcggggagagcgagttttttgcgcgcgcgtttattcgttttttaggtgattcggcgttttcgtcgcgttcgttggaagtttgtaaatttttttcgggggtttcgtcgttacgttgggaagttggggacgcggggggaggtttttggttcgtcgttttcgttgtcgtttgatcgtatttttggagggtttcgtattttgttaggtttttggaggtaaatatatattttcgatttataattggttttcgcgttaggggattcgcgcgtttttatatacgtacgtacgtcgggcggattcggcgtcggttttacgttagtatttttttaggcgcgcggcgcggcggttatcgagcgtttcggtatttacgcggcgcggggtttttagggtggttttaggatatagtcgaattttatagtttattagtattcggggtcggatttttttttggttcgttaaaatgtttataaatatagattattttttagaaaaaaatgtatcgtattttttttattttttgttttgtgatttgtttattggattaagtaatttcgcggttgttgtcgagaattaatttttgtaaataagtatattttcgagatggtttttgcggtaagtgtaataaaagtggttaaatgtaaaagttttagaagtggtcgagtcgtatttttaggaatttattaaataagtgtggagaaggtaagagcggagttcgggtgaagggattacgttggattgagtaaagattataatatattttatttagagtgtattatattattttttcggtgacgttacgtgggatttttgaatttttaaattattgcggttcgttggggagggacggagcgaggggcggggtcggcgcgtcgagggggtaggtttcgtttcggtttcgtttcgatttcgtttcgtttgcgcggattttggtgtattcgttcgggagcggtagcggcgggggcgattgcgtaagtaatagtttgtagagtttagcgtcgtgtgatacgg

SEQ ID NO: 7241 - DNA, 848 bp, Artificial Sequence
  Description of Artificial Sequence: Synthetic polynucleotide
cgcgaagtttcgcggtttttgcgtgttttggtttcgggaggataaggatttttttttttttttatttgcgcgcggagtcgagtttttgttgaggtgagggtttcggaagtttacgtagtttcgtaggtcggtggtggtcgcggttgttttgcgggggtgagtgtgttcggtcggggtcggagtttagcgtgtgttcggtagacggcggtgttcgcgcgttttttttttcgcgttcgcggtgatagtttagatattagttcgggcgttgatagacgattttttttatttgttagttttttcgtttgttagtagagttgttggtaagtgagagaaaatagaggggcgcgaaggtaggcgcggttagggagtgagcggggcgttgggcgcggggcggagtcgggtgcgcggcgttcgggttaggttttatcgttcgcgtcggttttcgttttgtttagtcgtcgtttttttttttttttttatttttttttttttttatttagtttttttttttatttttaaattttttagttgcgcgttgatcgtttttgtggttttgtttgggggtagggggagaatacgaatagattcgaggtgtttttttttggagttggagtttaattttaatttttatttttatttttatttttgtgtttatttttgggtattagttcgggattatggttggttttcgtagttgttttcggagcgtatttggggttatggtttgtcgcgatcggagttcgttttaagtcggagtttgggggcgtagaagggggagcgcgtcgagaaagtgtcgggtaaacgcgcgtcgcgtttggttgggtatcgcgagttgggcgaggagacgg

SEQ ID NO: 7242 - DNA, 2406 bp, Artificial Sequence
  Description of Artificial Sequence: Synthetic polynucleotide
cgggggaggggtatacgtagttttcgtgcggaaagatggtgttttttttttatagggttgcgcgggtatttattttcgttgtaaagcgttcgggttaggcgcggtttgtttcgggtcggggcgagttcgttgttttttgcggtagatagcgatgcgcgtttttcgttttagttttcggttcgttcggcggttcgcgcgttttttcggtgtagtatgcgggcgttgtgacgttttcggataaatgtcgtgtaattgtgtaggcgaatgagagttaaaaataagaacggaaaatttattattaaggtattattgcgttagcgtagttatttgaaggtttttatggttttcggcgtttgcgtttgaagttcgtttttaggttttggggggtatttgtagaaaatttttagtagcggttcgttaattagattttagggtgtacggggggtggcgtcggtaattatggtaatttttaaaataaaataatataaaataaagtaattaacgtttattaattattattttattttattttttgtattgtttttaggtagttggggaagtcgtcgggagtgtagtcggatgttggaatttaatgtgattcggttgattatgtaaagattaggattggacgtttttgtagttttatttcgttatttatttttttttttttatttcgtattagaaataaagtggggggggggggcgagtttttggaggagaaaatgataattggtatttaattttaggtttatagtgcgtcgcggtggggcgtaaagacgtaaattttcgggatggcgagttttcggggttttattgggttaaacgaaaattgatttgatttgttttttaatattcgagggagagaaggggagatgaggggagggagggtagggtttgagtgtgtgcgtgtgcgtgtgcgtgtgtgtgtgtttggggagggggaggaggtattaagttgtagtttgcgcgcggttttgcgtttcggcggggttgcgtgcgtgtgtttttgttcgcgttgttgaaacgggtttttcgagggatcggcgttatatgatttcgtttgtttttcgttagcgcgtagatcgttagttttttagtttgttcggtatcggaggagggtcgggcggtatttttcgggtattggggttttgcggagcggagaagaggttttagcggggaatggtatatttggatttaagaagtcgcggttcggcgttagattttggagtgtagatatttggggggaggggagagttagagggagcgagcgagcgagcgttagagagaggtagcgcgtagcgcgtacggacggggggttgttgcgcggagaagatgtaagcgcgtggggtttcgttggtttttgagtattatgtagaaggggattcggttgaatgatggttacgtcgcgtttttgggattgttggcgcgtaaggacggtacgcgtaaaggttatttgagtaagcggagttcggataatataaaatggtaaattaagtggttcgcgttgttgtagaatttgtttttttatttcgagagcgattcgagttcgcggttttcggggttttatttgttggagggttgcgtttgcgatcgcgcgtttttttttaagtcggcgttgtcggttaaggagtcgttggagaaataggtgaggcgagcgtcgcgttttgatttttttgcgtttcggtcgcggttttgggggtttagggttttcggttggttgatggcgtttgaattttggtttttttatttttggcgttttaggcgttttttgtatttttagcgagaggggaggtttgtttttagttaggcgagtgattgcggcgggtagagggggtagggattgagggcggggagtagatgtgggttgcggttgtttttcgtcggacgagtttcgtgggaggcgggtatagaggggtcgatatttggagatgtagaggaagatggggttttaaggattagagacgatgagtttggatatacgtttagttaaaaatggtgtttttaatttttatttttatcgtttagttttaatagtttcgatcgtttgttttatatcgggaacgtgtaatttttcgcgtttaggtatgggaagggtaagacggaggcgttcgagcgttgttagtttttgtttcgtcgtagttgagggcggagagcggtttgcgttagtttttcggagttgggttggggttatggggttatacgggtcggttcggtattatcgagcggtggtgggtttttagttggcggtcgtcggagtaataagtttaaagatttttaaggatcgttttgatgcgtcggggttagggttagggttgttgcggaggtagcgggacgaagtgggcgttttttttttttttcgttttttgcgtcgtcgtcgtcgtcgtagtcgcggttatagcgttgcgt

SEQ ID NO: 7243 - DNA, 1218 bp, Artificial Sequence
  Description of Artificial Sequence: Synthetic polynucleotide
cggatttacgtcggttttgttacgtgttgttcgtagttttcgttcgtttttttcgcgttggtaacgggtattgattgttcgatattttagcgatcgtagagatttttttaatgtcgggcgtattatcggcgggttagcggtttcgttggtttttttgatatattttttatagttattttttttagttgagatttttttttttaatatttcgttaattaacgtgtaattttttggttaaaatgttagagttaagattaaatttgaagaaaagaatgaaattataggaagttttttagatttagtcgttagtaaggttatggttcgaagcggtgtaggggcggcgcgtcgggaagttattggtagagttgtgcgtattggggggtgttgtaagcgttggggagagtgtggagaggttgcgtggagttgcgcgttcggggtgggagttgtatttttaatgaagcgcgtgaagggtaagcggtgatgggttttgcgttagtggggttgggagcgtgttgggggttgtacgtggggttgcgcgtaaggtgagaattgcgtatgtgggtttggggattgcgcgtatcgaaggttgtaggcgttggggagggtgttgggggttgtgcgtggggttgtttttatcggaagttgtacgttcggggaagcgtagaggcggggtgttgcgcgcgttggggagtacgtggggggatacgtagggggatacgtagggattgttcgcgcgaatggtttcgaacgtatgcgttttattttatattttatagtcgttatgacgatcgggaggttcgttcgttaacggttagttaacggttgcggggataagttcgttgaggttgttaggcgagttaggtttttttggatttcgtttgattcggatgggttgtgtttgaaattgatttagttttattagggattatgaagaaataaggagtaaatttaaagtcgttgtaattttttcgttttagttcgtttaagcggtcgtacggggtttttttcgttcgggagttggaggtggaaaagtcggttttaggcggcgggaaattgttagggggcgttaggaggtttttttcggggaggattttaaatttgaaaaagcgaaaaggtttggagttaaaggtggtggttaagatttttttcgattttttttagttcgttcgtaattttttggcgtagtttcgggaagaggtgtacgaattgtaggcgcgg

SEQ ID NO: 7244 - DNA, 1848 bp, Artificial Sequence
  Description of Artificial Sequence: Synthetic polynucleotide
cgtagtacgagtgttagggcgcgtatttggggggtgttttggcggtgtggagagagaagagagagggcgcgggtgatattacgttcgggttttttttttttcgtcgggtgggtggggtttcggcgcgtcgggagggcgcggggttaagtagggggaagaggaggagtaggtatgaatgtgtttgtgtgaagatcggggaggggtggaggaggaggaggaggaggagaaggaggaggaggaggaggaggcggcggcggcggcggcggcggcggcggagggcggggagggagcgcgcgcgtggttcgcggcgttcgggtttttttttagttttcgatttcggttcgcgacgcgtcgttttttagtcgtcgtcgttcgtttcgtagttgggatttatttcgggtttggggattcggcgggcgggagaagcgggggttttcggcgcggtttggaaggagcgagaaagtaaaagtaaggcgagtagtattttaagtttttttaatttcgttttttgcggcggtaggcgttttgttgtttagcgcgtttttttcgagttcgagagtggttgaaagaaaagggattgggcgggggtcggggcggaggaagagagagtgcgagggagcgaggagagttcggtaatatttgttaaaatttgggggaggaggagcgcggggaggaggaggaagaggaggagagaagggaaggagggagcgcgcgggaggggagcgcggagtcgagggataatttttttatttcgtgagtagtgtaggcggtgttaggtcggggcggggggtttttttatttagtacggggtattaggtcgggatgggatttttttttagaaagtcgattggatgttaggagaggcgtacggttgggggttttttttttttttttttttttttttttcgcggttgaattaaattagaattgttatttagggtttgtgagttagaagggatcggattatacgattttcgaaattgatgtcggagttgtacgagcgggagggagcgggtaggggtagcgttatcggcgcgttcgtatattcgtattcgcgtatattcgtcgtttttatttattcgcgtcgttttttcgtttttttcgcgcgtttcgcggtcgttcgcgtcgtattatgttcgcggcgggcgtatttcgcgtttagttcggtcgttcgtggtagtcgtagtcgttcgcggtcgcgcggagcggggagtcgttagtttgcgtttcgttcgcgggtttatgggaagttcggggatttgatagtcgttgtcgtcgtaggtacgtttcgttcgaagttttttgtttcgcggatttcgtagttcgtttttgcggtcgcgttcgcgttttcggggttagaggtggtttttagcgtggggacgggatggagtgaaaatggttgttaaaaggcgtttagatttagagagtcgtcggtgaggcgttcgagtaaggtttgtattcgttttttttttttggaaggtttttttcgaagagttcgattcgcggatcggtcggagacggattggagaattttatttttcggaggggggacgaagtttgtcgtagtggtggcggcgtttttcgttttcgtttttatttaaagggtttagaagaatttcgcgagtttcgtacgcgtttggtttttttttttgcgcggtggcgttttacggttcgggtttcgggcgcgtacggcgttcgggatgggcggaaggaggcgggaggtatggtgggtgcgcgcggggattttcgtcgcgggggtcgtcgtcgttggggtttttttagttcgggttatgtttcggagggcgggggtgtggtgtgagcggatggagagaggcgcgttttcgtcgt

SEQ ID NO: 7245 - DNA, 2119 bp, Artificial Sequence
  Description of Artificial Sequence: Synthetic polynucleotide
cgcgggaggtagatagcgttttcgtttttgtaattatttcgttcgttcgattgggaagatagtgataaagttcgggcgtagaaaaggtagggttagggtaatcgtcgagtggtagcggtagggattagattgtgtttgattttggtaaattttattttttttgggtcggaggtatgtttatagaagggtggttagtaaggttggaagagtcgaagtttttttttattatttatatattattttcgggttcgtagggttgggaggcgagtttagtacgcgttttaggtgcgtaggggaagagtttagcgttgcgcgtagagtcggttttggagtttgttttgggggtttgtttttttcgtttatttttagtttttttgtggggatgggtgcggtaaaagatcggcggatttttttggtcgtcgtttggtcgtttattagttttttgattttggttaaatttttttttttttatatttgttttttttttttatattttacgttaggggcgtttcgtggattgtaattttgaagagagttttggtcggagggtgttagtttcgattgcgtttttaattcgtaggagtgattttgaatatatttttattcggagttttagtgtttttattcgtcgtataggaaaaagcgcgttcgatttcgggtatttttagtatcgttttagtaagtgtgttcgagattagatgaggggtgcgcggttgtatttatcgttttttagagacgtgggcgtttggcggggattaaggtggttgtgattagtaagtgcgacgtagttattacgagtttaaagtttatggttagtaggttgcgtacgggtagtaaggtataggatacgaaggtgattaaaaggagttgttaaattttttgttcggcggtcgttggttttttagcggtttcggcggaatttcgggcggggtcgtttagcgcgaaaggatagtagagtagcgcgaaggtgaggttgaagagtagcgttagttggtcgatttgttgtagttggggtatttgtagggatcggacgttggttattacgagtagcgttaggaagaggacgtagtgtatcgggtgtgagtttttggttaggtcgggcgcgggtttcggcgcgtttagtagttcggttagcgttagcgcgttcgttagtaggttgagaacggttagcgtttttagcgtggtcgtttgttttagtcgtagcgtgtagtcgcggaatagcgtttttagttttgggtaagcgaatttttcgtcgtacgttcggagttcgcgtcggcggtttgtttcggtcgttcgttcggcgttttcgggttcgttcgcgtcgttttcgtcgtcgttttcgtcgcgcggcgttttcgttattttagcgttatgtagcggtcgcggtcgcgggcgcgtttttcgtcggttcggggcgtcggggcgcgggcggcggcgtcggggcgggcgggcggcgggcggcgaggcgtcggggcgcggggcgcggggcgggcggagttggggcgtcggttgtttcgcgcgcgcgttcggagcgcgttttttttcgttcgtcgcgtttgcgtattggagttcgttcgcgtttcgatcgtggttttcggcggcgatcgcgttgcgatagtcgagtttcgggagtcgcgaatttgggcgcgtatagttcgcgttttaatttcgcgttttgcgttttcgttcgtcggaggagtcgcgtgatttcgagtattttttttgtttttttcgagttttagtttttttatcgtgtatagtggaatttatttttttggcgttatttggggagtcgaaaatattgaaattttgcgaaattttttgttgcggggtagttaattttggaaaatatgtgtttttttttatttaataaaattaggttattagatttgagaggggttcgcgtttgattgcgaatttagggttttcgtttttacgagacggagaatcgacgtttaagaattttcggggttaggaggaaggtggaggtttggggcgtacgttttttttatgcgtatgagggatttttcgtttttcggtaatttttttttaagttttagggtcgcggagattttgtgggcgggtgcgggttgcgggagttgtgttggggaggcggcgg

SEQ ID NO: 7246 - DNA, 562 bp, Artificial Sequence
  Description of Artificial Sequence: Synthetic polynucleotide
cgggtcgttaggagggggagggggacgcgcgtcgtcgggttcgttattttgtattcggggtcgttggtcggtcggggtatttttacgttcgtttcgttggcgagattggagggattcgggatatcgtaaagtattttttttagtgtttgggagcgttcgttgtacgtttagttttacgtttttggaattggggttttttggttttcgggtttaggtttcggttttaggatgcgagtgtttattcgagggggtgggaaaagttgatttttcgtaagggaggggaaggtgtaatttatttttttagataattaatggaatatttttcgtttttttttttttttatttgtttacggtagaagttaggatggcgttttttatgttggtttgggtgtatatataagtgcgtgcggaagggtggttgtaggcggaggtgatagcgaagtaatttcgtagttcgttcgacggttttttgcgttttagatttttttttggcgtgtaagatatcgtgtgttttcgtaaaacgggaatgttatatttgatagcgtattttttcgttttacgg

SEQ ID NO: 7247 - DNA, 1404 bp, Artificial Sequence
  Description of Artificial Sequence: Synthetic polynucleotide
cgtttgttttagcgcggttttcgggggaggtagtagcgttttttgtttttcggtttggtttttgcggtcgtagtttttcggttttgttagggttgtcggcggtttcgtttgtttagttagggttgcggtttagaggaacgcgcgtcggtgtttcgggttgtcgcgtcgttggattttagtttgtatttcgtttttttttttttgaaaaggtattaggaaaagagagagggagagaagagtttatagtaggtaagtttggtttgggttatttgttattttagtgggagggtgtgttggagatcgcggtgttaagcggggatagtcgggatttgggggtggttgtgggttcgaagtggaggacgagtatggtttgggagataaggaatcgttttgagatagagaaggttttcgggagcggatagagagtgggcgaaatcggtgcgtagtaatcgcggcgttagttttagcgcggtttttggggcgtagttttatttcgttttagtagttgcggagttttttgacgagttttcgtttggtagtattgtataaagttttttttttgagacgcgtttaggaattttgttttttttttggttttttggtttttttattattttttttggtttgggtagtagagagcgtttatgaatgtgttttcggttttcgtaggttgtaggtttatttggagacgttttagtcgggaatattcggggagtatttgattaaagggtatttgcgttttcgttcgtttttttttttgttggtttgggagaagggaaaggggtaaggaagaaggaagggaagcgtggtggtttttgttgtagcgttttggaagaggaatgggcgacgttttttttttcgtcggggaatcgcgacgtttcgtttgatggaagtgtgtatttttttagatttagagggaaagttggagttaaatagtagttataaagttggttgtttgaaatgtggttaaggtaaaatattcgggggatttttttgtagtagtgggtttggttcgttttggaaaggtcggatttgattcgtgttgggtatttaattaggagtgcggtttttagggtgttttttttcggtttttgtttaacgagtttggagttaatgcgttaatgggttattttggtagcgtacgggtcgttttcggtattgtttttttttttttgatgattcgagtttaattttttgggttgagttgttttgttttcgttatagtgtaaggagggaagttgataggaggaggagacgtcgcgttgtggtagggagttttgggatttaggggattggaagagagtcgcgcgttagtagttggggtcgttggtgttcgggatttcgagttatggggataggagttaaatagtcgaatttttagcgatttcgtttcgagcgaagcgg

SEQ ID NO: 7248 - DNA, 819 bp, Artificial Sequence
  Description of Artificial Sequence: Synthetic polynucleotide
cgcgggggcggcggggtgatagttttcgtgtatgaattagttattttttaggtttcgtttcggcgggggtcggtcggacgttcgtttcgtataaagcgggtattcgggtcgtttggagtagaaagtcgcgtattttttttcgttaggcgttttttcggacgttttgtttagcgggtcgttcgattttttgtattatggatttcgttcgttttttggggttgtcgattttgttgttttttttgacggaggttgtattgggcgatgttgtttaggagttaataggtatttggtcgttttaggagtttttttttttaatcggcggagagggcgtagcgggttatggggtttcgtgtaggcgttttttaagtttcgttttttttaggtttttgtcgcgcgtttcgttggtaggggggattcgtttttaagtttgtattttttttgtagaggttttttcgttcggaaggggatagaatttttcgggatgttttttttttttaggagttacgtttgattatttttttttttttttgttttttttttgttttttttttaggaaataacgcggagatttgttttttgtttttagattacggattttgtcgggttttattttttcgttattattacgataggtatacgtagagttgtcgttagtttttgtacgggggttgcgagggtaacgttaataatttttatatttgggaggtttgcgacgatgtttgttggaggatagaaagtaagtgttttgcgcgtatttaggattttcgcgttttttgcgtcggcggttggtagtagtttcgttagttttttacgtttcgt

SEQ ID NO: 7249 - DNA, 1128 bp, Artificial Sequence
  Description of Artificial Sequence: Synthetic polynucleotide
cgcgagggtttttagcggttcgcggtttcgggcggatttttagaacgagtgcgggtcgttcggattggtagattgcgagtttcgaggggcgcgggacgtagtcggtttagataaagaaatcggcgttagcggtcgtttttgtcgttttttttttttttttacgtatttttttaggaaaaatagggtatattgacggttaaaggggttggtttttttttttagatagttggacgggaggtgttttttgcggggttttgacgtttttcgtagaagagtcgcgggtttagcggttttcgatagcgttttcgtttcgtttttcggcgggcgtttttttttgttttttcgggtgcgaatcgggcgttggtcggggatttcggggacgcgtgcgtttttcgtcgcgcgaggtgtcgtcgagttagttcgagagggcggggggcgggcggggcggcgcgcgggggcgggggagcggtcgggatacgtgtggcggcggcgggggggacgcggcgttcggggttttaagaaggtgtggagcggggcgggcgtttttttaggtttggtcgaggggcgtcgcgtagaggcggcggcggcgtacggaggcggtagacgacgcgttttcggcgttcgtagtttcggtttcgcgttttcgcggtttaaagtaattttgggagtcgtcgtttttcgcggaatttttcggcgggggttcgtttttaggttcgttttcgagttcgtttcgttttcgttcgtttttttttcgtttttttttcgcgtggttttttcgtttcggcgtttttaaaattgaatgagcgagcggcgcgtagggcgcgcggcggcggcggcggcggcggcggtatggagcgtagtggttgggttcggtagattttttttttagcgttgttgttgggggcgacgttgagggcgcgcgcggcggttggttattattttcgtttttcgttttttttttttttgtgtatttattacggggagttggaaggggatggggagtagggcgaggtgtttatttttttgtatattgcgggtaattttatttattacgtttcgggataagaatattatggtaggtatcgtagtattttcgcgttcgtcgtcgtcgggtgcgttcgttagcgt

SEQ ID NO: 7250 - DNA, 1128 bp, Artificial Sequence; identical to SEQ ID NO: 7249
  Description of Artificial Sequence: Synthetic polynucleotide

SEQ ID NO: 7251 - DNA, 1128 bp, Artificial Sequence; identical to SEQ ID NO: 7249
  Description of Artificial Sequence: Synthetic polynucleotide

SEQ ID NO: 7252 - DNA, 1921 bp, Artificial Sequence
  Description of Artificial Sequence: Synthetic polynucleotide
cgggcgttgttttttgcggtttttttcgtcgaggtttgtgcgtggcggggtttttaggagcggtagttcgtgcggtttgggggcggtttttttttcgtatcgtagcggggcgtgtaaagcgtttgcggttgtagtgtgggcgtttattttacgtgttcggcggcgtgcgaggagtagtaatattttttgtgggcgatgaaggtggataggttgttgaatttgatgttgtaaagacggtagtatcggtggttgtcgttgggtagcggcgtcggcgtgtttttgttgggagtttggacgtttttgttcgagtaggaggggggcgtcggcgggggcggtacggtttcgggcgcggcggtcggggacgggggcgggtcgggcggcggtttttggggtttcgggtcgaggtcgtttcgggggttacgggattcgggttgcggggaggcggcgggggcgggagcgggcgaggggtcgcggtcggtcggcgttcgggtttcgattttcgggtcggttaggggcgcgtcgagtagtaggtcgtgcgttaggcggaaatgttttagtaggttttcgcgtatcgggtcgttcggggggtagtaggggtaggcggcggcgggtaggtcgagcgcgtcgggcggtggcgtagcggggtacgagtattttttgtgcgttaggtaggtttcgaggttgtggaagtttacgcggtaggtcgtgtattcgtggtagtcggttagcgtcggtgtcggggtttcggggagcgggcgtcgcggttttttgtttaggtcgatggggtcgtcggtcgcggggtcgggcgagcgcgtaggggcgaggtcggggtcgttttcgttttcgttttcgggtcgcggcgattcgggcgcgggggcgtggtcgggcggcggggggggcggggcgtcggtcgcgtgtagttcgtagagtttgcggcgtttgcgcgtgcgtataggcgcggcgggagagggggtcgggggcgcggtcggtttagggggtttcgggggcgcggtcggtcggcgcggcggcgggtcgtggcgcgaggcgtagtagtatcgtttgtgtacggtgtaggtttcgtggcggttgaagcggatgttgtaggtttcgtatagcgtgcggttggggtcgtttttcgcgtcgtttacggagttattcgggttttggttgttttcgttgtttcggtcgttcgcgtcgttttcgggcgtggtcgcgtttttagtttttttttcgcgcgtttcggggttcggggacgagcgcggcgcgtcgggttcggcgggttggtcggggggcgcgcgggtcgggtcggggggcgttttgggtttgcgcgcggtaggcgcgttttcgggcgtacggcggtttgaatagtagaggcgtttgtgtacgtagtagttgttgacgttgttgaaggtgatttcgtattcgaagtacgtagcgtttttgggggtttcggggaagagttcggtttgcgcgtcgtcggcgttcgcgttcgcgttttgttgtagtcggttgtgtattagttcggatattttggttaggattttcgaggcggggggcgtcgcgtcgggttcgaatacgtattgcggaaggaatagggtttcggttaggtttagttcgtcgggtatcgggttggagttcggcgtggggttggatagttcggttttgattttggtcggggcggggttgcgcggcgacggcgttcgcgacggggtttggggtttaggtttttcggggtttaggatgggggtcgttttcggtttttttatcgtttttattttgatgtttttgggggtcgtcgggggttcgttgttgtttttattttgggttagaggtttcgttttggttttttcgttggtggtttcggttagggtttttttgtttagttttggcgatggggtgggcgttaggtttaggttcgcgg

SEQ ID NO: 7253 - DNA, 2872 bp, Artificial Sequence
  Description of Artificial Sequence: Synthetic polynucleotide
cgggtgttagggcgcgttgcggtttcgcgggtgggtagaggcgcgtagaaaacgcgcgggtggcgcgcgcggttatttagtgggtttcgttcgcgtcgtcggcgtcgtcgtcgtcgtcgtacgtgcgtcgtcgtgagcgcgaagggcgttcggattcgcgttttgttcgttcgtttgttcgtcggggttattgtggatttttaggtaatagttaagtgagaagttttttttattatcgaaaggtgtttgcgttttttttacgtttttttattaagtgtcgcgaggtgcgattttattttaaatttatttataaatagttaggcgatttttttaaagcggaataaaagtaaaattaggttagatatcgggggaagtcggtcgtgttaacgcgtggatagggaaaggaacgcgattaaggtagtagttatttttgtgtacggttatttcgaagcgttagtagggtttaggagttttttgattttagaaataggagtgttttttttttattttttttttttttggagaagtatttttgagatgaacgttgaagtgtttaatttagacgcgagaagcgtgtatttgtttaattgagtaaataaaggttagtagttggattaataaagtgtgtgtttttaatcgttagatgtttttattgttgttttttttttcgaggttgggggtgggggtgcggggaggaaggggaaaagataataaataattaaaaagaagagagtaaataaatatatatttggtgtttcgatatatatttttttttagtcgaggttttttcggacgaagtaatattttgtattatttaaattaaaaattattcgtgagttaatagtaaattttttttttttattttttttttttttattataaagtaaaatgaaagagaataataagtggtgatgttgggttcggaatgcgattttaacgtcgagtttaaatttgatatatgttatattcgtttcggtaagtagggcgttgtttttggggcgaaattttgtcgttatcgcgggaggagcgcggagtagagtaaagtcgtagttcggtttagcgtggaggtggttgggatagggtggggtgcggaggtgtagcgcgttagagtgagggttaagaaatttatcgcgatcggggacgtcgtgggtagcgtttcgggaggtggtattcgcggcggcgaggtagaagtttttaaataatatatttacgcgcgagttcgggtagttgttgtcgcgagtggggggcgcgttcggggagggggggggtcgaggaagtcgtagttagcggacgcggtcgtcgtataaataatcggggcgggcgttcgcgggcgggttgcgggtggcgcggggttagagttagggcgaagcggcggtcgcggagttgtacgcgtcggcgtgtttcgcgttttttcggaggttcgcgttgtttcgcgtagtcgttttttttattcggatttgtgtgtgtgtgtgtgtgtgtgtgtgtgtttgtgtgtttgtgtgtgtgaatgtgcgttggtaggcgcgcgtattcggtcgcgcgcgcgtgttgttggtaatgcgaattgtatatatattgttcgcggggttgttttttttcggaggggcggggtgggggataggacgtcgtagaggattttgaagtatcgtcggattatttgtttgttttgttttattttgtgttgttattgtcgttgttgttgttgataggtttggaattagttggttaggatgtttttttttttcgtttatttattttttttcgttttttaatttttttaaggagggggaaacgcggggaagaatattgttcggatttgtagcggagttttttggttgacgttaggtttatttgttatgtaaataattcgttggagaatttgtttgtgttacgttagatttttttttatttttatttttttttttattttttgtttcgttttttttagttcgttttagacggcgagttagggaagggggtggggagggaggcgagaataaaatcgtatgttgtattggtaaagtcgagttgtgtttgttgttttttggtagtttttaaagtacgtttttttagtagacggagttgttggtaaatgaaataggggattttatttgaagtgtagaaagtttcgaagggatttaaagttttcggtggtagggagttaaaagtatatggtagtcggaaagggagattcgagcgtgcgttaaagcgttgattggtttttttttttacggtgtgcgtttttgcggtttggggtggagagaggtcgagtgtttttttttttattgttgttttggtttttgttttatttgggttaaggagttttcgggttttttcgtggtcgcgtagtttaggttatcggggcgcggtttggaaggaaggggtcgttaagttgggatttagagagtttgaggttttcgggaagggttttattagtgattgaggggagtaaaagtaatcggaaagaaaggaaagaagaaacggttagagtttgtttcgcgcgtattttaaagtcgaggcgttcgcgtgggggatgtacgggtttagtcgttagttttgggtttcggtttttatttatcgggtgtgattcggttgggcggtttgtttgggatttagggcggtgataggggaaaggtcgagggaggagagagcgggtttcggaggggacgtacgatcggaattttggcgaggggtttttttcggagttttagtttagaggggggttagcgtttttttttcgtcgttttttttcggttttttttttgttcgcgggtcgggcgatttttcgtcggtcgtttttttcgcgcgtcgtagattgagttcgttgttttgttcgtaagttagtcgtaaagcgtggcgtttcgagaggcgt

SEQ ID NO: 7254 - DNA, 2906 bp, Artificial Sequence
  Description of Artificial Sequence: Synthetic polynucleotide
cgcgtttcgttttttttggttcgttcgggtttagggcgtcgtttgtagttgcgcgcggtcgtttttagatggaatttttttattaacgtaaggttcggtcggagtagttattcgggagttgggcggcgaggggttatttttttttatttcggcgggtgtaggatcggggggtttgggtagtaattagtggggaggagcgttggattgtgtacgtcgagttcggtaggttttcgtatgcggtatgcgaagggaatttcgaggtttttttgtagaattcgagtacggttttttcggagttttttgtttcgcgtttgcggttttttgaattattttaataaaatgatcgtttcggtagttatttatgtttttttttgcgtagtgttcgtagcggatcgcgttgtgtggtatttcgagttttggggattttgttgtacgcgttttttagattttcgggggcggggagtggggagataatcgttagagtcgcggggcgggataaatggcggaatcgtcgcgcggcgttaggtaaattttgtaagggaatcgcgcggtttgtcggttttattttaagtattttcgaaaagaaagtatgtggcgggatatttgttatttattatgtgttattttcggtgacgttttttggagttgtgtttatcggggattcgggttcgcgggtgttgttcgttgtgttcgggcgggcgtcgcgttttttcgcgtcggtttcgggttcgttaggtagtcggagtcgttgggtttttttataattatatttttttttttatcgttttcgtttttttttatttttttattttgtagttgggttttttttttttttttgggggcggggaaggggggatgatttttaaaaattagaattattgatatttttggttttttcgtcgttttaggttgaagagcggagggggattcgcgggtcgagggtttttttttttgttcgcgttagggtcgttgggtgatatcgaaatttagaggttttcgtttttcgggggttttttttttcgtttttcgaggtgattggttggcgcgaagcgattggcgatttcgggcgcgattttggtcgcggtttttcgcgtcgcgtcgggtgaatggtcgcgggcggaggatcgggaggcgtcgggcgtagattaatcgcggtcgtcggtgggagtatttgttatttatatggaagagatttggcgtttgttaggttagtttagtttttttagtttagagattagttataagtgcggtcgttgtgttcgttttatgcggcggcggcggcggcggcggcggcgttgatatggagttgcgggttttcggcgggtttttttatcgcgttttttgcggggagtagggtaagattcgtcgttcggtagtagaaagcggtttcgaggaaagtaagtgtcgaattacgggataaaaagtttttggtttttaaatttttttaaaacgttttgtttgttggaaaaggagaattttttcgttttattttttttttcgtttttttttttaaaattttttagcggatagttaggtgtattatttttttttatattattttagtgatttgttttttttgagtataagtagatggttttgtatgttcgtagtttgtgagagaaatagcgggcggaggtgacgggaatggggggagaaggagagtgggtattagggggcgaggggttggtcgggtattggagtttgattgggtgtttgttgattttacgttgtaaagaataaggtagttattttttttgtttgtttatgattatattatagtaaagaggtttagaaaagagggagattttattcggaatttttaaggtttggagatgtgattttttaaaagtttagtcggcgaatgggagattgaagggtgacgggaagggggtaggcgcgttcggcgttttgattgggcgtgcggcggtaggattttaaagcgttttgtttcggatcgtttgttttgggtgatttttcggatttgttttggtggaattcggatttgtttcgtcgagatgacgaggtattttcgtttcgcgaatttaataggagggatttttgaagttagcggttttcgggatgagtcggggtaattttcgttttttgagcgtgggttggatggatgtttaattaggatttagggaggatgggggtcgcgggggaagtcgggcgtttcggggttttcgatatttatattttcgtacggcgtacgttttgtttcgagtttgcgtttttcgagttagtacggcgagtttgggattttcgtgttttttttttgtggttttcgagaaacgtcggagtttcgtgttttgttgggggttggggggatggagaaaaggtttcggggattttgtttaaaaagtaaaggtaaacgtattttaatagtttttcggtagttttcgcggttggcgcggttttagtttcgggcggtttcgcgcggggcgtgggcgcgggcgttcgggcggttaggtgcggcgggggcggaggttgtatttttagcgcgtcggaatgtttcggggcgcgggaaaggtaaaagtagtttggcgttttttttacggttttagtttttatttatttagaattcggttttaatagtttaaggaattgagaagaaaaaggaatttgcgttgggaaataggggtttttggcgggttgagtggtcgttgttatggtagagatagaaacggagaggtagagatggatcgtttagttatgttaagcgcgaagtttattcgtttagttagaaagttcggatattttttgagtttcgtatagttggtgaaaaaataatagaattattaaaaaagaaaaaaaaatttttttcgtttgatacgcgtttttttggtgtaaatgaaatgcggagggatacgcgagttatttagttgcgtaaaatcgtattttcgcgg

SEQ ID NO: 7255 - DNA, 2906 bp, Artificial Sequence; identical to SEQ ID NO: 7254
  Description of Artificial Sequence: Synthetic polynucleotide

SEQ ID NO: 7256 - DNA, 1696 bp, Artificial Sequence
  Description of Artificial Sequence: Synthetic polynucleotide
cgaaggaggggttggcggtagtgtagtagcgaagttcgggttttcggttttgggagtttcgtggtttcggtcgtcgtttttcgagtttttattacgtagtttcgaatttcgaacgcgagttcgcgtttcgttagtagttagcgggggtgaggatgacgcgggtcgggcgagaggtaggttaaatgtagtagtttcgtcgcgggtcgtcgggtttttgagtttcgttttttagagttagggggtttcgggtgcgggtcggagggcgggggtcggcgcgggttttttcgtcgtagtttcgcgtcgttttagtttattagcggttatttaattgtttttttcgatcggtttaaaatagttgcgaacgtttgcgatttgcgcgcggttttttatttgacgtttatttcggttcgttcgttcgttcgttttggtttcgtttcgttcgtttagagggggcggggaggaagcggttcggggaggggggaggggggagggggagagaggaagagaggaggaaggaaggaggaaagaggaagacgggcggtcggaggcgcggggttgcgcggcgtcggtcggcgcggcgttggaaggcgtcggcgttaatttcgcgaggtaggcgacggagggggagcggcgttaatatataagagtattgtattacgttaatttttttttagaatagtatgcgttagtagtatatttacgttttgattgaaggataaaaggatgagagagtagtttgcgtggttgtcgtttgtaatatcgcgagttcggcgcgaggaggagacggtgggcgtcgcgcgtaggggtttcgttgttgttgttgtcgtcgttagttagcggggattatgtttttgggtttcggagcgtttttcgtagtcgcgattttcgttgtttacgtcgttgtagtagttcgttggcggcgcggttattgagggcgtcgggagtcgaagtcgcgaattcgtttttttcgtataaagtcggagtcggcggcgcgtcgggggtcgggtagcggcgggcggcgacgggcggttgcgcgtcgtcgggggttgcggtcgtcgtcgtcgtcggattcgcgttcgttttcggattttttgaaggggtttgcggtgcgggcgcgatcgcgggcgtcgcgcgttttttcggtcggcggatcgggttcgagcgtagtcgttacgtcgttggttttcgggggtcggacggagcgtcgtttcgcgtgtcggtagtcggcggattggagaattgatttttcgtttttgttttttttatttttcgagaagaggcgaggagaaagggggtgtgtgtttggggagggcgaaggcgtcgcgaatatttttttttaattttcgtcgtttcgcgagtttacgatcgtaattagttgtcgtcggttcggagcggtcgacgtcgggagagggagcgtagtatttagcgagtgcggtttgggcggtttcggggcgttttcgtatttttttcggcggcggttcgtagagcgggtcggggtcgtcggagcgtattttggcgatgaagcgttttttttcgcggttggagcgagtcggtgttagggtttaaggataaagtcgggaagcgttggtggcgtcgttttttgggcggaggggggggtatgtatttgtatagttcgtcgggttttggtttttttaggcgcgttttaatttcgcggtttcgtcggtttcggtttcgg

SEQ ID NO: 7257 - DNA, 2054 bp, Artificial Sequence
  Description of Artificial Sequence: Synthetic polynucleotide
cgacggttagcgtttagagttgtaaatttcgaggcggttgagcgtttttttttgagcgcgcgtcgtgcgtttcggttatttatgtatgttttttttttcgttttatatcgttatcgttagggtagtttcgtgcgggtcgaggggatttaggggggtgtcggtaaacgttggtgcggaggagagtcggtaagtcgggcggcggcgggtgggagtatgtagggaggcgttttttgttttttttgtcggtcgttttttttcgttttagatgttagtcgcgagtttcgagttagcgagagcgagttagagagggagcggcggcgggcggcgggcggtagggaggagaggaggcgaggcgagggagggaggaagggaagtagggagggcgggagggaggagaggaggatttagagagcgttaggtagttggagtttttgtagcgtttggtcgggttttaatgtatagtagtagcgagtcgcggcggtagtaggtagttcgggagtttcggcggcggtcgagttagcggcggtttcgttttttgttttttgtaaattttgcgagtagttcgttcggggggtcgggggcgcgttcgggaggttcggttcggttcgcggtcgagtttttcgtcgtcgtagcgttagtcgtcgtagttattatcgtcgtagtttcgtgttttttcggggagtagtcggcggttttcgcggttttttagtttcggttttagggtattgttcggcgagtgtttcggtaagggtgggggttgtcgcggcgcggtcggtcgcgggttgtcggggggcggtcgtcgttatttagagaggcgcgtagaggcgtcgagagcgtttttcggcgggtttttcgcgtattcgtcgcgttcgggtagcggttcgatcgggcgagtatgggcggcgcggagtgacgtcgttgtgttcgtttggtattaaggatatttagttcgcgggggtggggacgaaggggggtagttcggcgtcgttatcgtagttttcgagagtcgtcgtcgttgttcgggtttcggggttgggtggaggaaaggggtgttcggaatcgatttttatttttcgatttttttgttggatattacgtttattttggacgtcgtaagagaagttgttaagtttcgtaggttttgattcggcgtttttcgcgtttttcggttgttttcggtttttttgtgtttcggtggagtatttgcgttcggggttggggttggaggaggtagttatacgcgcgtatacgtatacgtttagaggagggcgagaggtagcggtataggttttatttgtagtgttaatgcggcgttttcgttgaaggagggaaacgcggcgcgtttaggtaaggagtcggttcgtcggggagtggggtcgggcgggcggcgagggtagtaaggtcggatagatttgggtcgattcgggagtttttagtgtttcggagttagttcgcggtatacgtatacgtatatacgtaggtatatatatagatttatatcggtatatacggcgttcgcgtatttgtttacgttttatttggacgttcgcggaggtgtagcggtcggagtagggatttttcgggtgtgttttttttttacgtttttggatttagatttttttttttcgggattttcggggtgggattttgtgtattttcggttttgttttttattcggggaggttgagggagtaattttttagtttttagtttttttcgtttttagttgggttttaaaatgggagaagttttgagaggttttcggagatttatttagtgttatcgcggtttcgtggtttttggatattttgggattttaacgggagatagatttatagatattcggacgtatatttggagagagtggtggtttagcgttcggggaggaggttagataggcggttggggttgtagttttgtagggcggcgtatatgaaatagatattgcgtttttttagtaagaggtagtataaacgtttttttgaagcgtggtattgttttttcgggaatgcgtcgagattttaggtagaaagcggtttaaagtatcgtcgcgt

SEQ ID NO: 7258 - DNA, 1258 bp, Artificial Sequence
  Description of Artificial Sequence: Synthetic polynucleotide
cgaataacgtagcggcgttaggcgttagggtttttatttttgttttttggatttttttcgtttttttgttttatcgagggttttgtgattcgattttatcgaattaatcgttgtttatcgagggtttgttgcgtttaaggaaggtatcgggcgacgagtaaggcggggacgtagtttggggacgtaggggttcgggttttagtttagagataggaggtcggcgtttcgatttggtattcgtcgacgaatttattttaaggtttttattggcggagtttttgttatttttttttttttttaaatgtagttttcgttattttttcgcgtttaggggttgttgtttgagtttagttttgtttattggagggcggcggtggagagggtgttggtttagcgtcggtagttgggtttaggattaaggtgggcgttcgtcggttttggtttttttagttttacggtgtaggatttagggcgcggttattcgagtttttcggacgtttttttttttgatgttcgttgtttttgttttggcgtttttagttcggggtcgtagtttgttttttttttttttttttttcgtcgtagttcgtcgttttcgggtagagtttatgtttagtttgggttttcgttcgggatttaggaagaggttggcggggttggagggtgcgggtcggcgcgggagggcgcgggaggcggggagcggcggtttttgattggtcggggcgggggagtgagcggagttttttataatgtttcggtgcggtgtagtcgcggatggatgttgcgggaaggggttgttatttgttgtttttgttagcggcgcgcggatttgttcgcgtttttgtagtcgtcgtcgtcgtcgtcgttagttcgttcggtttttgtagcggcgtcgtttgcgtttttttcgcggtcgtcggagcgggcgttatgaattttagtttttcggcgggagaggagaaaggggcgacgggcggtagtagtagtagcggaagcggcgtcgggagttgttgtttgggcgtcgagggcggcgcggattcgcggggcgtagggttagtcgcggcggcgggggtcgttgttttggacgagttcgcggtcgtcggttagaaggagaaggacgaagcgttggaggagaagttgaggaatttaatttttcggaagtaggtttcgtataggtaggtgcggggagtcggtagtcgagataggtgcgtcgcggcgggagatttatttttttatttagtaaggggcgttttcgcgg

SEQ ID NO: 7259 - DNA, 628 bp, Artificial Sequence
  Description of Artificial Sequence: Synthetic polynucleotide
cgcggtggttttcggtttttttttattttattttacgaatcggcgtttggtcgttttgaaatgaatgatttcgtcgcgtttcggcgtcgcgtttttagcgttttttttcgggatagcggttaaggtgattttgatcgttttcgggtcgcgggtcgggtttgggtaggggtttttgggttaggagagggaggtcgtttcgcgtttattttttaaggtcgttttttagttggtgttgttttcgtagttcgattcggatcgtcgtagtagtttttcggggtcgcgggttttagtttttgcgggcgaacgcggtttgggggcggcgggggcgggcgcggggcgcgcggcgaggggcggcggcggtcgggttcgcgaggggggttttcgggtcggttttatgcggggcgtttcgtcgcgtcgcgttcgcgtttttgtatcggggtgcggggtttagttcgacgcgtattcggcgtttcgcgcgttttgcgggttttttaggtcggtttcgggtgggttaggatcgcggcgttggtaggtcggggttgagttcggtttttcgcgttggagtttttgcgtcgggtgtcgtcgcggtgcgtttagcgtttgtttcgtcgagtcgtagtttttacgt

SEQ ID NO: 7260 - DNA, 1075 bp, Artificial Sequence
  Description of Artificial Sequence: Synthetic polynucleotide
cggaggttcgttttcgttaggggtttcgggggtgcgtgattatgaattttagagggttgggttttgatttgagtgtcgattcgttaatgaggacgggaggataaggttgtcgacgtagcggaaggtaggggggaagcgattcgaggatttgacgattatttttaggtaggggttttttaagtaggtacggaaattaattttattaaatcgcggagtggggattgggttcgggcggtgtttagtagggtaggggtagggttagttggcgcgtaggtatttgtagggtggagtagaataatcgtggggattcgtttttttggaggggtattgtttattttttatatgagttttaggatattttcgtggggcggagtttcggagacgttttaggttacgttttcgtcgttttatttttgtttgcggggggtcgagtagggagggaggtttagcgcgcgttgtgtgttcgtagtgtttacgggtagcggggacgtttgcgttcgggttttcgacgcgtagtttggagagttgcggagggtgtttcggggttatatatttattattaattgtatttaggtaggtttttttgtttttttcggggtcgtcgttcgtgggagggaaggtgtttcgtttcgatttatttacgcgggtagcggtgtttttttcgtttatcgcgttatcggtgacgttcgtttttgcgttcgtaggtgtacggttaggtgttttatatcgtttcgtacgacggcgttttgcgtttttgggacgtgcgcgggtttcgaggtgtttcgcggtttttttcgtttatgcgtagtttttcgcggttttttagtaataaggtgggttgcgtcgtcgcgtttttgtagtcggtttgatttcgcggggtttttgtagacgttagtttagatatttagcggtttttagagcgtttcgttttgttattcgcggtggtggcgttcgatggtcggcgaggggcgaggagcgaggaagttcgggcgggaggagagttcgtcgtaggcgtttggtttttttttggtggttaggaggcgttgggagcgggagtgttcgttttggggatcgt

SEQ ID NO: 7261 - DNA, 5566 bp, Artificial Sequence
  Description of Artificial Sequence: Synthetic polynucleotide
cgaattagttttgtcgttggatttttggtcgttgttcgggtcggcgttagttttatataatgtcgcgtgagtttttgtgcgtgtgcgcgggggaggttcgagatgtttttttttcggtaagttttcgcgttagtatcgttttttagtttcgcgggttttttcgcggcgagtcgggacgcgtggttttcgcgggtttatttgaagaaggtcggttcgagtagcgcgtatagtagatttacgtcggttagagtatgggttgcgcgtttaggttggcgtcggtttgcgagttgttcgagttcgagtttatcgataggtcgtcgtcgtttaagtcgcgggttttgagcgattcgtttagggggtcgtcggggtcgtcgttttttttggcgttatcgtgtagcgagagcgttttggagtcgtttttttcgttattcggagagtcgttgtcggcggttgggagcggttcgttcgcgtcgggcgtatatggcgggttttgtcggggttttcgggagttcgagtttaagagttgtttcgagtcgttcgcgtcgtcgttttttttcgtatcgttcgcgtcgttttcgtcgtcggtttcgtcgttttttttttttttcgcgttcgtatagtaggttttcgcgttttttcgtcggtcgaattcgggtcgtaggatgttgtcgatgaagaagttggtgatgcggtgcgggtgttggtggttgtcgggcgtttgtaggatcgcgggtagtattagagttcgtcggcgttcggtgttcgtttcgttcgggttgttatcgtcgtcgtcgttcgagtcgtcgtcggggttggatttcggttgtcgttgtttttttatcgtcgtcgttgtttcgttaggtttggggttatttttttttatgttgtttatagtaaattttatattggtttttcggggacgtttttttaaattagttttcggttttttcgcggcgtatacggagattttcgcgtttttatttcgtcgagtttttcgagggcgtgcgcggcggtcgcggttagggttgaggttttataagtcgtcggtcgcgttcggcgcggagttatttttgaatttacgaattgggttagaaatattacgagtcgtttcgttcgtttagacgatgagagatttaatagagttaagttttcgatttcgtcgcgtagtcggggtttagatagtcgtagtggttcggcggggacgcgggtcgtttttcgggtttttcgttttttttcgcgttcggtcgtttcgggtttcggcgtcgtcgtttgggtcgttcggggcgagagttgcgcgtatgtaggtagcgcgtttttcggcgtttacgttcgttcgggtcggtttcggtcgtcgtcgtcgttcggtcgttttcgttcgtacgttttagtcggttttcgagggtgtcgggcgttcgcggttagcgcgttcgttatcgttcgtacgtatatggaggtttttttttcgcggtcgtcgtttcgttgcgggtcggggcgttttatcggcgtgcggtcgcgttttcgtcgagtttcgtagagtttcgcggttcgagtcgtatgggtgagagacgcgaggttagggttcggtcgggtcgggttgggtcgttcgcgtttttcggtcgttcgtcgttttcgtcgtttcggttttcgcgcgggttcggaaatttttaggttattcggcgtaatttgagatatttttattttggatttttgtttttatttttaatagagttttttcgagtgacgtcgtaggtcggttttttggatacgtgtttcgggttaatggtcgcggcgtcgcgcgtttacgtgacgtttcggtcgtcgttgggtgataggagtagttcgtcgttttttttttttttaaagcggtcgcgtttttcgtttcgggtgcgggagtttaggaattcggagagattttcgatcgcgttttttgcgttcgttcgcgttttttttgtcgtttcgcggtttaggggtgtgagttattcggcgatagtttcgttaggttatttcggggcgcgtaggtggatacgtataggaagatcgttatttttaagatttttatattgtttatcgtggggcgaaattttataattttttgtataaaatgtataaataatattaaatgagttgtcgagatataaagggatttttgtggttcgttttttttgttgatggagaggaatagtgttatttttatttgattcggtaattcggtagttttttgttttaaacgtagagttggcgcgtaggatattttttttgtagatatttattgtaagtgtgcgtgtgtgtgcgtgtgtagggaggcgcgtgtatacggtcgtattttattcggggatagcgatttttatgaaatatgtttagcgattcgaaagagcgggggaatgtagtatgcggttttatttgcgaagggagaaatttaggagtttcggaggttttaaaggaattttttttgttaaggagaggaggggtgattgtttagttaagattttaaaattaagtcgttcgtttttttttaatttttttattttgattgaggagtttttagatcggttatttcgttttttttgttttaaaattttttaaattaattttgtcggagagtagggtttatttgaaacgagaattaggaatttaacggtaagggtgggagttttagttggtttttttttttttttttttttattttttttagattttttttttagttgttgttagaatgtttaattggaagttttgtttttttttttttttttttttttttttcgggtttttttttatttgtttttgtttatttattaaatattcgttgttattttaggttcgtttgtttattatttaaaatgtatttttatggaaatgtgtgaatttttggaaatattcgatagggtagttttgggggtgcgggagtatttgtacgttatgagtatttttagtgcgggggaggcggggaggtcgtagtttggtacggatattttagggttgattggttttgggtagttgtatcgtgtttagtaatttagattttcgtagaggtagttagtaggttgttgttaggttttgagtgaatttggggagtttggtaagtattttcgaggtagcgtggtttgttaggttatttggggtttgaaggttgtattttggttttgcgaagttttttttttagtgtttattttacgtgttgttttttttttgtaggttttagagtgttggttgggttgggatgagaaacgatagtttttatagttgtttttaggaaaattatttttttatttaggacgggaatggtgggggaggaggtgttgggttggttttttggttattggacgtggttttggttagagtgtgttttttgttcggtgtgtttagggtagggtggggaagttttttttcgttggggttggatttttttattttttttttattggaggagtttttattaaatgttttggttaggtatatatttgttaggggtttttttcgagttttaaaaaattaaattttatagtttatttgtttttcgggaaaatagggttggtgagagtttgtgggaagttttattgacgtttatttggttttttggggggagaattttttgtaattttggaaattttgatgattattagttaggaaagggagggtttaacgattttgggttttttgaatatgatattggggggaggaggggttttgagttttttggtttttgtaaaattattttaggttaatggttttatttgttttatgaaagttaattaggcggttttttgagaagtattttttgaatttttgggattttttgtttttgattgttttagtataaatggttttaagacgttgggttttagttttgtgtttttttgcgatttagattttaattcgtggttgtaatagagattttgggaagtagagcgttatttttagggcgtttggcgggtcggtgggtagagatttgttttcgtagggtttgcgggttgggttttggggttggttggaggaagaggaattcgtgggtcgtttttttggaaaggaggaaggtgagaggtggagggaggaataggagaaagagaaataaatgaagagagagataattagagggtatcgggttttttagagtggatttaaatacgaaataattttgggaaagcggtaagaggggttatcgtttaaagggtcggggaagttgggatggggttgtagaaagttgagttgtttaggggttgggcggtgttgagttttatatatacggaatttcgtaaggtgttttaggaagtttcgagaagcgcgtatgaggatcggtttcggtcgtttgttttagttgggacggcgtttcgcgttttttggggatgcggggtagtggcgtgttttttttttgcgatgttagtttcggttgtcgcgttttcgcgagtttagagttttcgttttttttttcgaacgatcgtcgtttttaaggtcggtttttttgtgcggattagacgagtttttttcggatattagtttttttcgggatggaaagtggggtattgattcgggaatttcgttttttttttagttttatttaggaatcggagagcgttcgcgattattcgtttgcggaggacggttttttatattttttaggttcgttgtataaagaggggtttcggagagggcgagtaggaaagtagtttttagacgtcgtgcgttttaggatacggacgttagttttgtaaataaaattttagtgaagcgtttcggagatatcgggcgttcggatgtcgagttaggttttcgtttttatttgaaaacgaggttagagaagggtgattttttcggtttttttgcgttttttttattcgtttcgtttttttagtttgacgtggtgatatttggaaaaatggatttaatgaaagtcgttcgttcgcggcggtttcgttattcgcggggtagagacgtttaataatttttgagagcgagatttttattttagttaaagtaggtttggttagttttgcgttttcggttgggagtcgagtttcgtagttaagttttaggcgtcgggcggggaattggggtcgataggagagtaatatttttttcggggcgagtagagagttatcgtcggtttttggggttgacgtttcgattcggtttgtagataaaggtcgaaacgaaggggcgcggggagtaggggtggggcgggcggggttaacgggcggatattgcgtgtttgcgtttttttttgggcgaaggaggatcggtttataggtttatcgggcgagttcggggacggggtttgggaggttgggtttagggtttgagatttttttagaataattttcggaaggagggggttaaatgcggtagcggcgggtttgaaaagggttaggagcgtcgtaggaattggggtgtataggttttcgcgtgtttagcgtttcgttttttttcgttttaggtttgttaggggcgcgcgtggcgcgggtagagtttggtgggtgggttggcgcggatagaagttttgtcggggagcggggaggggggggtagtcgtattgtacgttttggttttgtttcgatcgttggagaagcgt

SEQ ID NO: 7262 - DNA, 5566 bp, Artificial Sequence; identical to SEQ ID NO: 7261
  Description of Artificial Sequence: Synthetic polynucleotide

SEQ ID NO: 7263 - DNA, 1164 bp, Artificial Sequence
  Description of Artificial Sequence: Synthetic polynucleotide
cgaacgtttggattttagcgagcgggcggttttttggcggcggtgattatcgttgtgttcgttgtttttacgcggcgttcgttaattttacgtgttcgtagtcgcgcggcggggtcgggcgttcggagttgattttagtttttaggatagaaagggtggttaaacgtagatttggtaatttttcgagtcggcgattatagattgttggtggttgcgttacggtttcgggagggttagtttttcgttgggtttttagggtattaagaaaagaggggtatgcgagtttggaagttggagagagttcggggttttttagagcgggtgggacgtcgcgtttttaggatttcgcgttacgcgtattttttttatttcgatatttattgttatttttatagcggagcgaggggtttcgtcgagggcgagcgtatttcgtgcggttgagatgttcggaacgttttttcgcgtttcggtttttttagaaggggttatagtcggttcgcgagttttcgggcgggggttgagtcgtagtgttaattaaggcgaggttattttggttcgcgcgttttttattttagggttttttcggtagagaggtgattgtaggttatcgttagtcgggtttttatttttcgttttcgtcgtttcggtttttatatttcggaattttttcggcggagtttgcgagttcgggaacgcggttttagttagagtggaagggatagcgcgggaattcggtagagagaaaaagcgggaattgggcgtcgtcgttttacgatcgggaggagattttttttcggttttttttggattttatttcggggatcgtttcggggttagagtttaggttgggagagtttttgggcgtatttatcgttttttttaatttttttttttttatttttagttcgggtggtagtggttattcgtcgggtttgtaggtggaggggagtttgcgcgtaaaatttacggtcggcggcggttattttttcgcgggaggcggttagattttggagttatacggttagagttagtacgagtagggttttgttttttatttcggggcgcgtttttttggaggagttgtaaggcgcggatcgattgatgagtcggttgagtcggaggttggagagggttggagtcgcggtttggcgttgagtaagtcgt

SEQ ID NO: 7264 - DNA, 1495 bp, Artificial Sequence
  Description of Artificial Sequence: Synthetic polynucleotide
cggcgcgtattttatatcgtttgttttgtgttttaaaacgtcgaagttaattttttacgcggttttttgttcgattatttatttttgcgttgttaggtatatcgaggggatcggttttttttttaggcggtttattttagcgtttttcgttagagggtatacggttttcgtgtaaagcgtttatggcgcggggtacgcgcgtacgtagtttcgatttttatagtttaggttttattttcgggttgggtttagtcgttaaggcgttggggaggggtcgtgttagggagcgaagcgttttcgggattttgggagggtgcggtcgggattgttgttttttgttttgagttttgggcgtaggcgttcggtaggattcggcgtttaggtgagcggcggtttttaggaggggaagtatcgcgcgatttaacgggcgtttagagcgtagggcgaagaggatgggcgagggagagggggagggagaggttacggtatttgaggaggaggaggagtaggaggagtaggaggaggatcgtggggttcgggtcgcgttgcgtatttatttgggttttggttgttcgtcgcggatttcggttttttgtcggagtttcgttttttttttttgtttttttttttgtttttgttttttttgcgttcggatatttcgtcggagacggagcgttttacgcggacggttttcggcgtaggcgagtttggtttaagggttcggatcgggtttgggaaaagtttgtttttcgagggggagagcgagcggtcgcgttgaggcgttcgcgttgcgcgggggcgtttttcgttgtttgtagggagcgcggcgcggacgcggcgggcggttcggttatttggaacgggcgttcgttttggttttcggggttgtttttgtcgtttcgggaagtcgtcgatgggttttatcgttggcggttcgcgttttggtttttgttcggcgttttcgtaattcgatcggggagaggttattatcgttttgtttacgtttttatcgttcggtagtcgtcgtcgtttagtttttggttttcgcgcgagttcggagttttaataagtttcggggaatttttcgtcggtttttttttaattgtttcgtagttatttatttttcgttcgtaggttggaggtaggcgtttttttcgtatttttttttggtttcgtttttttttttttttttattatatttttattttgaggcgcggatacgttatcgggaggagtttgggttcggcgttttcgggcgtagtttttttttttttcgcgttggtcgggcggggggtggcggcgcggttgtcgggaattttcgataggggtcgttggacgttgcgcggagatcgaggttagcgtttcggagattcgggaatttaggcggagattcgaggttttcgttgttcgttttttttcgtagttaggtagcgtttgggagggttgtttcgttttattttacgcggaaaaggacggcgtagagaaaagtttgcga

SEQ ID NO: 7265 - DNA, 352 bp, Artificial Sequence
  Description of Artificial Sequence: Synthetic polynucleotide
cgtcgtcgttggtgggtggcggcggttcgggtgttttttggattgcgtagtaaagaggtattttgggagatggggttaaggttttagggggtgttattcgcgaacggtttattcgttagattaggggggttttttggttgtgcgtttggttagaattggttttgacgatggaagtttttggaattaaagcgttgtttttttttttttgtgttatagttggagttgcgggagcgtttgttttgttcggagttcgcggttttttttcggttgtttcgcggtggcgttacgcgtttttttcggagtaagttcggtgcgtagggtcgggggcgtgggcggttgttgttagaggcgt

SEQ ID NO: 7266 - DNA, 1141 bp, Artificial Sequence
  Description of Artificial Sequence: Synthetic polynucleotide
cggggattaggcggtgtgtcgttcgggtagttagtgggtcgggcgagtttgcggggttggaggggacgcggggttgggaggttggggagttgggggttgatttcgggcgggcggggcggggtagggatttgtcggtttggggcgggcgtattagacgagtttttcgttcgtaggtttttagcgtttagtcgcgtttcggttgcgtttcgtcggtttcgtttcgtttcgtttcgtagagtcgtcgttagtagtgggagacgtgcgttgagaggcgggggttgcgttcggcggaatagtagttttcgggcggagagcggggtcggggttcgagagtaggtgatgttaagagttgagcgggattcgtgagcgcgcggtttagtatttattagggcgtttcgtaaaaaatttcgttttcgtttgtttttgggaattataggtaagttttgggttttcgaggtgtagttttaggtagagtttcgtgttgggaggtgggaagggggtttgattttggggatttaggtagtttggggatagttttattaggggtcggtgtttagaattggtgagggaggtattttaggggttgggggagaaggagcgagcgtttttcgtttttttttggtatttagcggcgcgtttgttggtcggaaaggtagcgagaagttcgttttttttgttttgttttcggcgatttgcggttcgggtgggagttcgtaggtttcgggtttttagcgtcgttggttagggcgcgggtaaagtttgttttttcgcgtttagtcggttttttcgttttcgtagcgtcgtaggtgtcgtttgttttcgtttttttgttgtaatcgttttattatggatttttcgatttagatttttcgcggggagtcgggttttatttgcgtttcgagcgtttgtttgttttttaatagtagcgtttggtttttcggttgggtcgagttcgatagtaacggtagcgtcggttcggaggacgcgtagttggagttcgcgtatattttttcggttatttcggttattattacggcggtttatttcgtagtgttcgtcgtgggtttggtgggtaattcgttggttatgttcgtgattattcggtgagcgcggggatagcgtagcgttgggggttgggcgg

SEQ ID NO: 7267 - DNA, 3297 bp, Artificial Sequence
  Description of Artificial Sequence: Synthetic polynucleotide
cgagacggataggaatcgaggagatttttttgtagcgttttttatttttcggatagaaattttgtagattacgtttatttttttatttcgtgtatcgttcgtggttcgtgggtagtagttgtttttttgggatttttttcgtttgttcgcgagttttcgtacggtcgcgtttttgttgttggggtcgttcgttggttttggttgttcgttaggatttttttttgatgttgttaagttcgggaagtttacgatgtattttagtgttcgcgcgtcgttttttttaaagttttttttttatttatttttttataagcgtggagggagatggggtaggtcgcggcgtttatagattttttttcggcgtttatttttttttttttatttttttagtagcggtagggtcgtagcgtacgtaaatttttttttaaaacgtttattttatttttagttagtcgttttttttagggttttttcgttcgagttgggtgtggggatcgtcgcgtatatagagacgggaaagttatttcggtttcggagcgtcgtttttttagaggtttttggttcgttcgtttttttagcgttggaggatagtcgcgtatatagatttttttttttaacgtttatcgcggtttttagttgtagtttgtatttttatttttcgtttttagtttttcgtttttcgttttttgttttttagttttcgtagttcgggcgtttagatttgtttcgattttttagggtagtttcgagggtgcggaagattaagtgttcgggtttgttttaggaaaatttcggcggcgtttgtacgttaattgttttggcgtaggcgaagggtggagggtatttttttgtttattcggtttttaagagcgtgaatagaggtttcgagtgaacgtttatatttagtcggttttttagggtttacgcgtggggcgtttatttttttattttgtttttcggtgtttttgttttggttgtattttttttaaaaggaggcgttacgattttaggaggttttgtttttttattttttttagcggcgtttaaattattagtttcgggcgtttaattttttttttgttttttttttatttcgtgagaaagtcgacgtttttattcgtttggttttttcgaaatacgtttcgggtggttaatgcgatttttagggtttaaagattagattttcgcgttttttattaagatatcgacgcgaagtcgtagaggtggaatcgcggacgttttggtaggttcgggatatattgattttggtggcgcgatgttttttttcgtacgcggacgtattcgtagttttatttttttaaattcgtattgcgggaaggaattttcgattcgtatcggttttcgtttcgtagtaacggcgatattttgaggttcggacgagcggcgcgttttttttagtttcggttattttttagtacgaagttttagggcgagttcgagacgaagaaagagagttcgaggaattgggatatttacgagtttatcgtttattttgtcggtcggggaggaagtttcggtcggttcgttttcgttcgtcgtgcgtatgcgtttcgcgggtgtttttttaatattgtagcgcggagggttgttttttttacgtcggcgattgtttatcgcgtttttcgttttttttcggttttcggtttttgttttagtttttttttttcggtttttttttttttttgttttgtttttttttcgtttttttattttttttattcggtcgggtaattttacgtttcgtttttttttagcggcggcgtattttatcgtcgcgggtgttaggggtattttcgaggttttacgcggggcgcgatttttatttcggtcgtagttttattgttttagtttcgtattagtaagttttaagagtgtggatgcgaagttaggcgcgcgtagagggcgttcgcgaagttttttgtgttatcgttttttttcggcgcgcggggtcgagcgagattagagtgtgttggattgcgtgttcggatttcgtgaatgaagggagcgggaggaaggagcgggggtgggcggtaggtatggagggggcgtttggtttttagagtttcgcgtttgtggattgcgcgtttttggagggtagttttttatttttttttcggttcggggcgtttttttgagttttgttttcgttttatttcggcgtagtttaggttttcggttttttcgttttggaaagcggttttcgtttttttttagttagttagagcgcggaggttttatttagtaatcgagcgggggataagggggggaattaatttttgattttagatttcgttgagattttcggtagtcgtttttcgcgtttttttttttagggatttcggagttcggggaaaggagtagattagggggtagcgggagggggaatttagtcgtttagtttttcggattcgtagtatcgcgtgttttcgtagttcgtagcgttttttcgggagtgggattcggtggggtcgcggggttagttttttggagttcggagggttaagttgaagttggaaattgatttgatataaaaataatattacgttatttttttttttgtttgtcgagagggtaggggagtgggagagcgagcgttgggagtaggcggaggcgcgtttgggggaggttcggagtaggcggaggagagcgatacgttgagagtttgaaaggtagtttcggggaagagcgagggttttttttcgtttttttggattatggaaaggaaatggtttaggaaaaagtagtttggagtgttttttcgcggggaggggcggtgtttcgggagtcgttaatgtttcgttttaggatttgtttagttacgtttcggttttttcgattttgttattttttttattgttagttttagcggagcgggttagttggggttaggaagaatcgggagaggttggtgttttggggaggttgggtgtggggcgtagtggagattacggtatttatcggtataggcgagttttgtttagcggtggcgtttttttttttgggtttggttatcggatgggggggttttagcggacgatttttcgagggtcggtcgggtagtgttagcgtcgtttcgagtaggagcgagaggcggttcggtagtttttcgtgttttttcgagagtcgggcggtcggtagggcgggaagtaggggggagaagtttaggcgttttcggggagtttcgggagggggtcgtcggagaaggtgagagaagaattttgcgaggttggaaagcgggttagaaaggaggtcgaatagtttcggggcggcgggcga

SEQ ID NO: 7268 - DNA, 2213 bp, Artificial Sequence
  Description of Artificial Sequence: Synthetic polynucleotide
cgaaggcgacgggtttaggatttgtagaaatcgttgcggtttggggcggtcggggatttacggttttttggggcggttttgaataggttttggggcgtagcgttcgttttttaaagaagtttgggatcgggttttgtttcgttgtaagttacgtttttcgtgagtttataagtgtaaaattagaaaagaatgtttcgtttaaataattaaagagcggtggttttcgcgggggtagcggaggcggttagtagggttttcgttttcggggagaagtgtttacgatttaagggttgtttgttttaggaattttttaaagaattatagatattgagagtattcggggtttggtaggaagtgtagtgtattttttagttttagggtaattaggatagtatgaattttttattttgtggtagaataaacggttagcgtttcgatgtggcgcgttcgatttttttttatagagtttaaaagttacgtttaattaaattgtagcgttttcgttttagttgggtatcggtttggaagcggtttggaattagattggattcgaggaggtaagatttcggtagcgcgaggttaattataggttttattcgcggtttttagttcggttttatcgtagtcggcggtagatattttaaattttttatacgtcgtttttagcgaggcgtttcggggaaagtagcgtgaggtagtgagtcgaggggcggggttaggaggacgtttcgttttcgagttcgtttcgtcggagggtttgattaatgattttttaagtcgttttagttttcggcgtagttttttcggtgggttaggtttttcgttcgatttgttttagtcggtcggagtatatacgtttggtcgcggggcgttcgtataaaagttatagttagcggaggttggaaatagtcgtcgatttgggtatcggtcggacgaggatggagtgattagcgcggttttggttatataggttttgttttacgtttttcgttcgtttttacgacggagcggagttttatttagtcgttttaggaaaggtgaggggttcgttagacgcgtattgcgtagttttcgggttcggaacggtggcgggtgtcgtatttcgaggtgaggttaagggtttttcgtttttcgggtagaaattttttttggcgtgaaaggtcgagggcggttggtgagtcgtggtttttcgcggcgtcggcgagaaggagtcgcgttatttttcgtgcgtgtcgggttggataaagttatttaagcgcgaacgagtgttgattttgagttgtgttttcgagattttttttttcgggtagagtagattttttgtttaatttgtttttgaaaagtaaagtcggtattgcgtttttttttatttttttaggaagtttaagaatttcggagtttcgtaattttttttagacgttcggaagtaaatcgcgttttaggtaaaacgagttcgtttgagagcgtttttagtttcgttgggttgttggtgggcgtacggggagaattagggggttgcgtttttcgggttaagttcgatcgtttttcggttttatcgtattttcggttttttgtagcgcgcgcggcgcgggaagttgttatggatcgcggtcgtttagcgggtagtttttttagcgttagcgtcgagttcgcgtttttggtcgtcgttattcgcgattcgcgtttcgggcggatcgggtcggggtcggcgggttttgggggcggttcgcgtttcgggagcgggcggtcggcggcggcgaatgcggcgcgggagcgtagtcgggtgtagattttgcggtacgtttttttggagttgtagcgtacgttgtcgttcgtgtcgttcgatattaagttgtttaagttggacgtgttgttgttggttattatttatatcgcgtattttattcgtagtttgtaggacgacgtcgaggcgtcggcggacgtcgggttgggcgttttgcgcggcgatggttatttgtattcggttaaggtaagcgggcggggcgtatcgcggggttggggtcgagattaggatattttgatttgttttgttagttatcgttttgggtagatgttttaattttttttcgggtgaggcgggaagtcgatcgggagaacgatttcggttcgcgagggtattggtggtaaggttttcgtcgcgaaagtcggttttttcgcggtttataggtggttggagaggcgtttaaagtcgg

SEQ ID NO: 7269 - DNA, 363 bp, Artificial Sequence
  Description of Artificial Sequence: Synthetic polynucleotide
cgcgggggttatcgcgttcgcgaacgtagagtttatacgtggattttcgcgtttgtgatgtttcgattcgtttcgggttttcgtatagataatgtcgcgcgtttttttcgtagttatttcgggattcgcgtttcgcgtcgttcggacgtttttttgcgtttgtcggggatatttatcgatattaggaattttagcgtgtttatatagtttcgttcggttttttggagttcgttgagtacgtatacgcgtaggcgaagttgtttttttaggtttttggcgttttcggcgcggttgttttcgcggttgttttcgtttatggtcggcggcggtgcgtagcgcggcgttgttcgtcgtgttgagcgt

SEQ ID NO: 7270 - DNA, 960 bp, Artificial Sequence
  Description of Artificial Sequence: Synthetic polynucleotide
cgtagaaaacgttgtaggggttaggcgttcgagatatttcgcggggtagtgggtattaggtttaggtttcggttgtagagcggaggggcgtcgggtttaggaaaggggttgtgggtgggggtacgggggagattcgaggggtgttgggaagagggtttttttttttagcgttagttttggtgtcgttgtgtattcggagtcgcgcgaagggcgtttttcgattcggaggtataggagcgtttagagaggaaagaaagaaaaagttatcgttggttcgaatttttggaagtcggagtcgggttttttgttttaaatatcgaggtagaattttttttagcgttgtttcggtttttttgttatttattttcggtttgtttttggaagaatcggttttttagtttttcgtcgtcgtagttgtgatataagtaagtgtagtcgcgttgttcggggttcgttagggtttttcgcgttcgttttttatcgtggttcgcggcggtcgcgttttcgtttcgtttcgttcggtcgtttcgtcggtttttgtttttagttgggttgtcgtgacgaggagacgttgttgtgaaattaaatttgattttgagtttttaggcggcggtcgagagttcgcggttgttgatgtttttgggttttatttcggggtaggagggcggcgatcggcgttcgggaagcggttgaggggcgtcgcgatttttagcgagcgtcgttcgagttttagttcgttcgggtagttttcgaggtttagggcgtcgtcgttaggtacgcgaaagttatttggaagggagttgggtgcgcgtaataatggggttttgagtcgtggtcggtaggggagaggtgtagtcgtttaaggttcgtggcgtcgggcgttgtacgtggagggatgtgttaagggtcggtttgttttttttcggggaggtggtaattgattgggacgtcgggggacgg

SEQ ID NO: 7271 - DNA, 1404 bp, Artificial Sequence
  Description of Artificial Sequence: Synthetic polynucleotide
cgttcgttttttttaggttcggtgggattagattcgaagttaattttcgttaggcgttaggtgtagattttaggttaggttagagtagtttttgggttttcggatcgggatgttcgttttgtttttttttttggtttcgttcggtttgttatagggggaggtttcggtttcgtatttcgggtagcgaatttcgtcggtcgaggttagtttcgtgcgggggtttttcgcgggatcgatcgttaagcggtattgttcgtttcgggcgttcgttcggttttagacgtaggttttgcggtcgtttcgtgataagtatattgacgggttattgttttttgacgagtgttaaaaagttcgtttgttttgaacgttaatttttaagtgatttttacgaggttttttttttcggttttttcgttgttgtttcgttcgtattcggtttttagtaggtgtttaagaaacgtttagtaaacggtagcgtaggcgagtttgttttgcgcgttggcgcgttttattgtttacggatggcgggcgattttacgggattttcggttcgtaggattttcgttttcgaggttgtttttgggtcgggaggggttattttagaggggcgtttattttcgacggcgggggtcggggcgtcgcgggtaggggagggcgtagtttttaagtagttttagtttggtttagatttcgcgtttagcgagtcggtcggttaggtttatattttttatttgtcgttcgttttaggggaagggttttttcgacgacgttcgagtttttttttttttcggagggtcggaggtcggcgtttattggtcggttttgggcgacgtttcgttttttcgacgttacgggttaatgagcgcgcgttgttagtttattagtcgggttggttgggcggttcgggagttcgagcggtggcggagcggcgagtagcgagtagcgtttgcgggagcggtcggtcggtcgggttttcgcgtttcgtacgttcgtacgtttagcggggttcgtattgagtatgggcgcggcggtcgtgcgttggtatttgtgcgtgttgttggttttgggtatacgcgggcggttggtcgggggtagcgggtttttaggtaagttttcgatcgaggtggggggcggcgggcgcggggggttcgggcggtcgaggcgcggtttcggagggtttttttttcgcggatttcgagttcgtttcgcgcggtttcgcgttttttgtttttttgtaaagtaatttttagggtcggttcggggcgtttttttttcgtagttcgggcggtcggggtttttgagttcggcggggtcgtattaggggtgggtgggtcggggtttcgggaggggaagcgcgagcgcgggagcgaggaagaaaggcggcggttttcggggatttcgcgt

SEQ ID NO: 7272 - DNA, 1247 bp, Artificial Sequence
  Description of Artificial Sequence: Synthetic polynucleotide
cggggggtaggtcgcgagagggagaggatttcgggagtagacgaagaagtggagtagttaaagtttgcgttagaagaggttggggattgcgagaggagaggttggggtttgtaggggagcgtagtagtttttagtatcgatttaaattttaaagattcgtggtttttgtttgatttcgagggtcgggaatagacgtttgtttttgtggagagcgatatttaatcgagaaaatggggttgtttcgagttgggttttgcgtttggtttagggcgaggtttttttggtttcgggttggtttttgaggggcgtaaacggtaggtttggcggttggggtcgaggagggagggtattatcgtttcgaggtagtacgtagtttgtagtagaggcgtttgttttaagttgttttttgggggcgtcgtcgtcgtttttttttttcggggtcgttcgtttttaggaaagtggaggcggttggcgaggatcgagagtcggggtcgcgttgcggagggattatattttcgggagttcgagggggattttggcgcggcgggttagtttttgtttttcggttacgggtcggtagcgttcgttttttttcggttagcgtttgcggttcgcgtcgcgcgtatcgttcggtaatttcgcgcgcgtttcgcgggggcgttgcgtttttttgttatatcggcgtatcgcggttttttttttttatattttcggttcgtattattcggttttttttttattttttttattttttttttgttttttttttttatttttttttttttggcgaggggcgggagggggcgtggcggggtcggggtttgtgtggttgggattcggtttttcgtatttcgagttcgttcgaggagtcgggtttcggtcgttgtttagtcgtttcgtgtttcgcgcgttttgcgtcgtcgttatcgttttttggggagacgtagttatttgttcgttatggatatttttagggttttgttttcggtcgttttttttattagttttttgtgggatttgttcggtttttagtaggtttttattttatttttttcgtcgttcgtcgagttgggttttattaagggtatgcgaagtcgtaaggaaggtaagatgtagcgggcgtcgcgcgatagtgacgcgggtcgggagggttaggaattatagtcgcggttttaggacgaatttcgggtttagtagtttcgggcgtaggagtcgttaggtaggggttcgcgcgtggtgttttacga

SEQ ID NO: 7273 - DNA, 1861 bp, Artificial Sequence
  Description of Artificial Sequence: Synthetic polynucleotide
cgtttattgggcgacgtggggaaataagttttagttttcgaagcgcgattaaaaggagaaattaagtttttatcgttagggcgggggagggaagttgggtgtcggtaggcgtttcgtcggagacgagatttttttcggttttagaagcgtttcgttagggttagagagggcgagcgtggcgggagggaagtttttgttttttagcggttaggcgattcgaagtcgagcgtcgtgttatacgtatttcgtttcgttttgtttgcggtattttcgtgtaatttttatgaaaatgttttttcgtttttgacgtttcgcggtgtaatttttattttttaacgaggagggggtcgtcgtaggattgggaatttagtggtcggcgttttagtattttcggacgcgtttcgtgttttttttagtatttttttgagggatcgtttattgcgattttacgtagtgtcggttatttcgttttagtcgtagggagtattaaataaaagaatttttgtaaatttttttttttggatattcgcgggttttttaaatttggtttttatttttttagaatttgtatgtagttaaataggaaagttggcgcgggggggatggtgtgcggaggaagggatttcgaagtttttaggttatttttggtttcgaggagcgcgcggagtggagtcgttttttcgcgggttcgatttaggttttttttttttgttattttttttttttcgttttttttagattacgtagtaagattcgtcgagggcgaagaagttgggagtgattttaggggtttttgcggttagattaaatcgtaattttcggtgtttttattttcgcggatcgcggggtaacgttagcgagtagcgtttttttgaggaagggaagagggggaaagggtgatcggacgagcgtatttgttttagcggattttcggtgtatatttggggattgggggttttttaggtggcgtttttttattttttgcgggtttttttcgtagttttaaatattttaaacggcgcgcgtatttttcgtttggtttatttatcgatttcgtcgatacgtaggttattaagtttaaggtgagtaggatttacgcgcgtcgtatattttttagggatcggttgtttttagtcgttgtttgtaattagggtaaaacgaagttttttgtttagcgttcggcgtagttcgcgtatacgaattcggagtagagtatcgtagcgattgcggtttaggttcggggattcgggttcggggttcgggggcgttcgttttttttttttgcgtttgttttcgtcgttcgtagttgcgtttcgggaacgcggcgtttttttatttgttggtttttgtattttcgatacggagttggtgtttcgggaaggttgttttttgaagttttttttgttttgttgtggttttgttttttcgcggatttttttttcgtgtcgaggtttagtttttggttttaaggaataaattcgttggtttgaaagggagttacggtagaagtttaggggtagagcggcgggagcgcgcgattcgcgcggttggagtttcgggggtatttggagagtagcgcgtttaagcggggttattggtttcgcggttgcgtttttttttttttcgcgtcgcgttttttttttcgggttttttttttttttttttttttttttttttttggtttttttttttttgagtttgtttttttgggtttttttgggcgattggggagaggaggcggtagtgtgatttttagataaattcgggagaaatttttataggattatacgtcgattggtagtttcgaggattagtgggcgtcgcggtttcgcgttgtggttgcgtcggttttgtttatcgg

SEQ ID NO: 7274 - DNA, 3044 bp, Artificial Sequence
  Description of Artificial Sequence: Synthetic polynucleotide
cgtcgagggggaggggttggaagatggcggcggacgtatatttattcgatcgcgatagagtttaggtttttagttcgcgtcgtcgttcgttgttcgtagttattgtgggtagttttgttttgtttcgcgttgttggtagagtcgtttcgcggaggcgtgggattagggtggcgttcgtattttttgttagcgcgttttcgttcgggttcgtttagggagtatttgtgtacggttatattggattttgtgttttagttattgttttagcgcggcgggaaaggagagggtacgtatagagtttgggtttagttttagtttcgttggggtttcggagttaagatgattagcgaggaaattcggaaaggcgttaaggaaaattatatcgtttaaggttcgttatttttattttagtcggttttggcgtttttttttttcgatatatatttttgtttttagatatttttaaaatagttcgggcggtcggcgttggtcgtagttttcgtggtttgggcgtcgttagcgggagggagggcggcgaattggggcgcgtaggcggtcgtagggtagtgggcgagggggcggagggtagggagagaggcgggaatatggagttaggtttttatttgagtacggattgtttttttttttttttttttttttgtttatttatgacggttaggatgattttttttttttttttcgtgaggtggttgaggttaggtatttcgggttgtagaggcggttgagaggtcgtcgggatgggagttaggcggtttcggggttcgataggagtcgatatgtttggtggagtcgaattattttagggaagcggggaggtaattttattggtagcggcggtatcggcgcggcggttggggtagtttttagcgttgggataaatatatataaattaatggtttttaatttaaggcgatagttttttttttttaagaaaagtagggggaggggagggcgagcgcgtggggaaggagggttgaggagtgcgtttcgggaaatgtttttttttttcgggggcgaagggttgtgaagtgagcggtttaagggaaaggggaattggaggtcgggacgcggagtgcgcggagaggcgggggagggtggtggagtaaggtggcggggatagttaagggtggggtgattggagggagtaggcgggagggcgataggcggatcggggcgcgagtgtgttcggtcgcggttagggtcgggagcgcgcgcgtcgtttcggaggggaaggggtgtttgcgaataagttttcggggaattcgtttcgagcgttcggaggcggagtattgtcggttcgaggggtatttaggcgggagtcgagagggtcgtgaggaagcgaggacggtttttcggagaagtaatttattcgtttcgtcggttgacgtattatagggttttcgcgcgttatagagggagaatttttttaggtatattcgggagcgggtcgcggggtcggaaattttcgcggagattttaattttatttattttattttcggttagagtggagaagcgaaagcggagaagatatgacgggggttagcggcggagagtttcggggttagggtttttcggttgttaacgttcggatttaggcgagtttcgacgtgtagcggggtttggcgtcggtttttttttattacgcgttcggtttagggtcgtttagtcgtcgttatcgtcgtcgttttttgggtcgatggagtcggcgcggaaggttcgcgcgttttgcgtcgtcgtcgtttagtgtcgtcgttagtatttttttcgttttttcgtttttcgggtttatttcgcgggggcggcgttattttttcgttgtttaggttcgggtatcgcgggcgtttcgcgggcggtagtcgtttttttcgagcgcgatttttaggttgggttcggggtcgggcggggagggaggagagattgagcgtgaagggagagggcgttcgagttttcggggacggaagtgtggagaataggagcgtgtgagggggcgttcgaggtgtcgggggcgggggaagagtatgagtaggggtgggggtaggggtgttaggtgtagtaggtagggaggtagaggcggcgagtgggggcgttcgagggatcggggcggggcggggagcgtaagggtggtaaggcgttcgagagttagggttggagttgaaggtgggtgatagggagggggcgtttaggtgttaggatttgaggagaaagagtgcgcgtagcgggagggtttcgaagtgtcggggcgggattttggaaggagggagaacgtgaggagggaggaagggtttttggggtgttagggatgggggttaggaaaggggtagagagttggaggtttataagtggggatagcgggggagggaggttggagcgagtggggaacgtaggtggtgtcgagggcggggatagggcgaggggagcggggcgtgaggaagttgtgggaaatcgcgttggacgttgagaatgtgcggaaggattttgaggggaggacgcgagatagcgcgaggagagacgaggagagttagggttggtcgggagggtgcgaagatgaagcgattattggaggttgtgagggtgaaaggagtaagaatcgtttagagacgggttgggtcggtgttggggttaaaggtttttgtttgttaggttttttttggcgtttattttagaaagaagaggcggagacgcgaagagatcgggttagagttagattttcgaagtacggagatgggtttaatgaaaggacgaggaaagacgagaaattagcggtcggagaacggaggtggtcgtcgtcgttttttgttttgttcggggttgggcgtcgttcggagagttttttcggagggggcggggcggggtcgggtgaatagagttgggcgggttcgttagtttttttaggcgttttgggtaagtaatgtgggtgattgagttcgggtgtgtgtgtttgtgtgtgtgtgtgtgtgtgtgtgtgtgtacgtatataagtgagcgtgtgtgcgtattttatttagttttttatacgcgcgt

SEQ ID NO: 7275 - DNA, 1603 bp, Artificial Sequence
  Description of Artificial Sequence: Synthetic polynucleotide
cgatttgatttttgcgagcgtgtttgtttcggaaggtgttttttgattcgtcgtgttttttaagtattatcgggattttcgggtattcgggggtttagggttatgtatttttttgcgcgtttatcgttttgaatttatagttttcgcgttgggaagtgattggcggttttttttagggaggatttcgcgcgttattagggttagatattattcgaattttcgttcggttgagcgttttggcggcgtgagtcggattcgttcgaagttttaggatacgatttgttagttattagttcgcgttcgtagggtagagacgtacggtcgttcgtcgtagaggcgcgaatttttatatttattttttgtttcgtttcgggtttggtgtggttttggtatcgtttaggatcgggattttgacgttttgattttttatcgcgtggggaagttatttttttcgtttcgaggtttcgatcgtttagtttttttgagaagtttttattttggttattaaaagtggtttttaagagtagttttacgttaatcgtataaagtaatgataataataataataagcgtttaaaggagcgggattgttttttcggttggacgatagcgtcggggattcgtagcgtgcgcgggtcggaattaaaaaagtagttcgggagcgcgagggttgagcggggtaagtatgggttgtttttcgtagttttttttttgttcgaggttcgggttggtcgtttgtttgtttatgattgtttagttgttttttcgattgtttaggtaaagtttgagatatttaggggatcgggagcggattttttttagtttcgttatttatttatcgttttttcgtttcgcgtatttcgtttttgggtaataattttattaattttcggtttcgcgcgtaaatttacgtttgatttgtcggggtttgttttgttttcgtcgggatatttcggcggcggttgttgtcgttggggttttcgcggtgttcgcggtcgcggttgtcgttttttcggttttcgtcgtcgtcgtcgtcgtcgtcgtcgttggttaggttcggttcgtcgtcggtcggattttaggtgtttcgggcgttgggttttttcgggagtcgcggatttacgttcggagatgagtaagtaaatgagagaagagagacgggggtatagagagtgtgatagtgaggaggggagggggagaggagagcgacggggggagaatgggaatgtataagcgaacggttagggagagagaaaaggggaaagagaagagaaaaataatacggaaagaaggaagagaaggagggagggacgggagagcgagtagcgaggagagggggagcgcgggggcgtagggcgcgggaggaggagcgcgttcgttcgtttttcgtttcggcgtgcgggacggatatttcggcgtcgtcgtcgtcgtttcgggtcgcgtagtttttgttttgcggcgggaggcggcgaggcgcgcgagggaggggcgcgtcggggttgtggggaggggagattattttattagttaaaggaggattggttgtatttaaatttagttcggatgtaaattacggtttcggttttggtcgggcgaagtgcgg

SEQ ID NO: 7276 - DNA, 1365 bp, Artificial Sequence
  Description of Artificial Sequence: Synthetic polynucleotide
cggtttgtatttttatcggaaagtgcgtttgttatattttttcggattatttcgttttttcgagagcgttttgttttttatagttcggaaagaaagaaattttagttgtgaagtgatcgtggagaaagcgtaggaagcgatataattggttagggaggtagagagtgtgagcgggcgtattttttgtttggggatcgcgttcgcgggcggggacggagtattttagtggttgtattcgtcgtttcgcgtttttgtttggcgtcgttaatttcgcggcggtcgttggaattttagagttgttaggcgtttttagtcggtttcggtaaatttttttttagtttacgtgttaattaagcggttcgtttttcgagttcgggatggagtatcgcgtttagggaggtcgcgtcgttcgagacgtgcgtacggtaggtaatttatattaaggtagtcgtagttgcggcgtttgggtatatcgtcgtggattttaaatggtttaagagcgtttttttagttttgcgtttttagtgtttttagagttttttttttttttcggagcgtcggtataacgtattatgtcgttgggtcggagtttagggttcggtagaggttgttaatttattgattataattatttttttttttaattcgttcgtagttgttcgttttggattaagtcgtttcgcggttcgtgttaggtagtgggttcgtttttttttttttttttttttttaaattgggacgtgcgaaggcgtagttgttttttcggggttttttttattttttatatattttgttttcgttttttgttttttaggttcgtggcggagagatgttgatcgcgttgaattgatcggtgcggttcgggggtgagtggcgagtttttttttgagttttttttagtagcgcggtcggcgtcggttttttgggcgaattttttagtttttagattttgagaggcgtttttttttcgttcgatcgtttagatgtagtttcgtttttttttttttgtttttattattttgaattgtatggattatagttattgttaaggtaatcgatggagacgtagtaagcgaggtgggtttttttttgttaaaggtgcgtggtgggttttaggggtggcgtgtggaggcgtttatttacgttttggtttcgggggtttagatggttagggttgtgttttttattttagtttttgcgggtttttagtttttatttttaggattttggagttttataaaatattttgttttttgtattttggaggcgcggggagtcggagcgagacgcgttgggagttcggcgagtcgggcgttaatcgggcgtttagggttaagtcgtgcggttcgtatttatgttcgtcgt

SEQ ID NO: 7277 - DNA, 419 bp, Artificial Sequence
  Description of Artificial Sequence: Synthetic polynucleotide
cgtggcgggcgttgtttattcggcggagtcgagcggcgtgtagaggttataagtgtcgtagttggtgattgggggatttttttcgggaatcgtgtcgggagagcgcgcggtgttggagtcgtatcgggtggtcgaagtagaaggtgagtggcggggagtgggatggggtggaggttttgaatgtaagggtgagagttttggagtttagtagagttggagcgtatattttcgttttttttttttcgttttcgagtattaggcggatatattcgtatttcgaatgttttagtgggcgtagagtttattagaaatggatagtcggatttttcggcgtttgttgggggtatcgttgttaggtgtttggggttcgttttttcggttttgttcgtatagggcgtatttagaggtcgttttttcga

SEQ ID NO: 7278 - DNA, 3675 bp, Artificial Sequence
  Description of Artificial Sequence: Synthetic polynucleotide
cgtagcgaggtcggttgcgcggtcgtcgcgtgggtcggagtttagtgttttttggtggcgtcgaggcgggtaggcggttttcggatcgcgcggaggttcgacggttgtgatttaggggtggcgtcgttgttagggcggcgggaggtttgattggggtttcgtcgtgggttgagttacggcgtaattaattattagttgttgggaatttttgtcgttcgttcgcggtgatttattcggtagttaggtttatttgtcgagcgcgggggttttggtttttaaaatgaatttggggagagtgtttgttcggggtagggtttttcgttttttcgttttagggcgttcgtagatttagcgaggatttgacggtttagacgtagtttatagcgcgggttttttttttttggtgggtattcgtgatttttgaaagtggggtgtagagcgttttagttgggaggtttcggtgaattattggggttttagattttttgggttcggggtttttgaggttagggagttcgagtatcgttttagggggcgatttatagaagggattggttttttggagttcgcgagttgttcgagggttaggtttgattttttagttattttttggttagttgttagtttgtcgttaggtaatttttttttatttttattttttttttggttggggttaggagaggaagaggagtttaggggtttttgaggtttgggtttgtttttttggagttttagggttttaggcgggatttaggaagtcgaaggttaaggaaaagtttttcgatagtttaaagggagagggcggggagggggaggaggtaaaggaggttaaaatgggaaggagataaagtttggagagggtttatttggaagtagggaataggtgcgttttagttcgagtttcgtgtttttattttaggtggtttcgagggggttatcgcgtggtttagggttgtatttacggcgtattttgcgtttagttgtggggaattaaagagtgattatatatattaaagagtgattatatatatatatatatatatatatatgtgtgtgtgtgtgtgtgtgtgtgtgtgtgtgtgtgtgtgtgtgtatttttttttttttttttagtaaagtaatagagaggttattgggtcgggggattgcgatgttttttttcgttgttttgattttaaaagtggcggtttatgttgtttttagcgttttttagggaaacgattcgggtttgtaggtgttggtttaagcgggttgtgtcgttgggaggcgagggggtcgaggtagttttcgggattttattattttacgaggttatgtttttggttaatgatacgttttcgcgtcgggtggttaggtggggggtggggggtggggaagatttcgtgaatcgttgttgtcgtttttttgtgtgtttatggttttttttttttttgttttttattttttgtttaatttgtttgaagttgttagtttgttatttttggttgaatttcgttttttttttttaatttcgagttttttaaattttttattcgttagggttgtttgcgtttttggggagcggggttagaaggatttaagaagtcgcgtttatttttttatttttcgttaaaattcgtcggcggtttcgttttcgttttttttttggcggtttaggtcgtttttttcgggtttttttcgcgtgcgttttgcgtcgcgttgggtttgtagcgggagttgttatagtagtttcgttagttggttggggattaggcgggaggtggcgcgttttggaggttgtgggagggagggagggagggaggttcggtttcggcgtagttcggttttcgtttttcgaggttttttcgtcggagcggggttgttaagcgtatatatatatatatatatatacgtatatatatacgcgtatatatatattcgggtttttaacggcgcgtacgtacgtagcgttcggggtagattagcgcggcggtcgtttttcgggacgttcggacgtcggagggtttcgattttcgcgcggtttatgcgttcgcgttcgtttcgttgtttcgcgaggttcgcgggatttttttcgtcgtcgtcgtcgcgttcgtcgttttcggaggagcgggttggtcgatcgttatcgcgtcgtttttcggtcgttttcgaagtcgttttatcgcggtttttgtcgttttggggtcgcgtttcgttttcgcgttttgggggttgagtcgagtaaatttcgcgtatcggtcgacgttcggcggggatttcgttgcgtattcgcgcgttcgggtgggcgttgggcgcgcggatttttggggagcgggttgtttttttcgttgtatttgttcggtttttttttcgtttgtaggggattttagagatatcgttatttcgtaaattttttttttttattatcgagagggggcgaggaggggtaaaaggggaagtaggtttcgttgggcgcgcggatttgtaggttttttgttgggtatcgttattcgcgagttggatttataggggtatcgggtttcgcggtcgtttttcggtcgttttttggtttcggttttcgtttttgcgtttttcgcgggagcggggggcggggtgcggagggtagtaaggttcgcgcggtatttagcggggtcgttttgtatggttttgcgtagtggggcgggttgtttcggtcgggtttggcgtagggtgtcggggttttcggacgtttggtttcggcgttcgagtagttttttgtgtttgttcgttttttcggttgagttcgggttcgcgtcgtttttgtttcgttagtcgtttcgcggtggcggtggttgtggcggttttagcggagggggttttttttagttttttcgtttttcgtttttttgttgttgttgttgttgttgtcgtcgtcgtttataatttggaggcggcggcggcggcggcggaggaggaggcggcggcggtcgtcgggcgttgtagtgggacgcgcgcggttgtgagtttgcgggatatgtttttcgcgtcggttttttgttggcggttatgaagaggtagaacgtgcggattttgttttttatcgtttgtatttttatttatttgttggtgggcgtcgtcgtgttcgacgttttcgagtcggattacgagatgcgcgaggaggagaaatttaaagtcgaggagattcggattaaggggaagtataatattagtagcgaggattatcggtagttggagttggtgattttgtagtcggaatcgtatcgcgtcggcgtttagtggaaattcgtcggttttttttattttgcgattacggttattattattataggtaagggttgggcgcgtcgttgggttttcgcgtttcgggaggagttcggggaggcggttgagcgcgtcgcgtcgggttgggtgtagggcgtcgagggttaaacgtagttttttttgggggttttttcgtagcgtttttttttttttagggagtttttttttcgcggcgttttcgagttttatttttcggggattttattcggtgttttttatcgcgttggtgtttgggtcgggcgtgcgagtttcgagcgagtgtgtttgagtcgggagggcggaggcgttatttttgcgaagagagtggagcgttaagaataattttatagtagatatttatttatttatcgtttcggcgcgggttgggttgcgcgg

SEQ ID NO: 7279 - DNA, 3675 bp, Artificial Sequence; identical to SEQ ID NO: 7278
  Description of Artificial Sequence: Synthetic polynucleotide

SEQ ID NO: 7280 - DNA, 3378 bp, Artificial Sequence
  Description of Artificial Sequence: Synthetic polynucleotide
cgggtcgggtcggcgaggggggtttcggtcgagacgcgaggcgcgttacgggattcggcggcgggagcggatggcgagcgagcgagcgagcgggcgggcgggcgggcgggagggaggtggcggtcggggttgtttaagatggggtcggagtcgcgggttaggcgcggaggagacggaaggggcgggtagggtcgcgcgggcgcggtgcgggcgttttttttcggtagttagcggtagcgcgtcggtttttcgtttttcgttattgcggtttcgcgtcggtcgtttgggtttggagtttcgcggcgttttcggaggacgggtttcgcgttttacgatttattttcggaggcggggtcgggtcgatcgggggcggaggacgtcgtaggaggttgttcggatttcgggcgtttgttaggttttttttggggttttttatgttaggtttcgcggttgtgttcgtaagcgtagatggtttcgggattcgggttattttgacgtcgtagatttagtacgttgcggatcgggtacgttggatttcgggataagtgcggagggtcgggggttggaagggattcgagagtagagttcgcgtttttattttacggacgcggttatcgaggttcgagaggggtcggagtttgcgggagagggaagggttttcgagggttttataatttggttgcgttttttttttagttcgggattcggatgagtgttgtttgaggtcgaggcgacgaatcgttttttattcgtttttgcgcgggatttcggtaggaataagcgttcgtttttgggatcggaggcggtaaattttaggttcgagttttttagcgtagcgtttattcgcggagtcgcgcgtttttttggcgtatttttgggtttcgcggttcggtttttagtcgtcgggtttttcgggttagttttttgttttttagatcgaggcgtaataagtttgaaagtagcgttaaggagtagttagcgagtcgaagggagggcgtggggcgtcgggcgtttcgggattttcgaacgcgcgtaacgttcgttttcggggatcgggcgcgggcggtaggcgagcgggattgattcggcgggttgcgtatatttttttttaaggtttcgattgtgcgcggacgggggcgcgtttaggaattttcgttttttttttcgtttgtttgattttgttgggtatttaaagtcggattcggcggtatttcggcgtgcgggcgtagagtttcgttgtcgtttacgggagggagcggttcgatttttttcgttgttttttcggtagtcggggtcgtagacgagtggaaggtatgagggttttaggagacgtgatagtcgtttttttagattttatatatcgtatattattttttttttagatagaaaagggatttagtttttttttttttcgttttcgttcgcgcggtttttgttgttttttcgcggcggttttcgtttcgagggggcgtgtgtttgtgtttgtggggagagtatcgagggttttcgtgggtttttaggatggagcgggagagtagattttttagttttttttttaatataaacgataagcggtttttttggggcgggagtgtaggttttttattcgtttatacgtttttttgttttttaattatttcggagttgtagtttaggaatttgcgttttagattcggaggaagaacggggaggtcgcggcggggacgggtgttgaaagagggttggtttagggtttttcgggttttagtttaggcgtttgcgttttaagaaatttagaagtttaaaataaaagtggaaaggggtaaggtgtttagcggtttggggttggggtgttagattaggcgttttttttaggttgtcggggagtggttaagtaggagtcgtcgcggttaggaggagggacgcgggttcggagtcgtagttttcgttaagttttttcggtcgtatcgtttcgcggtgatttttagtttcgtcgttttttttcgaggtcggaggagttttttatttcgtttagggggtcgcggggatttagggagagggtttttggtcgggtttagagtttttagtttttttaggagggggcgggggtcgtgttcgtttttcgaggtagtttcgcgcggttttaagttagcgcggcgacggtggagggtcggcggtttttgtttatcggcgacgcggattcgggagtgttcggcgttcgggagtgttcggcgtttggagcggagacggtatagggtcggtttaaagttgagagcggtttattcgcgcggtttgttcgatttagtggaaaggtagataaggagggaagagttaggcgttcgcgtgggggtggggggcgtaaaaatagtttttcgttcgaagtgggggagagtatttttagggagtttttattgttaatgttaggtttataggcgagggtttttacgagcgagggtttcgagaaggagtttggggtttttttttgtttgtttcgagttttgtgcgtggggggaggacgtttcgggtttttataatgtttgtagggggttttggacgtgattagtaggagggggatacgttcgggggtttttcggagtttgttgcgtttatgtgtggttgttgggggttatggggggtttttttagattttcgttagcgtttgtgtgtgttgggggtatagcgggaacgttttttttagtttgttttgtgtatgtgatgaagaggggtgttaggttgtggtgtgtggatggggaggaggcggcggcgtcgaggagttttttttgcgtttagggtcgttttttttttagtttgtttaatgcgggttcgcggggatttgttatattttatcgttatcgttggagaaggtagggggttgagggggtagggggtgggggtttaaatttttgagttttgagcgtaaaatttcggagttgcgaagttttaaacggcgaagttaggaagtttgggcgttcgtttttttttcgatttttttttattttcgttgcgtttttattcgtcgcgtttttagtttttcgttggagttttttttattttttttagtagtagcggtttcgtcggcgaggattcgattcggcgagttgtaaattttcgcgagcgtttcgcgtcgtcggcggttgagtcgggcgttcgatcggaggtggggggggtttttttagtcgtcgtcgttttcggttcgttttgggtttcgtcgggacgttttttggagagtattcgtcggcgtacgtaggttttttttcgttttttcgcgtttgttggagtttttcgggcgttcggagggttcggatgttcgcgttgcggacgatgttggcgcgcgggttcgggtcgggttaggacgcggcgcggtcgtttgtgttttcggtttttcggtttcgcgttcgt

SEQ ID NO: 7281 - DNA, 1108 bp, Artificial Sequence
  Description of Artificial Sequence: Synthetic polynucleotide
cgggggtttcgattttttttaggttcgtttttaattttatattgttattcgttcggcgtttatttattttttttagaggcgtatggatttcgtcggtcgggttaggttacggcggttgcgggttatagcgattttttcgggataggacgggtgcgggttttttttattcgtaggttcgtcggtagttttcgttcgcgtttttgttcggcgtttttttcgtcggttcggtcggggttttatcgcgtcggcgttgagttgggttaagatggcgaaggtggagagtcggttatagaggtagcgcgttcggagggcgtcgaggggtatcgtgcggtagtcgcgttacgattagggttcgagttgcgggggggcggaggaggagggtttgggggcgggcgggatacgggagggagataggcggagcgttagcggcggcggggacgcgggcgtttcggttttcgagcggcggtttcgcgtttcggtttcggtttcggttcgtcgtttcgtatttgcgttcgtagtcgcgcgttcgttcgttcgtcgtcgttaggtttcgcggttcgggcgtttatgtcgcgttttgcgttcgtcgtcgtcgtcgttgagagtcgcggagcgtagttcgagggagcgtcgggcgggggagtcgagcgatcgggggcggggcggggggcgagagttggttcggggttcggtagtcgttcgtttcgcgttttcgtcgtttttagttttttcggggttcgcgttttcggttcgcgcgggaaggagggggaggttcggaggggcgcgtgggcgtacgtggagcggggagggtgcgagtcgggtgtggtttgggggcgcggggcgggttcggagcgcggcgagggttcgtttcggagtttttcggtttcgcggtttagggcgtcggttggagttgacgattttgggatcgttttattttttatatttatttttttcgggttttattatttttggtgtttgcggtttattttttgggatagatatagtttttttcgcggggaggtttgtcgttggaaatttttttttgcggtttgatttagtcgttcgttgtttacgggtcgcgattgtttcgttttttatttgagtacgt

SEQ ID NO: 7282 - DNA, 1700 bp, Artificial Sequence
  Description of Artificial Sequence: Synthetic polynucleotide
cgaatatttatacgtatatatatattcgggagcgtacggacgagttgttttttttaaggttatttaaacgttttaattattttcgggcgcgtaagtttaagcgcgggagttaggatttatcgttaagacgttttgggcgaggaattttacggttattgtttttagtagtagttatttgtatgggaaagggaggaagagagacgtgaacgtgcgggttcggtttgttagttttcgagagttatatcgaagggtttatgcgcgcgtgatttacggggattaggtagaaagtcgtttatcgtcgtagggtagggtcggttatcgcgcgttggtttttttttatgttggcggttcgtttattttgggtttcggttagttttatttagtttagaggcgatagataaagcgagtttagcgtaggatgagggaggtagtttatttttatcgtcggtttcggttcgcgagacgcggggatagcgcggtgcgcggttcgtatgtaggggtgatcggagggtcgttttttttacgattcggaaagaaggagagtttttcgttaggtttttgtgggtgttttttggtcgaggagttcggttttcgtttttttattttttttttttttatttttaagtaggagagcgtgtagttttagtttgtataaggcgttttaagtcggtgttttcgggttagggtttgggcgtcgttcgggggtcgtttttatttcgggttcggttttaggggttgttgttcgaacgtattggtttttttagaagtattcgtcggcggtatatcggtagggcggtcggttttgttgggttttttgggcgtcggtttcgggggttcgggcggtttttttcggttttcggtttggattcgcgaacgcgcgggcgcgaggggttgggacgcgggagttttttgagtgcggagcgcggagttttggtgtttcggcgtattgtagttatattttcgggtcgcgcgttttcgtcgttttttattcgcgtcgtagggtttttttttttgaggcgtcgttcgcgtatcgtcgggggggagggggtagcgttaataaattggggagttcggttcgtcgcgtttaggttttcgtttggagtcgtcgtattcgggacggtgcgtagcgttggaagttcggtttttcgagagttagttgttcgtcgcggttttcgtacgtcgggtagtcgtttttcgtcgtttcgggcgcgttattatggggtttcggtttagcgtttggttgttgttgttgttcgtcgtttttttgttttacgaggagtatagtcgggtcgttgcgaaggtgagttttcggttagtttcgttttcggcgtttcgtttcgagtttgggcgtttcgagaggtttttttgttcgcgtttggattcgttcgtttgtttttcgggggtcgcgcgtggtacggttaggtgtattttttgggtcggggttcgttgggggtttttgtaggttacgatcgcgtattggtggatcgagttttttttgttatggtatgggtattggagagttaaggaattttttcggggaagggaggagaaatagttcgcgttgtggcggggtgagggtgtttgggagtcggcgggatttgaattcgcgtcgcgggtatgttcggtagttgggcgtttttattcgtttcgggtgcgcgagggagttgggggttggagggtcgggagcgtttatttcgcgt

SEQ ID NO: 7283 - DNA, 692 bp, Artificial Sequence
  Description of Artificial Sequence: Synthetic polynucleotide
cgattcgcgatcgtatattttgtagagattcggtttcgtttttgtatttttcgtagatttcgttttgtgattatatttttcgttttttataggtattggttcgcggtcgtgtacgtttcgtttttattggtttcgtttcgtgattacgttttcgtaattttgatagattttattttcgaggattttttttaggagtatagtgatttcgtttttatagggttcgtttcgttatattgattttttcgtgtcgttcgcgggattttatttttgttcgtttgtttcggtgtttatggggaagtttggtgttaggggttattagttagtttaatttatcgttcgattggtgggataaggataggttagcgggttataggtcggaagtgagattcgttcggtcgttttgggacgcgggaagatcgaggtttcggtggtttttttttttttcgtttggtttttttaggagaaggagcggttaaggtaggattcgatatcgcggtcgtattcgtttttttttttgttttagagtatagtttgggatttttaggggggagattgaatgagtgttgtcgaggatcggcgagagtttggaacgttcgcgttttcgtaggagaacgaggaggtgacggatagggaacggggagcggtcgttgggtgggacgtttgagattttcgggaaatggtcgggtcgtcga

SEQ ID NO: 7284 - DNA, 1924 bp, Artificial Sequence
  Description of Artificial Sequence: Synthetic polynucleotide
cggcggagtaaattgaacgttatttttcgattaaataggagtttcgggtttatttgtttggaagtttttaggcggtttggaggggttcggttttcgggcgcgattcgtaggggttgttttgttcggttcgcggaacggacgtttattcgtcgtagttacgaatttattaacgatattaagtattggtcgggtagattaggcgtcgtggaggcgttttagttttttagtttttcgtaacgacgcgttttaggggtgcgtagtgtttggcgcggtgatcggattcggtcgttttttcgatcgcgtagagcgagaggttatattttggattttaggtcgggtttttgcggttttgggagggaggtttcggacgttttttagatttcgggtttttgtaatttcgaggtcgggttttaaaattacggttttttcgagttatacggagagttcgtggttaagggttaagggcggttttcgattttcgggatcgtttttttgagaaatggttgagagttaagtttagagttgcgtagggaagggagttaaagagttggcgtcgagcgcgaagggtcgggaggcgcggggaggttttttattcgttttattgttttgttcgttaatgacgtcgatgatagcgatagcgtcggtcgagtgttttttttgtttcgggtcgtttaggtatcgggtttttttttagtattcgtagtacgtattgaagaagacgttacggaagttttcgttttttagattcgggggaattaggaaacgcgttcggcgattttcgggtagtagtatcgggttaggtttgttttcggaatcgttgacgttattcgtcgtttttttcgtttgggtttttcgcgggtcgtaggggtggaagttcgatttgggttagggttcggatttttttttttcggtttttgcgtcgtcgttttcggtgttaggacgcgttttgttttcgtcgagatttagacgcgtcgaaagtttcgcgcgggtagtttttcgttttacgtttcgggttgcgcgttttttcgcgaagtttttgtcgagtgcgcgcgacggcgtcgtcggattttttcggatcgcgttttcgcgtacgtttgatcggagtatttcgttttacgggggcgttttgcgcgtttttttttttcggtgcgattttcgtttttttttttttcgcggtttttaggagtttaggtatttttcgacgtcgttgtcggcggaatcgggaatttttttcggggttttttgcgggttcgaagtcgttttttcgaggcggcggagttgggtagtttcgggtttcgcgtcgtttcgcgtcgtttcgcggagtcggagttttttttcggagtttggatatagtttttcgtttcgtcgtcgcgtattggatttcggtagcgtggagtttgttcgggaagttgggttgcgtcggtttggggcgaaggtttaaggggcgcgggggtcgggacgcggggttgtggcgacgatcggttttttgcgaacgtttaggtcggcgggttcggggttataggttgggagtggagttggcggttattggggagtagagaggacgtttaggaataggtgtattagggtttcggcggttgggtcgagggtcgtaagtagaggggatcggcggttgttagtaagttttaagtagatgttttcggcggggtagtcgtattttatagcgtttatttcgcgtatatcgagtatttaaaacgagtaaaatcggtttatacgttggaatgtagtttatgattttaaaattttatttttaggttgtttagattatacggtttcgttttatttatttttattgaataacggtcgttggataatttagagaagtagtagaaattacgagaaaaatagtggagttaaacggcggtaaggatcgataaggttggcggggatattgagtaaacggcgg

SEQ ID NO: 7285 - DNA, 1991 bp, Artificial Sequence
  Description of Artificial Sequence: Synthetic polynucleotide
cgtttagtttttatttacggagggcgaagataaaaagcgttttaggcgcgtagggaaatcgcgtaacgttgtgtttattgtagcgatttttttagaaaaataaataaggtttttcgataggttattcgcgtaagtagtagtcggtcgagtttttttttttcgttaatttagtagttagcgttgtcgttttttaagattttttttaatttaagtgtaatttagtaaggagggagagttagagattttggggacgttcgaggaaatcgaatttcgaaattttttgtttttaaggcgcggtcggagatttttgggattttaaagcggagagaattttttaattttttgttagaagagcggggttagagatttttgggatttttttggagtcgaatttttttttttagttttatttcggagggcgggagcgaagattttgaagatttttttagcgtaataaatttttttaattttgttggaacgcgggttttgggatcgcggggaagtttagaggggcgaatttcggaattttttgttttgagagcgggattagggattttagggattcgggagtagagggaattttcgtaatttcgtcgaaatatagggtgagagatcgtggggaatttcgagtcgagcgaagttcgtaattttgttcggcgggcgggattagacgcgttttcggcgtttttagatcggcgatgtagcgtggtcgggagtttaggattttaagcgtcgtcgttgtcggtaagtatcgtcgtatttttttataatttaggattcgtatggtaacggttatgttggggggattttatttaagaaattcgggttttgtcgggagcggtggtttacgtttgtaattttagtattttgggaggtcgaggcgggtggattatttgaggttaggagttcgagatcggtttgattaatatggtgaaattttcgtttttattaaaaatataaaaattagtcgggtatggtggtgtgcgtttgtagttttagttatttgggaggttgaggtaggagaattgtttgaattcgggaagcggaggttgtagtgagttaagatcgcgttattatattgtagtttgggtaatcgagcgagattttatttaaaaaaaaaaaaaaaaaaaaaaattaaggttgaattcgggttttcgtacgttcgtatttatttgcgcggttattacgcgttgtttttcggcgattaggttgtattttttgtattggtagtcgcgttatatgtagaagcgtttgtggtttttgagcggcgaggcgtagtcgtggtttttgtagcgtgcgtatttgggtagtcgcggggattttttgttttcggtatttaggttcgacgtttcggagtcggagtcgttttttttgttgttgttttcggcgttcgagtcgttggtcgtttttattagcgttttagacgttttgttaaagttttcggttttgttttgcggcggtatttcgggggcgtgaggggttttcgacggtgtagagggtttgttgaatgtttcgtcgttgggtatggtgtttttaggagaagtgcgagtattttggttttttttttcgtttggagattgttgcgagggatgaattcgacggatagcgacgtttcggaggaggaggcgtaggagacgtgtgcgttgtagtcggaggcgtagttggagtggcgaggtttgggtacgttacgttcggagtggtggggggttgtgtttttttttttggcgcgcgcgcgatttagaattttcggatattttttagaatattttcgggattgtttgggagggagcgtggttacgtttatcgtttttcgattttagttatcgttttttagttgtttgtaaatttgtatcggttgtaagtatttagggttttgttgtagggtttttgtaagcgtatcgagagatatagagcggtttgggaatcgcgtggtatttttcgtttcgttttcggaggcgttaagattcggttgttaaagtacggtgtatcga

SEQ ID NO: 7286 - DNA, 1667 bp, Artificial Sequence
  Description of Artificial Sequence: Synthetic polynucleotide
cgattttatcgtagtgagtgtgcgtacgtgggttttaattttgttttgttttaatttcgttgtttttttgtttaatttgatacgtttcgaattttttaatttgggaaggtatttggcgatattgacgtatagtttcgtcgtttggttgttcggaggcgttttttttgcgggcgcgagtgttattcgcgttgggtttagatttagtcggtttttttcgggagaggaagtttcggtttggcggagagtaggaaggaaagtttcgataggtttacgttttaaaattttgtttttagtttttttaagtggagttgtagttggtatttcgaagttgttttcgcgttcggttaaattttcgtattttagacgtttttatttggtttggcgagttgcgtttgtagagtttcgggttgcggttcggtagtttaacgtagtgcggcggtcgcggttaattcggtagtagggcgcggcggttgcggttgcgacggttgagaggttggcggcggttgcggggcggcgacggcgtttttcggcggcgggggttttggtagagcgcgtagcgagtcggggatgaggttttttaagttttcgttggtttgttgtcggcgtagcgttatttgcgtagttatgattcgttgtcgttcgatgatgaggatgtatttttcgtaggtgtagtttttgaagcggtagtaacgtttgtggtttttgagttaggataggacgttatggttgcggtagcgcgcgtatttgggcgtgcgttgtaggggcgttcgtggcggttgcgatatcgggtcgtttatgtataggtagggggagtcgtagtcgtttatgtttcgggttttcgaatgagttggtagtttggttgcgggagagggttagggagcgttggacggcggggttgcgaggttcgtttaggggcggttttcgggcgacgcggtttttggtttcgtagtttcggtggtcgtgtgtgtttcggggcggtcggaggtgtcgtagtcgtttttttagtttttttcgcgtttatagttcggttttttagtttacgtttagttaacgtcgacgcgggtttttgttttgggcgcgtagtcgggtcggtacgttttttttcgcggaggcgttgcggcggttgtaaggagtcggcgatagttttgattaaggtttgagttagtttttttgtagttttttcgtgagtcggtcggatttaatattttcgtcgtttttttttaatttttttttttttttatcgttattttcgtttttggggtttttgtttttttgtatttttcgttttacgtttttttttttttttgcgtttttcgggtgtttgtattttattttttttgttatttgtagttaggttattttcgcgggggcgttcgcggtttttttttttaagtttttttcgttattttagttcgcggttggagattgcggcgttttagaacgcggcggtgttcgcggggcggagaaggggaggattagcgggagtgagggtgggggtgtttgtaagcgagtgaggtggtcgtttcgtttttttttttttttttttttttagtttagatttggtcgcgttttttcgagtttaaggtcgtttttatttcgatatttggtcgtagaagtttagtttcgggagaattcgaatttacgggagtgttgcggttgtatttcgg

SEQ ID NO: 7287 - DNA, 433 bp, Artificial Sequence
  Description of Artificial Sequence: Synthetic polynucleotide
cggttttttgtagtttcgggcgttttattttgttgaggtcgttttcggttttttttgatttaggttgggcgggaaaggtcgggtcgttttcgtttggtttagatcgttggtttattcggcgggcgcgcgtagttgtatttagcgtagcgttattggttttagtttgtagattgcgtttttttttttagtattgttcgtttaggtttcggagttttacgttttttgattggtcggttgttaggcggtgtgaatattgattggtcgaggtacgttggtagggagtttttcgtttttcgcggtttatatttttttttttgaagcgtttcgttagagttcgtttatcgggttttcggtgtagtcggttcgtttgtttagaatttaaattcgaggtatgacggtgtttgtaagagagaagttattatttatttcgcgg

SEQ ID NO: 7288 - DNA, 896 bp, Artificial Sequence
  Description of Artificial Sequence: Synthetic polynucleotide
cggttttatattttggcgggcggcgtacggagcgtttcggttttcggtattagttagcgtcggagtgggtaggattggagatggtagttttcggtttaggggaagcgggattttacggaagggttgggaagagggtaggaagagggggcgggggcgggaattgtttcgttttttttttttttgtttatttttattggttaagggttttttggttttaatttatttttcgtttttagggcgtcgtttaaagtgtgcggagtaggtgttttgggtggagttataattttgcgcgagtgttttggttgagcgtagcgtttatttattgttcgcgagcgtttatttatttgttcggtcgattgtttagcgaaaggggttttaggtcgggcgtagtcgttattcgggggatcgaggttaggagaggggttaagagcgcggttgatttttgcgggtcggggtaggggacggtggtcgcggttatgtagttttgtgttagggcgtgggggttgcgtttgggtcgcggggtcgggggcggtcgtcgtttggttgggggatcggggtcgtgttgggcgtcgcggagtcgggatagtagtagtggcggcggggatagcgtcgcggttggggtttcgcgttttttggagcgttttttgtttagatacgacgatttcgttcggaggtatatcggttttggggataaagattagagagagatgttgtagattttggggttggcggtaaggatttttattcggtttttcgcggtttttttttcgttttgttcgggttttgtttgcgcggtttttcggtttttattttgagttttgttgcgtttcgcgtggttttcgtattttgggtttcgggtcgtggcgtggaagtaaattcgtgtttttggttttcgt

SEQ ID NO: 7289 - DNA, 1494 bp, Artificial Sequence
  Description of Artificial Sequence: Synthetic polynucleotide
cgagcggtttaggagcgagtttaaaatttcgtataggtttgttcggtcgcgttttttgattggttaaggcgcgttcgtcgtttcgtcggtcgtaggcgttacggtagttttagtagtttgggtttcgttatcgttttcgcggtagtttcggtcggcgtaagtgcggcgcgcgttgggggagggggcgcggcggagcgttaggttggcgtcgggttatcgcgggattaagttttttagttacgcgtgagtgtttgtgcgttttgattcgaagtttttcgtcgggtcgttattttagaagagaagatagtgagcgtgggcgaggcgaggtatttagaggtttcggcgatttttgttttttagtttttcgttttttcgcgtcgcggttttgggcgggcgtcgcgagtcgggtaagcggcgtttgagtttcggtttagaggtcgaggcgcgttttcgcgttttgcgcgcgcgtcggcggggaaggtgcgcgggcgttttgggttcggcgtttgggggtgggggtgggggcggggatgggggtgggggtgggggtgggggtaggggtggcggcgggtcgtggggcggtggggcggtgcgtttgttttatttcgcgcggttcggcgtttcgcggaagtcgttgttgtggtttttttaaaaggatggggtttagaagttttttttgttattcgtaagtttttattttttttagtttcgcggtggataattttagattttttagtattttcgttattttttttttttgttttcgttgattaagaggtttaaaagtttttttttttttttgatttagaggggtatagttttggtgtcggggggttgggggtggggtgttagtttgggggttcggagcgtagattaggtttttagggcgcgggagtttgttgtttttttttgtaggggtcgttttcggacgttttattcgtcgttacgtggtttcgggatgtgcgggttgcggtagagagtgggtagtaatgtttttggttttgcgttttcgttttagtcgcggggatttcgaggcgagtcgttaattggtatcggtgtttcgttttttatttttggtatcggcgtttttttaatcgtcgttttcgttggtgggagtacgttggttttgttttttttttagtttttttatttttcgcgttgatgggcgtttttgtttgcgatttggtagttttaggatgtcggatgttattagggaagcgatgtttgggagacgttttgtgttttgcggagttgcgcgtttgttgggtggtgatggtgtatatttttgtttgcgttttttgtagaggtataaaggttgggttatttttgtttgtagttatatggaaattaagcggagattgcgggggaggagaagtggttaggcgtcggcgggaggtagaggtcgtttcgtagttattgggggcgagtgggggtttttggagatttttattgcgcggtgcggtttttgaggtgtttcgtttgggaagatttcgg

SEQ ID NO: 7290 - DNA, 828 bp, Artificial Sequence
  Description of Artificial Sequence: Synthetic polynucleotide
cggaggttacgagttattagttcggacggtgaaatttattttttttttgcgttttacgttcggatgggagaattttagttttttacggcgtatcggggaataattttagagtagtacgcgagtagagtttttagcgtttttacgtttacgtttacgattttttttttaatcgcgcggtataaggaggtatttacgcggagttaatttgatagttttcgtcggggtggaaattcgcggttttttcgtatcggtatttcggatataggtttcgcgtaggcgcgtagtttcggatttcgtttttgtttttgtttttgtttttattttttttgggtattatcggatagtgttttgattcgtagtttaatcgtcggggtgtcgattcgcggggatttatttttttgttttttttttcgcggcggcggcggcgttagttcgttttcgattcgagcgtggcgttttcgcgttggtcgttcggttcgggaaattgttaaattggtcgttattatttacgcgtttgtcggggaagggttcgtcggcgtcgcgttttcgaggtttttgcggcgaatcgcgttacgcgcgatttttggtcgggggcgggaggcggcggcggcggtaggagaagtttaaggttcgagcggttcgtagtttttacgtttgtatttttttattttcgttagttcgatggttcgtttcgcggcgtgtattggagtaagtaggtttcgtttcgagcgcgcgcgttttgggaagtgttgtaagtttggagatttggagtgagtttcgggcgttgttggttcgattgttcgcggtgttttttcggtgaggtcgcgg

SEQ ID NO: 7291 - DNA, 2705 bp, Artificial Sequence
  Description of Artificial Sequence: Synthetic polynucleotide
cggggttgttcgtttatttaaatatttttcgttttagtaaaggttgagattcgttagttttgttcggtttgattagggcgtttttttttcgtcgggtggtttgggcggtttcgggttcggcgttttttatttcgttggtttttttacgttcgtcgggttttttaggagtgtattagtatcgagtgtaaggagtcgtttttgttttcggtcgaggtaggggttgtgggttttagtagagaggtaacgggcgaggtcgcggtcgcggagtatacggtggatggcgtcggaggttgttgcgaagtcgcggggatagtgagtttcggttgtagcgcggatacgggcggtagcgtaggcgtgggtttgatgggtatcggtatggtaggtaggttttggtttgtcgagtggtatagggatttgatcgggatttcgaaggttttatatttcgggtttatagggatttcggttgcggttgcggcggtcgcggcggcggttatcgaatttatgacgttaacgtgcggttatacggagttgacgacgttgttaagttggtcgggtacggggtagtttaggtggtgtatgacggacgttaagggtagttttttagtttgtagtacgtttttgtagtttcggttaataatgtttttaatggtaaaggggtgtttgaagtttgacgtggacgttgcggtcgcggcggtagcggcggcggtcgagtttagttcgtagggtgggaattgagataggcgttttacgttgtttatcgcggttgtcgcggtcgtcgtcgtcgtcgtcgttacggtcgtcgttttttgtattttgtcggggtgagacggttgttgaggttgcgattgttggggcggttgttgcgggggttgtgacgggaggtgcggaggcggttgcggagtagtaggcggttgttgatggaaatagtgtattatgtgcggcggcggcgggggcggcggcggcggcggttggggtgggtggtggtgatggtggtggtgtgcggtagcgtggtgatgatggtggtggtgggggtggtggtggtgatgggggtgaaggtgttttttcggatcggcgttcggcgcgtttttggtgtttttcgcgtgtaagtgagtatggtcggcgcgtagtattttgaagcgtttgcgacgtcgtaggaagttgtcgttttcgaatatgttttcgtagtcggggtgtagcgtttagaagttatttttgttaggttggtcgggttttcgcggaattttgatgaagtagtcgttgaaggagaggttgtggcgtaggttgttttgttagcgttgtgtgtgttcgcggtagtaggggaagcgttttatgatgaatttgtagatgtcgtttagcggtagtattttttcggtcgagtgttggattgttatggcggttagcgagatgtaagagtagggcggtttttggtcgttgtacgagttttttttcggtcgcggtatcgttttcggtttttttatcgtttttcggttcgtattggattatagaattttttcgtatttcgtttttggggtttggttgtttttattaatttttattcggtttttttagtttcgttattttgttttttcgttttttaggttttttttgttttttttttttgtttttttcgaattgtttggtgttttcgattttggtttttcgggtttatttagttttcggaagttggtaatttttggtttcgacggttgtcgattggcgcgtatagtcgcgggcggagtgtattaggtttatcgtcgttttttttgcgttttttttcgggtggttaaagattgagtgttggagttggttgtagaggagagtggtaaggggtcgtgttttttttcggtttttttgttttttttaggttcgagggaaatttagattaagatggttgggaggaaggtttgggtagtagagattttggttttttaaatttgagtttgcgtttgttgttttggaggttagtgatagtaggatttttagtgttttggacgtaggtttttggttaggtatttagttagatcgcgttggagtttttttttttttggagtgaaaaattagggtaaggagagagaagattggtttttagggcgtttttttttttttcgaggttcgtagcgtcgtcggggttagaagagacgcgtagttttaggttgtcgttgaggagaaaaaattttggtggtttttgaagcggtagcgttcgtaggttttgttgaggagtgtggggcgtaggattttgggagcgagcggcgggttggagagggcgtttgcgaatgttgggtgagtgttggtcggggaggtttagtcgttcgcgtcgtagttgtcgtttttttttcgggtttgttttgaggaggagaggcgacggtagtggtagcgacgcgtttttttggttgcgttttgtaatggttttcgagacgtcgagattttcgtagttagcgtttcgagattattatatgatcgaggttgagggatttagtcgtcgtcgtcgcgtttgtagttgaagaaggggtaagaaggcgtcgtgtttcgttttcgtttttttttttatttcgtttcgggcgttttttatttatcgcgtttattattcgttcggtagtttttagttatttttcggtgcggcgggtggcgtaggttgttcgtcgggagggggtatagtttcgggtgtatttttcgtagttgcgttttattcgggttattaagtacgg

SEQ ID NO: 7292 - DNA, 704 bp, Artificial Sequence
  Description of Artificial Sequence: Synthetic polynucleotide
cggtaggggtcgtggaagggtagcgttagttaggcgttatgtagttcgcgtatgaagtttagtattttttgggagttgtcgtcggttgatacgaagattatttcgaagggcgcgggtcgtcgcgtttcggttattagcgtcgtatagaagtcgtagagtagcggcgtgaagtcgcggttcggcgcgtatcgggtcgtcgcgaagtatagtgttattattttgttttgtagcgtcgtttcggtttttatcgtcgcgtttttataggttattaggtgtcgttcgtttagaatgttaattatggcgtagatacgtagttatttgagattcgaggatatttgtaggaggatgattatttgcggggaggcggcggcgagcgtcgcggtgtttcgtttttgttcgtattatcgggcgttggattttttaagatttgttttagatgcgtttatattttggttaggtttcgtttgtggttggagtaattgtgttcgcgtcgataatgagatatttagatattagagattttagatatttgggcgatagcgcggtattcgtttttgggagcggggttagttaggtaattttaagtttttaggtttttgtatttttttttaattgcgtttcgtttatatttttgcgtttttttattattgcgtttcgtttatatttttcgtaagttttttaattgcgtttcgtttatatttcgt

SEQ ID NO: 7293 - DNA, 950 bp, Artificial Sequence
  Description of Artificial Sequence: Synthetic polynucleotide
cgtgtaattttaagtagcggtttttcgggtcggggttgcgcggtcgtcgttgtgttggtttttaacggtgggagggtattatttttttgttttgttttcgttttttagaaggttgtttcggggtttttatttttcgtttcgtttcggggatagtggttcgtttgttatgcgcggtagttcgcgtcggggtcggtattagtagcgttcgggcggatgtagcgagtttacggaggggtatgtttttacgtattaagtataatcgttttaggaatgattcggtgatatcggtcgatgattttttttatagtttgtcggtgagcggcggcggaggtaaggtttcggcggcgcgcgcgatttcggcggcggttttttatttggtgttcggcgaggcgttgcgtaaggcgttcgacgatgggttcggtagtttgggttatttgttttataaggtgttttatttgaaattttttagttcgggttttcgcggtttgtcgtcggtcgttcgggagcgggcgggcgcgcggttttcgggtagttgtagcgcgtttagtttggtcgtttcggacggtagtgcgttttcggcgtttcgcgtttcggttatgagcgtcgttaggaagggtcggttcggcgacgagtcgttgtttaggttttttcggggggcgtcgtacgttagcgattaggtgttggggttcggagttatttacgtggttaaggtgggtgcgggcgcgggtcgttttgggggttgggggttttggggttagttcggggtagatttttttattttttgaagttcggggtgcggggcgttttcgcgattgttacgttagaggtaagtaaatgcgtattttttagtaattagttcgtttgatagcggtgaggagggaattataaatgcgtttttttcgtatttattgggaaaaggtttattattcgggtggttcgtttcgtttcgg

SEQ ID NO: 7294 - DNA, 4861 bp, Artificial Sequence
  Description of Artificial Sequence: Synthetic polynucleotide
cgcggtttttgtttttttttttttcgattttttcggggttatttaaaagtcgattaagtcgtcggttttttagttgtttttatttttttatcgttttttttttttgtttcgtttgtttttgtgtttttcgttacgttatagttcgttggtttttacgttttttttggtttttttgcgtatatttcggtggcgtttttggtgtttttatattattgtttggaattttgtttggtttacgtcgtttgtttttgtttttttttttatttgtgtcgtttgattttttcgattttcgtttttgggggttttgtttttcgaatttttcggttttttttttttagggcgtgcgtttcgtttagtttttttcggtttcggtcggtcggttttttttacgtggtttttttttttttggtttttttttcgttttttttttttttgggttttttttttcggtttagtttaggggttgggggtggcggcgcggggcggggcggggcggggcggtgacgcggggttggtcgggtaagaggcgcggcggcgtggggagggggcgtagtttcgggttcgatcggtcgagtttcgcgcgtttcgttcgcgttttgcgttttcgttcggtcggtcggcgggggagggggtatgagtcggcgttcgcgcgtcgtttcgagttgcgggtcggtttagagtttcgcgcgggtttcgcgtcggagttaagtcgtcgtcgtcgtcgtcgttaaatcgcgggcgtagtagtgggcgtcgcgatgtagcggtcgggggagtcgggcgtcgcgcgtttcggttcgttcgagggttgcgcggattatcggtcgtatcgttatcgtagttttatgattgaggagatttttacggagttattcgggtttaagggcgtcgcgttcgtagtcgtcgttgtcgcggcgggcgagttgttgaagttcggcgtgtaggcgttgttggcggcgcggtttttttatagttatttgggtacgtgtggcggtcgcggggtcgcgggtcgggtttggcgggagatagcgagttgaatcgcgggggcgtttcgagtttttttcggtatcgaagtagtttcgggaagttgttttgggagcgtaggttttgggatcgtttttcggagttttttaggcgggaggcggagggtgtaagttttaggttttatagaaattaggtttcgtgttcgcgggtcgttcggggagggtgttcgtttttttttttattgttttttttcggtttttagttcggggatttcgagtgagtatttttagtgtaggcgtattgttaggttacggattttcgtgggtggaagcgattttaggttacgggcgtttgggtttcgtcgtagagggatggtcgggagtggtcgcggttgtttaatttagggaagtcggatttttggggaggaggtttgcgttttcgagggttgggtgttgacgcgggtttaagtcggttcggagttttcgggagttttagcgggcgaggaacgcggttttggtcgtagtgcggatttgtttcggttttgttttggggttagaggtttgattgtgagtagttgtttggttgttttttttggttttaggtcggttgggtttttgtagggtttgaacggtttgcgtagatttttttagtttttgtttttttttttaatttggcggggtttgttttgttttgatggtgttgtttttatcgtattttattttcgttttgtttttttttatttcgttttttaatcgtttgtcggtcggtttttttcgttttttttattggggtcggtttgttttttattttttattttttttttacgggttttttgttttatatttatttgcgttttgttttgtttttttcgattttagttaggttaggattcgtattttagtgataggtttgtcggggaagggaggtttttacgttgtagtcgggattttagttttttaagtcgttttttttgtatttttttattttttagtcggtgttttttagtttggagacggtagggttagcgcgttttttttaagtttagttgggattcggttattcggttatttttcgtttttatttgttttgttgttattaattcgtttgaagcgggtatataattattttaggattgaagaaaatggaaatatttgtatggggaagcgtttgaaaatagaaaacgtgaataataatttttaggtttttagggtattttggaattttcgggaagtatttaatttcggtttagatgatttttggttatcgtatggttgttgtgttacgtacggaagagtaaatgtgtacgtttcgtgtatgttttttttttaacgtagtaaggttgatttggttggagtaaacgttatttttttaggattagttgtcgttttttttttggtttttatttttttcgaaagataagatatatttcgagtttttcgtagttgtaaatatgtttattaggaatttcgagattttagaggtagttgaggtttggggaattttaggatagaatacggatagggtcgaggagatatttttttttaaatttggggaacggtaacgttgaggagggtttttatttgcgttatcggcgtcgatcggtagggcgtggaggttttgcgttgggaggtattggttaagcgcgagtattttcgcggtacgtggtgcggtagtttttggggtagaggagcgcggtcgtagtttattcgggtttttatttttttttttcgtagtcgtgttgaaggtcgagtaggcggcggtgtttaagtttttattggcgtcgttgggttgtttagggttgagttttgcgttgttggcggtagggttcgggttgttcggcgtcgcgggtgcgttatatttgtcgttcgagttgtagtttcgcgggaagttggaggcggtaggttttggggagttaggtattaaagttaagaaggggcgtcggagtcgtattgtgtttatcgagttgtagttgatgggtttggagaaacgtttcgagaagtagaagtatttttttacgtcggataggtagggcggtataaggttggggttagcgggttgtgggagtgtggttatttgttttgttgagggtgcgttttgttttttttagaatagattttgttgagtttttgggtttgagttagttgtaggtgaagacgtggtattagaatcggaggatgaagtggaagaaaatagtgagtgtgtttggtggttttttattttttagttttttgggttatgtttcggtgtatgtagagttgtttttttttttttttttattgagattttgtttaatttttcgattttttcggtgtttggtacgtatcggaatttttttagttttttttgttttttgggtaagttaatatttcgttttttttcgcggtatttttaggttttttggtagttttatgttttttaggtcgggtcgttttttaggcggtatttggataaatggtcgttatttttcgggatatttttttattatttttttatatggattttgtattttttagttttatttgggtttaagttttttcgggggtttttagtttacgtgttggtttatttaggtgttggcggtttttcgtgtaggtgttgtagggcggcggtttggagttttttattaagtttaaggggcggtttaagaagaatttaattttaacgagcgagtagtttattgagtaggagcgcgttaaggatgtagagaaatcggcggaggtgtcgggcgagtttagcgataggagtcgcgaggattgagggcggtatacggtgcggggtttgggatgttcgcgttattcgtagtttttttattcggcggaaattcgcgagtcggttttttcgcgtttaagaagtttattttttaagtttttttattatgattttgaatgcggataattggggttaaacgaggaaggatatagatttaaaagttagatttaggttttagcgcgtttttgggttttaatttgggagattcgtatttagttcggcggaagttatagtttttattttgagtttcgtggcgtagagcgttttacgcgtatttacgtttcgtttttcgtttgtatttttatttcgtttggggtttgttttttcggtcggggagtttttaggtatatattcgtttttggacgtcggggatttagcggttgggtttaggttataacggtttgagattgtttcggggtaattcgtcggttcggtttggaggtcgggttttcgatgtcgttggggtttttatttttttttgcgaagacggtgattttttttttaataaaatattttatgatataatcgggttcggtggagtagtttttgaattcgtagggggtgagggtgggggtgggggtgggttcggtaagataagcggaacgcgggtagttgttttttaaattttttttttttcggttttgtcgaaggtagttgtgttttttattattaagttcgggttaggtacggcgggcggttcggtggttgtaggattttaggaatcgtttttattttgggcgtgaggggttagtttgaattttatttttttttttttgttagttagagagtcgttggtaggagcggtttggtcgtatcgcgggtgtttaaaggagcgggagttagaggttcgtcgtagagttcgtttcggaagtggttcggatagagagtcgtttcggttgttgtttcggttttttgggatttgaaggattagttcgtgcggtttttgagatggtttttattaattttttatgaggcggatgggaagtcgaggacgtaaggtttggatagagtttttttattagcgcggtagttcgttcgcgggtttttgtagtagtaatggttttttagagtttttatatttttcgtaggatatttagggcggcggcgt

SEQ ID NO: 7295 - DNA, 999 bp, Artificial Sequence
  Description of Artificial Sequence: Synthetic polynucleotide
cgttgggagtcggggcgcgtttttgtttttcgcgttaggagaattattttcgttttcggagggagttcgttttcgtgagggtcgtttttagtttcggttcgtcgtttgaagatagtagtttcgggaatcgcgacgatagtatcgaattggagattaggaagttttggtggaaaaggttaaggagtggtgtgtacgcggagttcgggattcgggcggggatagagcgggagcgcgggcgtagttcgttagcgtcggcggtagagttttagttagaggttgcgaggggtttaataggtcgttaaaggtgtttttggttagagatgttatagcgcgtatttaggtaggaggtataggggattttttataggggttgcgggagttggcgttttttcgttttaggtcgggagttgagaggggttttagcgtttaggtcgattgcgttttgatcgggagttattgcgtttagcgtagttcgagggcgttgagttcggaggatgcggcgcggggcgggggtttcgggagtaatagagattgggattcgagggttcggttcgcgttgttgtttacgtagcgtttttattttggaaagagtgtttttcgcgcggcgggtcggtttttttagcgcgtatttggggttgtttttgtagggttattttcgtttttagggaggtttacgttcgtcggcgaggaaggatggtgagttttggtttagcgggaaggttggaggaacgtaggttcggaggaaaaagttttttagatttgggttattaacgaaggtttttatagggattattaggatcgggacgtcgtgggtagaggcgttatgttttttgcgttatttttttggggatcgcgcgttagttcgtggtgtagggtcgagttttggggttgtgagcgcgcgtttcgttttcgtgcgttggtggaaagcggggtgttcgtgcgtgcgtttgcgagcgtgtgtcggttgtaatcgtagggagcgtaaataggtcgttacgt

SEQ ID NO: 7296 - DNA, 1750 bp, Artificial Sequence
  Description of Artificial Sequence: Synthetic polynucleotide
cgcgtacgtattttagaggttatttagattatgtttcgtcgtttgggcgtttaagttgtagtcgttttttgtgtgtaggtagtagttgtttggtaattttcgagttcgttcgcgtttttagtatcgtagaattagggttaggtgttttagtggttgtagttaagttaggtattttgtttagcggcggttgtataggagtagaatcgagaattcgtcgtttaattttatacggggtgattgtcgagtgtttatgttagcggttttaattttttttaggtggaggagtgggcgggaggtacgatttgggggtttttaggttgggcgcgttggcgatttcgaggtcgattaggttatgtatttttagttcgtttgggtatttaagttgtagtcgttttttgtgtgtaggtagtagtttttaggtaattttcgagttcgttcgtattttttatattttagaattagggttagatgtttttgtggttgcggttaagttaggcggtttgttttgtagtagttgtataggggcgggaatcggtttttagttttattttcggtggttgtagagggtttttggttagaggtttcgagttttggtagaggaggagtcgggtgggggtagggtttggcgggtttttaggttaggggtattcgcgatttagaggtcgtttaggttatgttttattatttgggcgtttagttataggcgttaggtaatttttaagttggttggcgcgtttagtttcgtagaatcggggttagatgtcgttgtggttgcggttaagttaggcggtttgttcgcggcggttgtatcggggtaggaatcgatttttagttttattttcggtggttgcggagagtttttgttagcggttttattttttttcggaggaggagaggagcgggagttacggttaggcgggtttttaggcgggaagggatgcgcgtttgcgatttcgggatgttttgcgcgagtttaggagaattcgtaagttagcggcgtttgcgttcgagttgtagtcgttttttgtcgtttacgcgagttcgagagcggttttcggagttcgggttagcgtcgagttgtaggcgcgcgtttaatcgttttgttgggtttacgcggtttgagaggtcggagcgtttaattgttggtacgcgagtaacggtttagttaagtttattcggtttgagaggtcggaggttgcgagtgtcgttgttgaaggttgtggtggatcgggttggatcgcggattttgagttatatcgcggggttgggggtggattttgggtttgggggtggattgttggtttggtggtggattttggatttaggggtggatagcggggtggggagggggatcgcggatttggaatttggtcggggtggaaaggttacgaggagtcgcggcggtttagtagcgggtggttggcgtttgagaagtcgttattatgaggaaattttttagtttcgggagacgtttgggttaggcgtttttgagttttatggattaagagtacgcgggtcgggggtattatatcggggattgggaattgcggaagatttatagggtggttattaagggcgacgtcgcggaggtggagcgttgtttgattcgtaggtttcgggatttggatgttcgcgatagaaaggataggtagcgggggtttagttcgcggtgggagggggtttttaggttttgtttgttcgtagcgtttgaggcgggggttttggaggtcgtcgggttttggagtcgcga

SEQ ID NO: 7297 - DNA, 391 bp, Artificial Sequence
  Description of Artificial Sequence: Synthetic polynucleotide
cggtgttggagcgaggatgcgtagatcgaggtagggaggcgggggtgcgggaggtttcgcggttgcgcgggcgcgtgttggtggtttcggcggaggtttagtttcggttcgcgttcgcggcgttttcgttgcggttcgagcggtttggttgcgggatttgtgcgtacggatggcgcggtcgtttcggtagtattcgggggtttgggcgtcgttgtttttgttgttattgacggggttcgtcgtttgcgtagttagtttcgcggacgacggtgcgggttcggggggtcggggatttcggggacgcgcgcggggggatacgggcgtcgacgaggcggtgtcgcgttacgattttttttacggtattttcgcgggggagttttacgatttgcgt

SEQ ID NO: 7298 - DNA, 817 bp, Artificial Sequence
  Description of Artificial Sequence: Synthetic polynucleotide
cgcgcgtcgtttttttcggagttttcgagttgttgaggagtttggattgtgtttgtttttagtgttagatgaaagggcgttgaggtttttggtcgttgtttcgcgtttagtttcgcgtacgtttttttgcgagttcggtcgtttagcgttttttttcgttcgagtcgtcgtttgcgtttcggggtagtcgttttgtttttagcgcgatgtggtttcgtttggttttttgttgttggggtttggcgttcgtttcgggttgggcgattttttagtagatgttttcgtcgcgtaattttagttttcgtttttttttcgagatcgcgttcggggttttcgggagtattttcgcgtcgttcgtttttggcgacgaagcggcggggagtagagtggagcggttgggttaggcgtttcggcgacgcgtgcggttgttgcgggagtttagcgagcgtttggagtttgtttttttggtggatgattcgtttagcgtgggcgaagttaattttcgtagcgagtttatgttcgttcgtaagttgttgttcgattttttcgtggtgtttacggttacgcgcgtggttatcgtgattttttcgtttaagaattacgtggtgtcgcgcgtcgattatatttttattcgtcgcgcgcgttagtataagtgcgcgttgtttttttaagagatttttgttattttttatcgaggtggcggtatttatattaagggcgttttttagtaagtcgcggtaaggcgttcgtttttttcgattcgggttttagttttcgggtttttcgatttatcgttgtttgttcgtttttatttcgg

SEQ ID NO: 7299 - DNA, 814 bp, Artificial Sequence
  Description of Artificial Sequence: Synthetic polynucleotide
cggagtacgggttacgtgttttaggtttcgggaattagtttttattggtcgagggttcgcggggtcgttaggagggttttttaggttttttttagggatggagtagttacgtttttcgagtgtgtttattttatcgatggagtaaagtgaggtttttagttcgttcggatgtttttgcgtcgttcgcggggtagttttcgtatagatacgttcgtaagttttcgattcgttcgttattcgcgtttagatattcgcgagtttttggggtcgtagggacggtgtagcgttcgtcgaggcgtttttatttatttgtgattattgtcggagatttttggttttttttcgttcgtagttatatttgtagcgtgaacgcgtttcggggtagttcgaggtcggttcggaggcgtagttgttcgtttcgttcgttgaaatagagcgttcggttcggcgggttcggtttttcggtggcgtttttcgtttttcgttgttgtcgtcgtcgggggacgcgtacggttttttaggtatcgttcggcggcggcggcggcggcggcgaggcgcggcggtcgcgggtcgttcgggtggcgtaggtggtcgggtcggcggcggggcgcgggggtcggtcggttcgcgggttttttcgggttcggcggggacgttcggttagttcgtagtttagcgcggcgtttagtagttttaggtgtagtatttaattttagagtcgtatgttcgacggtttttttcgtttttttttcgtttttgtatcgttattcggagttgttagttttgggagtttcggcgtttcgatttttttcgt

SEQ ID NO: 7300 - DNA, 1429 bp, Artificial Sequence
  Description of Artificial Sequence: Synthetic polynucleotide
cgcgagggaaggattattaaatttaaagacgcgcgtgttcgtgtgtttatatagacgtgtgtttcggcgtttgtatacggtcggcgcgtaggtatgcggacgtttatacgaatatataggtatgttttattgacgtatttggggtatttttttttaaagaaagtaaggaatgaaaatttaatttgagagttattagggtttatttggaggtcgtttaaggggtagaaaaaatttgtaatgacgttagagtgtttgtttttggtgtaattttattttcgggagggttggatataatacgtttggaaagttcgaggggttgttttaggatttgggggcggggggtggggtatttagtaatttttgtcgcgggttgtttaagaaacgtggaaatatattttgcgattttttatttttttatatatataggtacgcgatttcgtcgttatttttcggattagtagtttacgtttaacgttgggtcgattttagatatataggtagtcgggattttcgttcggtgcgtttgtttatttatttttttgcgttaggttgggacgcgtttcgtttgtaaaaggtttaaacgtatttttcgtcgcggggcgggatttaggggtttaggtttcggggtttagaggcgggtaattttgttaattttttttagcggcggggaacgtcgcgtaatcgttgagttttgttcgtcgagattaaataagtagaggaataggttgtaaatatatattttgatacgtgagtgatatttacgcggtgcgagaagttgtagttaagggaaaggtaaggggtggggggagcgggtatcgataggtacggaattttcgtaggcgtcggaaacggcggtttttcgattttttttttttttagaaagtggtaacgaatgtttaagtttttcgaatttgttttttgtgggaggtgataggtgaacggaatttaggtttggttattttcgtcgttgtttatttttttattatttgttttttcgtagataagtagattcggcgtataatgaggtagtagtttttagtcggttatcgtgattaatttagaataaaagcgttttttttacgttttttttaataaaggggttattagtttcggcgtttttcgaaggttgcggggttttcggttgtcggttgcggagttgtcgcgcgtaaatttttcggggttttcggggttgtcggcgttacggagtcggggtcgcggagggaggaagcgtaagtcgttcggagaaagtgaggttagattcggcgggggagaggggagggagtcgggcggtcgcggaaggagggtgattgattagtgcgcggtgttcggcgttttgtttcgttattagaggcggttaaagtagggttacgtaataattttagaatcgttaattaattgacgttgtaggtaattattttattgtgcgcgt

SEQ ID NO: 7301 - DNA, 7708 bp, Artificial Sequence
  Description of Artificial Sequence: Synthetic polynucleotide
cggaggggaaagcgagtttcggaaataggcgtagtttgtggcgagggttcggtggtcgagttgaatttcggggtttcgggagattcggtttttgcgggggaggtttttttcgaagtcgttattggcgggggagtagagaaaaggggaaagaaggggagtggagaaaaagggaaaggagtcggttttaagtagcgaggtcgaggtcggttagaggtaagggtagggggcggcggcgggggaggtagtcgtggggtttaggtttggtcggcgtttcgaatttttttattttcgtttttagtgttcgggggcgggtcgagattttttaggatcggattcggggaggagcgaggggtcgaggggagggggaggattcgggttttttttttttttttttttttttttttttttaattaggtcgatttaatggagttaaagagttcgtaaaattatgaataatttattcgtgatttgttattaatttatcgggtttcgagtttttgtcgttgggattgaatttgtaattaaatttgatttcgttttattttattaaagacgagattgtaggtttaattgtttaaataatggattggaattaaattagtaattacgtcgttaggtatatatatataaaaagttggggttgggggaggtcgggcgttcggtcggttcgcgcgggattttcgcggtcgcggcgcgtaaatttaggcgtaaagtgcgcggttcgggtttttcgttcgtttttgtcgtcgttttcgtatttttagttcgttggtagtttttttcggggtagggggaggttttcgttttatcggggttcgggttcgaggggttgcgggaagaggtcgttgcggtttcgtttcggaaggatttttcgatttcgcggttcgcggttttgttgtaagtttagcgttcggcgtttcgacggcgttttttttttattcggtttttagttcgtcgttttttagtaaggtgtcgtcgcgtttcggagggattgtttttagagtaagaggttttgtaaggggtcgtcgtggttgggttataggatgtgggatattgttataaataagttcgtgttttcgtggtcggaattttgtacgtatacgtatacgattcgcgttcgtatatttcgttcgcgatcgtattttttagggttttcgttttttagttttagttgtttcgcggtttatattgcggttattttttttttgttagtgcgggaggggagggaagggcggacgttagatttaggaagattgggttgggtttcgagaggtcggggagatgttttttttttttaatttagtttcgggagtttcgaaagagttagtcgtatagttatcgtcggcgtatcgaacgtcgttttttttaggattaggagtttcggttaaggtcggagaggagggtacgggaataaatacgatatatatagagatagagatagagagaaaggacggagagaacggaaaggaaaaaaagagagagggaggttagagagaaagtgagatggttgaatggagggtgttttttgtagaggttaaataaggtttgaaatttagtttttagtttatttcgttggggtaaacggcggttgaatagtaaaaagtagaaataaatttttgtattttttattttttttttgtataattttaaaatcggcgtcgaattttcgtgtttaggaaaataatatagttttttagttattaggtgttttggagtcgagtttcgcgaggtgttttcgagtggaagttgatttatttgataaatagaagcggtttggtgttgggggagtcggtttgaattcggttttgtttttttttggggggtggtaggagaggagggatggaagttttagagagttatatttgtggtagtgtttttagtaaattttaaattcgcgttatcgatcggtttatcgttgttttattatttattaaattgggggttgcgttttttttttagtttcgtatatagggatatacgttttatgattttttaagcgatttcgttggagcgaatattcgttttttatttttttttttatttaatttagattttttaagatgaaaataattgattttttttcgtcgtagtattttttgtatagttttgggtttgtttttgtttttgtttttttttgtttgtgtattagattaaagggaaaaggaagaagaatataaaatttttaaatttaattttgttgtaaacgaaagaaagaaaataattgtatataaattttagttcggaagttcggagagttataaattttttcgggttttgtagatttcgggtagatgttgacggtttatttgtcggaatttagaatttttgtagttgttttgagtagggaggggcgcgggagggggtagagttttttcgggaatggtttggggtttaaagatgtcggaaattcgaattaagttttttattttattttattttattttattttggcgcgaggttaggtttgtttcggtttcgttttcgttcggggggttcgttttcgagggttacggtttttattttagtaggcgttaggaaattcggaggaaaaagttcgggaaaattgagatttgtttttaaaggaggatcgggtcgagtaaaaggaatcgtagtttttgtttttttgagttttttaagttcgagttttttaagtttgtcgtttttgggatattttacgaggttaggtcgtattttaggtcgagttcggcgtttcgggttatagttagtttttttttttgggattttcgtcgttttgtttcgttttttcgttgttttagttttcggtttttagtcgcgttaatttaaaatttgtttggcgttagcgtcgttttgttttttttatttttgttattttttgtttagtaaagtggggtaaaggtttaaattaaaaagttatttttaaaaaaataatttattagagataaggttttgtattcggagtagtaagggattattgtatttttttttttcgttttagtcgaggacgtatagtttggaagtttagggggttaatgttttttttgcgaggtcgttcggtgtttaaggttcgttatttgtttagtatatagagatttaatttagttttcggtcgtcgaggtcgtatatttttttttaattttatgggggcgtttcgtgcgtcgcgtatttattagcgttgtaggtcgttagattcgtatcggggttcgggtttttacgttttttcggtcgttttttttgtatagtgtttacgttattgtagtagggaagatttagagggttggtttttgttgcgtttagtttcgcgtttttggtcgtcgcggttgtagcggtcgtcgttgttacgtcggtatggttgaagtgtgcggggtattcgttttgtagtagcgtttcgaagtgtaagcggtagtagattaggttgttttttatgtcgaagtggtcgttcgtggttagtattttgttatacgtggtgtacgtgaagtagttgaggtgataaattaagtttcgagcgcgtattattattttcgaggtcgagatgtttaggtggtagcgggcgtagcgttgtatagagaagcgtttgtagggattatggagggaggggttgtgggaatatacggttgggtattttttttttttttttttaggtgtcgttgttgttgcggggggtaattttttttttaagacgaataattcggtttttatttggaggatgggggggagagagaattagattttgatttaggtttggttttgttttaaaatagttttttttaatatatttatgtttatagagatttttattttatttagagttttcgtaagttttaggaaagtttttatttgggagtggagggagatatttattatttattttttttttaatttttatttttttttttaaattagcgtttgggaattttattgatttttataatttggaagaaatatagagatagggaaagagagagagatatagacgtagagatagagatagagagaatatatatagattttaattttaaaattggggagaaggagaaatagagaatttggagtttattagtgattttggttttttgattttggttattttttatttttatttttttaaaagatttggaaatgtatttatttttatagttttttttttagttgtgttttattttagtttgggttgtttaggtttgggggtgtttgtttttataatttcggattaatttaagaaattttaaagagagaggggagtaaggattttaatttaagtttttttgtggtttaagtttcgagtaggagggtagtttttgttttttttttggtttttttatttcgtagatttttttaagagttttttaaattgttgttttaaaaggttattatttaatttgtggtggtttggagaatttggggggggagcgggggagttttgagtagtgaatttttttttgggattaaacggaaaggagagggttaaattgtaagattgtgtttgagattggggggaggggttttgaggggtagttgggtgggggggttatttgtagtagttttttttgtagtagatgttatcgtttttgttgaaataggtgagtttcgattttaggttgagtttgtattcgtagtatttgaggtagcgtatgtgttattgtttgtttatcgttagtaggtagtagcggttcgagattttgttttcgtagtcggcgtatagcgcggcgcggttattgttgatggacggtatggtttgcgaagggagggaggcggaagatagtagcgtttgcgttagttagcggttttttcgtcgtcgggaaatcggtatttataattttttttgtggttttggttattttgaacgcggagggggttgttaggatatgcggcgcgtttttttttattttaaaaggtttatttttatttttgggcggtttagaatttaggtttgtttgcgtagttttcgttagttacgggtttaggtcgggtttttggtttaaatggttttggtgtttattttttttttttttagttttttttgtttttttttttaaaatgttcgggttgtgtttagggattaggatagttattttagttaagttttttaagagttttttttaaattgttttttaaatgagttattcgggggataaggtgattattaagttattttttatatagaattttttttggagagatagcggagtttttgggttttagttttagtgatttttggatttttagattagaggttaaggttaggataagttagttaatttttggtttttttgttatacgggttggggtttttttgggttcggggatgaggtaagtggggtgtagggatatttttaaagttcgtgggtgaaggataggtttaatttaaatatttttttatttaaattgattagtagagaaggtttaatcgaagaagcgtttagaggtcgggaggatattggcgtcgttgtttttgttttcggagtagagaagtttttttcgtgttttttattttcgcggttttttaaaggttatttttgggttcgttggtcgggtagtgtttgttcgtttggtttttagggaggtttgaggcgaggaattggttatttggggttgggttcgcggagttaggtgtagagatttaaatggagtttttttcggcgagggttaggtcggagtttgaatttttagttttggtttggttaagtttgattagttaagggtttggggacgcgattaacgataaatgttggtttcgaagatttcggtttttgaaattgcgttgggggttgaggaggattttcgattgtcggaaagttgggagcggtttaagtcggttggagttttaatgtttttagttggttcgtttttttttggcgtcgttcgcggcgtcgttagtaatcggagtcgagaggtggaggagagcgcggggttgtcgatttcggtatcgggtaaggtgagaagggagtcgtttcgggtcgcggatgggatttcgtttttagttcggaagaaacgtttttttttatttttagggtcgagatttcggttttaattttgttttttttttgcgttttagtagtcgggtttttttcgaatcgggagttatcggttttgtattttgatcgaggatttttagtatttagtttcgtgcggtacgaaggacgttttttaaatttcggggagtagaggcgttgattggttcggttttattttagtttttagtttcgattttatagtcgcgcgtttatcgtttcggtgtcgtcgcggtcgatggcggagttgatggcgggagtttcgtttttggttttgcggtttatttcgtcgatgatttcgtgtatttcggggttcgatagattgtggaatagtatcgcggcgggatcggcggggtcgggggcgcggttttttcgagggagggtttgtttttcgttttagttgtttggcgtttttggcgttaacgggttcggtgtatcgttatcgcggtttcggtttcgttcgagttcggttgagtttttaggtcgggtttcgggtttcgggcgttcgcggggtaggacgtttttcgtcgaggcgtaggggtagttatattgcggggcgtttgggcgacggcgttaaagttagggttataagggtacgggataagcggggcggggggagtaggagattaggatagaggtcggcgttcgtcgcgggcgtttttacgtcgcgggtatcgttcgttcggttttagcgttcggggcgtaaagtaagggcgtaaattttgttcgaggcggcgacggttgcggtcggggtttattttgaagtcgttaggtgttcgcggcggtttagttgtttggattttttttttttttggggtgcgtttttagtttaaggcgatttttttgggcgttgagtcggcgattggagtaggggttttttcgaagtttgcgagtcgagtcgagttatcgggagaattgaagaggaggaggaagaggaggaggaggaggcggaggaggaggtggaggaggagaaaaaagaggaggagtagagtgggaggaggagtcgtcggtcgcgggtttagtcgcgcgtaatgttttttaagcgcgcgtttagtttagtttcggttttgtagttcgcgttagcgtaagttttcgcgttttttttatagtcgcgtttgatattacgttttgtcgtcgtgttattggtcgttcggcgttttaggttttggtagcgcgtgtttcgggaaggcgggagatttaagagggaggggagaggtaagaggagtagaggagagtcgagatggtgggagttggtgggcgaggttggagggcgggggtgggggggaggtagggaggagggagagcgcggggtttggagtttttaagatacgaatagttttttgcgatatttttagaaaggaaaattaaattttttattttaagaaggcgtagtaaggggatgttcgttttattgcggttttttttcggtttggagtcgcggttttaggtattcgtttgggaggttcgggaaggtaggtttgtggtagagttgtaagagttttcggtcggtcgttttttatcgagtttcgttttcggttcgggttttgtatagcgggttgtaggcggtcgtgtaagttttttgggtattcggtagagtttgagtggcgagatcggcgagagttgtgattttcggggaggggggttagttagtatatttacgttttaagttcgttagggtttaatttgtagtttagcgtgtagtttttcgtttttttcgg

SEQ ID NO: 7302 - DNA, 3969 bp, Artificial Sequence
  Description of Artificial Sequence: Synthetic polynucleotide
cgttttttttgcgagtcgcgcgcgtttgcgatgcgtaggttgttttggatttttcggggattggggggatttttttgggaagttaagggggatattttaagtgtgttttgtaaatcgtattttttgatgtgaaaatcggtatgcgcggtgcggtcgtacggggagagcgcgtgtttgggggtggggggtatcgtttaggaaagcggagttatttcgggcggaaagcgattttcgtagaaagcgtcgcgcgggcgtcgttgcgtgttcgtcgtttatagtcgtagttaaagagacgtaggcggttttacgcggtttggtttatcgtcgtttgtagtgttcgcggcgcggggcgtttcgaggttgggtttatcgtttttttcgcgtttttgaagatttttcgggttttttcgaaggagtattgtttttttttgtattttttttttagggagttcggtcgtagtttttttaggaacgcgttggcgcgtcggcgtcggtgtaggacgtcgtgggtttttttttgggttacgaagattgggaaatgcgagtttcgtgaagcgtttatcgcgtgtttcgtttagtgtttcggagatcgttttacggtttacgcggcgggggtatcgtaggttttcgttcgttttggaggaggggagcggcgttgttcgcgggtttggttgggtgttttttttgtcgtgttttcgggttagttattttcgtcgtttatttttttcggtttggtttttttgttttcgggggttgatttcgagggcgcgttcgggggtacgcgcggaagtcgggtcgaagggggttgcgggcgtcgtcgcgtaaacgtgaggttgcgggtcgatgtcggcgaggagaaggcggcgcggtttcgggtgtcgggtaattttttggggtttacgtgaatcgcgcgtggaaattcgtatagtcgttcgcggaaatttaaatttttcgtttttattcgtatcgcgttttcggcggttagattcgttttttttaggttttcgttttggttcgaggcgcggtttttgttcggttttttcgatagcgagtttcgggttttttcgttagtttttggcggttttgggtttttgtcgtttttttcgttttcgtttggggtttttttgtttttcgcgatttttgagagttttagatttcgcgcggatttttttggggtcggttttgagagtatagtttttcgtcgtagtttttggttttttcgtaatttcgacggttatttgtggataaataggatcgtcgttttgtttatgggaagacggggttggtgagggttagagacgtttagggcgaggtaatttcgtgcgtttagtttcgagtaggtcgttttttaggacgttttatagtcgaggggatcgttattcgggagcgtcgtgagttgtgggtattacgcggtggtggagagtgattttcgtttcggggcggtcgtgttgttcgaatttgttttagttcgcgaggggagacgggtttgggggtaggcgggagagggaggtttcgggaggaggcgagcggggttgagaggacgcgcgggaggggttttggagaggtcgtaggaggcgcgtttcggagggacgatttttgttgggaggacgaggttttaggtggacgttgtgggtcggtgggtaggagttcgagttttgtaggagcggtttaaattggttattgagcgcggaagaagggacggaaggtgagcgttattgggttacgtggggtcgagagaaaggttattgtttgttttttttaaaattagttttatacgtcgacgtttttagagaattggtttggtttggaaggaggttgaggatgtaggcggggatattaaagaatcgggtttaaggaggtgggaatttacggatttcgagtttttataggaggtgttttgggcggtaggagtgggaggggaggtttatgtttttgtagttttcgatatttacgttttcgggatatttacgattttcgggatatttatattttcgggatatttacgtttttcggatatttacgtttttgggatatttatatttttgggatatttacgttttcgggatatttatattttcgggatatttacgttttcgggatatttatattttcgggatattttcgttttcggaatatttatattttcgggatattttcgttttcggaatatttatattttcgggatatttattttttcgggatatttatattttcgggatatttacgttttcgggatatttatatttttgggatatttacgttttcgggatatttacgttttcgggatatttacgttttcgggatattttcgttttcggaatatttatattttcgggatattttcgttttcggaatatttatattttcgggatatttattttttcgggatatttatattttcgggatatttacgttttcgggatatttatatttttgggatatttatattttcgggatattttcgtttttggaatatttatattttcgggatatttacgattttcgggatatttatattttcgggatatttatatttttgggatattttcgtttttggaatatttatattttcgggatatttacgttttcgggatatttatatttttgggatattttcgttttcgggatatttatattttcgggatatttattttttcgggatatttatattttcgggatatttacgttttcgggatatttacgttttcgggatattttcgttttcgggatatttacgtttttgggatattttcgttttcggaatatttatattttcgggatatttattttttcgggatatttatattttcgggatatttatattttcgggatatttatattttcgggatatttatattttcgggatattttcgttttcggaatatttatattttcgggatattttcgttttcggaatatttatattttcgggatatttataattttcgggatatttacgttttcgggatatttatattttcgggatattttcgttttcggaatatttatattttcgggatattttcgttttcggaatatttatattttcgggatatttacgtttttgggatatttatattttcgggatattttcgttttcggaatatttatattttcgggatatttttattttcggaatatttatattttcgggatatttacgttttcgggatatttatattttcgggatattttcgttttcggaatatttatattttcgggatatttttattttcggaatatttatattttcgggatatttacgttttcgggatatttatattttcgggatatttacgtttttgggatatttatatttttgggatattttcgttttcggaatatttacgttttcgggatatttacgttttcgggatatttacgttttcgggatacgtatattttcgggatattttcgttttcggaatatttatattttcgggatatttatattttcgggatatttacgttttcgggatatttatattttcgggatatttacgttttcgggatatttatattttcgggatatttacgttttcgggatatttacgttttcgggatatttacgttttcgggatatttatattttcgggatattttcgttttcgggatatttatattttcgggatatttattttttcgggatatttatattttcgggatattttcgttttcgggatatttatattttcgggatatttattttttcgggatatttatattttcgggatatttacgttttcgggatatttatattttcgggatattttcgttttcgggatatttatattttcgggatatttattttttcgggatatttatattttcgggatattttcgttttcgggatatttatattttcgggatatttacgttttcgggatatttatattttcgggatatttacgttttcgggatatttatatttttgggatatttacgttttcgggatatttatattttcgg

SEQ ID NO: 7303 - DNA, 2490 bp, Artificial Sequence
  Description of Artificial Sequence: Synthetic polynucleotide
cgtgaattcgagtttcggttacggtcgttattcgtttttatttatttttacgttgtagtgcgattagttattcgcgtggtattcgttacgatttagttgggtttatagataggagttgtttttttttattgtaggcgggtgatttaaggtttttattgttttatatttgtttagatcgcggggtattcgggtttcgtagttttttggtcgcgttcggggttcggggagtcgggttgcggttggggggtttggaggatgagggcgaagattcgagttggattgcggagagggtgtcggcgcgggtcgggtttggggggaggatacgatcgggttttcgttttcggatatcgtacgcgtcgatatagaggggtcggttttcggttttggcgcggcgggttggcgtagggcggggtggcggttgaggggttcgggttttaggtgcgtttcggagcggtttcggcggcggtgcgggggggaatagggaggtaggatggggggcggggaggcgggaggggggagtcgaggttttcgcgtcgttagtttcgcgttttcgttttttcgttttcggttcgagcggtcgttatcgcgggcgggcggcgttgcgttcgggtgcggtttttcgtcggcggcggcggcgcggtcgagaggtgcgggtttcgcgcgggcgggacgcggggcgttgttcgtaggagcgattaggtgggcgtcgggtcgatcgtagtcgtcgtcgcgttttttttcgcgtttcgggttttggtttttcgcgtttttttttttcggatttcgttttttcgttcgaggtcgttttttcgtttcgggttcggtttttcggagttcgtcgattttcgttcgaggttttttcgttcgacgtttcggtggtagcggcggttcgggttgcgtttttcgttgtcgtcgttgttgcggttttgtttttttcggggagggggtttcggcggttttgcgttttcgggttttcggtttcggcgtcgtcgtttttcgttttttgcggttcgggttttcgtttgggttcgattttgcggggtttcgttttggcgtttgggtttttgttcggtaggttttcgcgcgttttttgttttcgattttcgggttgggcgttttcgtttttaggtttttttttcgtgtttttgtagtttttcggtttcgttttttcggggtttttttcgtttcggcgtttttgtttgtcgtttatcgttgtgtttttggttttgcgttagttttttttgggtttttttttcgggttttcgttgttttttcgagtttttgatttaattttttatttttcgtttttttttttttttttttttttcgtttttttttttttttttttttttttttgtttttttgtttttttttatttttttttgtgtttcgttttcgtcgggttttttttagttgggcgttttagtgtttgtgtttttggtattttcggattggtttcgtgtttgcgttcggtggcgtcggtcgttgtttttcgttagagtttttttttatttttggttttttcggattttgtttttgtttttttcgtttttgtcgggtttttagaatattcgggtcgggcgttttagcgtttttgggttttttggcgtttttttcgcggttgagtttattttttttttttagaatcggggttttgtttttagataaacgaattttaatcgaagcgtatcgaattcgagggttttagatcgggcgcgacggggttcgcgcgggaggagtttttcggacggggcgggagcgtggggtttggtaggggaaggtcgggcgcggggattgtatcggatttatttcgggacgttgcgcggggcgttcggtgggtgtcggcggtagcgtttgggtatagagaggggattacgcgacgggtcggcgatagcggttggggcggcggtcgcggggattttaggttgtcggttttcgtcggttttttttgattcgttgttttttcgtaggcggacgtcgcgggtatggattattcgtacgacgaggatttggacgagttgtgtttcgtgtgcggggataaggtgttcggttattattacggattgtttacgtgtgagagttgtaaggtgagcggcgagcgcgcggtaggggtgcggtagacgggcgttgcggggtttcgttgatttttagttttcgtagggtttttttaagcgtacggtgtagaataataagtattatacgtgtatcgagagttagagttgtaagatcgataagacgtagcgtaagcgttgttttttttgtcgtttttagaaatgtttgacggtggggatgcgtttggaaggtgcgcgtcgcgcgggtttcgatttttgattttttatagtttgagggggtagggggtgggggtgggagaggggttgaggggatagtattattggttttcgcgaaggtttttcgtgcgatattagggtttagtcgttgtaagagaatcgggcgttggcgttgggtgggtttcgggcggggaagggacgt

SEQ ID NO: 7304 - DNA, 5370 bp, Artificial Sequence
  Description of Artificial Sequence: Synthetic polynucleotide
cggtcggtttagcgtaggatttcgggataacggatggtaattgggggtcgttcggaggtttttaggattttattagtgttcgttgggttgggttggttcgttttagttttaagacgcgtagttttcggaatttttggagttgttcggtttagtcgcgtatagagtcggcggtagagcgggcgcgggtcgggttcggtagggggttgatcgggttcgagtgtcgggcggtggcggggaaggaggacgagaagcgtttattgttggtagttttgtttgtagtatagttttcgatttcggaagtagtagttggtggtgagggtttgttgatacgtcgcgtattgtaaatatttttcgtgttaggacgattcgttgattcgtattaggaagcggtcggagatgggtcgttggtagttttcgtagacggcgggatgcgggtagtcggagtttgtagcgtatagggcgaaagttcggtcgttagcgtcgttcggtttagtttcggcgtttcggtcgtatcgggtttatagttttcggtttcgagggttcgggtcgttcgggattatcgtttgtcgtttgcgtttttcggatcgtcgcgttaggggtcgggcggtttcggttagttcgttttagttttcgggtttcggcgtggagaggtcgcgggtttcgagttttggttcggcgttgtgtttttttttttttcggagaattcgcgtttcgtgttaagataaatgataacgagtacggcgtagggtggtcggttgggattaagataggcgaggtgaggttggggcgttcgttggttgatacgttttacggtggcgttcgtggttttttattttcgatttttttaaaatttgtggtttgagtgattagggagacgttttttttttagaattttttttattttaggtgattttgcgttttttttaagttcgttaaggtgattgttaggttttttattatttttgttattcgttatttattatatcggagtggtagttttagaatttaagtttggaaaggatggtgggtggcgattggagttgttttgtttttttaggacgtttgtcggaggcgtatttgcggttttttggcgattattttaggagttttgtttttgttttttttttatgttttgtaaatttattttttttattcgttggttttaacgttcgtgtttatagtcggacgacgttttattttacgttcgagattattcgggcgtttcgatttcgtatttatttagtagtatttttagagtggcgggttcggggcgtagggcgtgtttttttattttgatgtcgtttaatattttggcgtagttcgtttgttcgcgagggaagtatttttttagcgattcgggatttgttgttatatttatgggacgcggggcgcgttgcggatttcgtcggtcgggttgttcgttcgtcggttcgtttattcgtttttcgttgtcgcggttttggaatcggggaggcgcggttttcgtagggtaggggttgcgtcggttttcggcgatcgtggagcggcgacgcgttggtttcgggtttcggcgtcgtgcgggcgggtcggggcggttgtagttcgcgtcgcgttttttcggatatttgtagttacgcgcgtcggtttttttgttatttgtttgttagtttcggaattcggcggcggcggttgttgtagacggagtcgcggggaggaggcggcggcggcggtggcggtggcggcggcggtaggcgggggagggggtgggggtgtaggggcggtttcgcgggtcgcggggggggcgcgcggcgtagcggggtttcgggcggggcgtagcgggtcgcggggtttcgggcgcgtttttcgcgttattttagtgttatggtgcgttcgttgagtcgtcgggtttagagttggggttggcggcggagggatacgggtcgttttatttttcgaaattttttgatatttgaatttcgcggtcggtatttttgcgtcgggatgcgtcgtcggttttacgttaaatagtgtcgtttcgttttttcgcgcgtttcggggtttcgcgtttttggttcgcgtttcgcgtcgcgtttggtttcgagtttaggtttcggtttttcggttcggtcgtttcgcgggtttttcgtagaagttttgatcgttttcgaaataaatttttttgttttatttttttgaaaaattgatttgggagttggggagcgaaggttttttttttttttttttgttttttttattattaatattttgtaaagttttagcgttacgaggagtggtttcgagcgaggttagattgcgcggacggtagggagcgcggcggtttcgttaggggacggcgtcggtcgggagtggtcgtttgggaattttcgattgtcggtcgaggtaggtcgcgggggttgagtcggagtttttcgggcggcggcgtttgttcggggtcgtttggttcgcggagagggtcggtttttaggaacgaaggacgggggcgggtagaaggcgaggacggttggttttggattcgtgtaaggggggtttaggtttaggaacggggagtgagtttggagtgtgggtgaggggtttgggaaagtttcgggtttggtagagattgggcgggggattgagtcgatgggaggttggggtttcgggatcgagaatgggggatattgggacgataaggaaggttaggtttgggtttaggcgatcgagagtttagaggataattaaggttggaaaaggggttttcgggtaggggtaggagtagtgggtaagattcgggttttttagggtttgtagtgaggggcgttaggagggagtggtggttttagggtagcggttttgaagaaattaggttggttgttaagatcggggttttttggcgggtcgggtgttcggttaggggtcgttgggacgcgcggattaaggatagtgttttagttagtttgggtaaagtggatttcggtaacgggacgcgaaagttggcgagatggagttgtcgattttcgcgttagtcgggtttggtattcgcgttcggtgcgagaggttatagcgtcggatcggttgtttgcggttcgtggtttttatcgacgcgcggtttatcggggagtaggggggcggttgcggttcggggtagcggcgggttgatttttcgcgattcgttgcggggcggtttcggtttttttcggagcgaggtagcggcgcggagtcgggcgggggcggagggtatggggggcgggttttttgatttcgttggaggcgaaagggcggatcggatttggaatttgcgggaggtttggttagaagtggttttttgcgtcgcggggtttcgcggaggggttcggttttgtggaggattagaggttttcgttttattttatttgcgtgtgtgtcggtgggtatttgtgtgtgtttgtgcgtgtcgggttttcgtttttgcggtttttgttttcgtgtgttttttggttttgtatatacggtatgtgtgtttttgtaattttttagatttttaggggtgaatttgtggatttgtgtttgagttttttgtattcgtgtgtatgtgaatgtgtgggtttttcgtgtttgtgtttggggtgtgtgttcgtattattttatgcgggggtttaagtttttgtgcgtgttttagtttttgtgttgtgtttgcgatttttttttgtatgggtgtttttgttagttttgcgtatttgtgtttattttcggggttttgaatgtttttgtgtgttcgcgtgttttttagtgtgtgtgtgtgtgtgtgtgtttgtgtgtggtggggggttttgtgttttcgtgtatttttaggcgtttttgtgtggttaggtcggggagagtggatagttaatgtggagttttttttttatatttcggttttttttttgtttgatttggaaattttaggtttggattcgcgaagttgggttgggtttgagtcgtttttttcgggtatttggggcgggggcgcggttgttgtagggagaagtcgggcgggtaaggtttcggcgtatagagttagagtttcgaggcgcggagcgcggttcggggtcggcgggcggattaggtattttttgttttttgttggtcgcggtttatttttgtaatcggggttgggcgattgtttgtaggcgagagttttcgttttaggtttagatttttttttttttttttagggtgtatatggtaatattttttcgttataggttttgtatttttaatttttggcgtaaggttttattttttttttattttttttgtgtttggttttttttattttatagtttttttttttttttttttggttgaatgagggtttttgcgatttagttttttaggtttttttaattcgggttggcgtttagtgtcgatttggggtcgttggttgtgtttagaggcgtatttttcggattattcgaaggtttggttttaaggtaggaggatttgtgggaagtatttttttcgtgtcgcgtttggtttgttcgggtgcgtatgtatttttagcgtttttttcgcgtttttgttagttatattttacgttattaaggcggatatagggtggtttgtcgttatgcggttcgcgtttagataggggcgttggttcggtggacgttagagtttggttgttttttttggtttggggtggggttgttgagtttatattttttgggtttttttgtatgtttttttcgttgtttatttattttttttatatatatatatatatatatatatatatatatatatatatatatatatatatatatatatattttttttataggtttcgttttttgttttttgtttttatttttcgtgtttcgtgtttttagttgagttggtcggtttcgggtttttcgtacgtagacgcgtaggggttttagatttttttagtataatcggggttttcgcgtttttttatcgttttttttgtcgaagaagcgaagaagcggtcgattggacggtatagtaggggtcgaggtttagagtcggtttttgttcgtaggcggcgaacggtattttgtttcgttaggtttttgcgggtgtgattcgtgattcgtagattttttcgggcgtttttggtttatgacgcgggggttgttcgttttacgtaggcggtttcgggatgttttttcgtttagattttagcggtagaaatagtttcggattttttttatttgggggaaagattgagtcgggggttcggaattattggaagaagcgagaatggaaagggaggttttggagcgggggtttcggttttttttagtttgcggacgttttagttttattgagtttcgttttagttttttcgtttttttttttagggttttgtatttttttttttgcgttattcgtttttttcgagtacgg

SEQ ID NO: 7305 - DNA, 3120 bp, Artificial Sequence
  Description of Artificial Sequence: Synthetic polynucleotide
cggacggatcggcggacgttgcgggttcggtcgggttgataggaattatttgcgttgttttaggtcgtttttcggtttattgtttttttgaattcggtcggttttcgcgggtcgtttgatgtttgtagggttatagattttcgtatataaattatcgtcgcggggttgggggtggggcggaggcgttgaaatttaattcgtagagtttgtttcgtcgtcgtttttttgttttttttttcgttcgttcgacgttttttatttatttttttttaaataaggtttattttttttgttaaaaaaataaagttggtattaagtgtttcgagggagaaagttttttttttatttttgatttggaaggaagggtcggttgtcgattgagtcgggattgtagagggggttttaggagaggacgggcgggaggtgagtttagggtttttggttttatcggttttttttttcgttttcgtttgttcgttttatatttaatggtagcgaattttatggttttcggttatgttttgtttttttattcgttttgttcggaaagggttttttttatcggagttttcggtttttatgttgttagagatggaagtattattttttgttttttttttttttttataaaatagtttttgtttgtcgtttttacgaggtgatattttgtttttagttcgattttttttgcgttcggagtttgggttcggcgcgtaggagattgcgtgtattttggcgttttcgatttttgttagggcgtacggggattttagagcggattttttacgagttttaataggaggttagggagtcgggatattagagataaattttttcgaagttttttttcggttttattgattggagtttttgggttgaaattttacgagttttttatttttatgtttatgaggggagtaaaacggagttttcgggggtacgtaggtttcgtttttgggtgttggttttgtttttggtttttttagtcggtgtagtgattcggaatagcgcggtcgttttttcgacgttcgcggttttttattgcgtcgaggcgagcgttacggttaaagtttaagtttcggcgttcgttgcgtttgtcggagttttgtttgttcgagtaggtagcggggtttaggtacggcggcgacgtcgaagggttagtcggtagatagggttgggtttttgcggttagagcgtcgtaggaaagttttgtaaacggtgggacgagggtggcggcggcggcggcggaggtggcgagaaaggcgttacgggtttggcggagaagagggttttcgtgggggtggaataaaggaatttattttcggaagaaaggggtcgagtatgtagtcgggaatggttaattttggagatttgtaggagtgcgagcgttgcgatattagttttagggatttaacgaaatttgtttcgtcgagggttttagtttggtatttttattcggttttttttttttggttaatttcgttttaatgggggtggtgggtgtgtattcggagtgttattttttttgggaagaggggatagagtaggattcgtgttttcggttagaggaggtaaatatattttattaattttttttttatttattttttagtcgtggggttattgtttttattttttagacgttgttaattaaggtattcgtaaaattattttttttttcgtttttacggtaacgtttcggtttttgaggtttaagcgcgttcggaaacgaaaagcgttagggggttatagggtcggagtttttttttttcgtcgttttcggaaggggtggaggggatacggttgtaaggtgttcggttttttttttgtgtttgatatgaataaggggattaggatggtaagttttcgtcgtttatttcgtgggataaagggtttcgcggtttgagcggtatagtttttgattaaacgatagagttttgttatttagtattattttaggtatttgtgttcgtgatataattttattagaagataaaatcggcgaaattttttttataatgaaaagttatatttaatggtcggattttttttttattttttttttcggagtttgttcgttttttttcgttgttgttggatatggttcgtttataattggtatttaaagtattaagttcgggagaaaaacggggtttagggtttttgtaatttttttaaattgtttttgttcgaaatttttatagatataagtttgttaagagtaaatatttgtggattgatataattatattttttttttgtaaattaaatttaaaaaaaaaaaaataagataaaaaaaaatttgttattcgtcgttttcgggttggggcgtaggagggagggggttggggtcggttttagtattcgcgtcgggaattcggttttcgggtcgtttggttgtttttaggagttgagggatttcgtacgttttttaggcgggaaaagggttttagattttttttcgtaatttttaattttttgtttttttaataaataaatttttcgaatttgttgtttttggttagttcgagggggtcggtaggagggtttggggaggggcgagggttgtgtttaataaggaatgaaaatgttagtttttttcgttagttttattttttttagcgggagtttgtagtggttttaaggagaattattggttttttttggatcgcgtaaggttttatttggcggggtatttcgattttagtttaagagagttttcgagttattaagggttttcgaaacgttgagaagttcgaaagttgttgtagggttttggatttcgggttttagtttagcgcgttttaggatcgaatttttttataaattagttgttgggtgaaagggttgcgttttagaaagggtaggatcgtgtgcgcgtattagagcgcgcggtttttaaattcgggttaaatttttggtgatatcgaaatttattaatcgtcgttggtgttcgcggttcggttgcggagtttaggagtttatgtatggtgttattttatttttagtaaagaatatgttgtacgaatcgtcgagaggtgggtttggaggggtgcgcgggtggaggtcgttgaaagtcgttttattcgcgtgttcggacgtcgaaggaagttttttcgt

SEQ ID NO: 7306 - DNA, 3120 bp, Artificial Sequence; identical to SEQ ID NO: 7305
  Description of Artificial Sequence: Synthetic polynucleotide

SEQ ID NO: 7307 - DNA, 7861 bp, Artificial Sequence
  Description of Artificial Sequence: Synthetic polynucleotide
cggattttcggtacgggttgggaggagtttagaggcggggtgagttttaggttcgggcggtttagagtttcggtttagggggcgtttaggttaggagtgttcgtcgtttttagttcgggtggaagcggcgacggtcggacgttcgagttttattcgcgattagcgtttttcgtcggtttttgcgtttttttgttttagttcgcgcgtattttttatatgaggttgttgtttttgtagatgtttacgtgtttcggggcgattacgcggtcggtgaaggggtttatttcggttttcgttttgatttacgttttggagaagatgtcgaggttttcgttagggatggagttttgagcgatgattattttcgtaggtagtattaggttggatagtttttgtatttttgcggcggcggggttaggaaaatcggttagagttcgaggtagtcgaggttcggttttttttttttcgtcgggatttcggtttcggttttgtttagattagttaaatttaagtcggttttaaatttagagaagttattcgggtgtggaggaagtcggatgtgcggaggtttaacgattttttttttgtttgtaatttggagatttttcgtgttttggaaagcgagtggtgcgttggggattatttttagaagtgggtttttagttttttcgcgaatttttaaagtattcgtaattttttttattttttgtttcggataagtttaagaattaatgagttaacggtagcgagcggttttatgtatagggaaattgaggttaggttttgtaaggaggtgaaggttaatcggagattttttcgtttagtcggttttcgggagtttattgtgtgtttaggttttgggtattggtagaggagtcgggtcgtgattagcgttggggatagatttcgggttggtaggtgttggaggtgttaaagaagtatcggtagtagttggttaggttttgcgttcgttgtgtgatttcgggcgcgttcgagtttttttttgtttttaggttttggggtgttagggagggcggcgttcgggtttagataaatttcgatgttatttttttgggcggggaggagtcgcggcggtttttagtttttcgagggtttttttgtcgggtatttgcggtagggttggaagcggcgaggcgtataagggcggtttttatgttttataaggtttttttttaagttatttgggaaaatattcggcgagcgggtcggttgaaaggggggggttaaacggtgtttattgcggcgcggcgggtaatttgttacgttgttaaagtgatcgtatttattcggttttattcgaaagaaattgttaattttaaatttattagttttggaagaatgttgtagtagtaaattgtagtttaatgcggaggggatttgtttaaaaggggtcgaggaattttttttataaaaaagggggattagatggttgatatagcgtgaatggaagtggaattagtttttacggtaaattaagagaggaatagaaatcgtaaagggggaaaagagggcgacgcgtagagatgttagagttagggaaagatattgtttgcgggttgatgaatgaggaataagaatttgagatattttaaagaaaagaaatttttttcgttttttttttttttttttcgtttttttcgcggtttttttttttcgttcgttttttttttattttttttttagtttcggttgttttttaaagtttttggtttaagtgggaattttcgtgggttaagtttaagttaattaaatgaatttaaaattttttttttttgagttaattgttattatacgtttagtaaggttgtaaatgtcgggaattcgttagtttaagcgtaggaggggaagggaggggtcggcgggggcgtcggggtcgagcgacggggtcgtcggggtcggtttttgagtcgggtgggttgcggagttgtttggtggttcgcgttttggtttggtttatggggaaattgaggtgtatcgagcgtcgggagagtttaggttggcgcgagtagtagcgaggtcgggtattttagtcgcgtttcgcgtatcgttaggacgggaatgggggtcgtcgggaggagggattgcgtcgggtttcgacggttggatttatcgtcggagaaggattgcgttagtatttcggcggtgaaggttgttttggggttggcgtggtggtttttgttttcgaagagttgtttttcgagtacgttgcgttagcggtcgtataggaagttgtgtaggatgtcggaggtgataatttcggttagcgttagtttcggcgtttttagttcggttttgagtattagggttttagtcgggagtacggagtttattatgggcggttcggagtttttcggcgtcgggggacggtcgggtcgacgggggaggtgggcgggcgagaggggagtttaaggggcgagaggagagcgttgcgatggagaaggaattagagtagggggaggacggagaggaggaggacgtaggagggagcgggaggtgagggggcgattgggaggaaagcgaacgagggggagaggggaagagagatggtgaaatttgtagagatggtaaaggcggcgcggagggtggagagacgcgggtggaggcggaggcgggtgcggggggtgtagggtgggtgagaggcgggtggttgtagggaagcggtagtaaggggtttaggcgcgcgttagtttttcgtatattcggtcggggtcgttttttttttggtaaaattttagcgtttttataggagtcgtagtgatttttttaattggttattaatgattttttgacgtcggaggatagatttgttgtattcggttgggttcgaggagttttcgtcgcgagagcgcgaggggcgggggcgcgcggatcgttttaaatagtatttttttattttttttttttttttttggttttttttttttttttttgttttttttttttttttcgtgggaagcgtagggtagggagggaggtttagtcggttttgaggagaggaggggacggagaaggggagggggtgcggcgaggttttttaggattttagggattaggttagataagaggggacgtttggtttcgggtttcgcgttttttttaggtttgatttatgtttatcggtttggtttagttcggcgtttatttttattttgttgtttcggttggtcggtttagttttgtatcgtttttttttttcggttagagttcgcgttttttttttttttcggttttgtatttttcgggtcgttatagtcgtttcgagttcgcgcgtagttttagttgttacgcggattttttgtttagattgcgttgttgaagtcggcgtttcgttttatacgggtcgcgttaattcggtcgttgtgtacggtcgggtgcgaaattttttcgcgggtttacggggttgtcgaggcggggtcgtagcggtcgtcggggttggggttggtttcggtttgagatagttttatggaaggttaggttttcggtttttgcggggttaggtcgggggtcgagatgggcggataggaatcgttttggtagtttgtttttgggaaaagaattttttacgggatatagggggattgaaaggggtttcgagattttttttaggtgggagtaggcgtgtttgagagcgaagttttttagaaattgtaggtagtttcgcgagaggttttagtgcgggttcggtttgcggttcggtttttcggttttttgttgagttgtaatttcgggaagtcggtggcgttgcggcgtttttttttttttgttttttagtttttttttttttttttgtttttttttttttttttttttttttttttattttttttgtttattattttaggagtagatttgttttgcggcggtttcgaggtatttcggagtttagcgattttttttttcgaagtaggtagttgttgagtttagcggaaggtttcgttttttgtaggtttcgcggttttttagtgttagttttaagtttcggattttaggttttgatatgttgggtgagggagtttattttatttgtcgtatttttggtttttattattagtttataattttagatgtcgttaatagaggtgtttggattttttcggcgtgggttaggtttacggattagttttcgttggattgtgtggattttttagattttttttttagcgcggaggatttgggtggaagaatagcgagttgattttttatgagcgagattttgtttaaacgtttgttggtatagacgtttttttattattcggacgcgttttggttaagagggttttatatttggcgtttagattttagatttttggtttttagtttttgttagtagttttcggtatttttcgttttcgttgggacgtaaagggaggaaggcggcggtagttggtttttagattttgcgttcgggttcgttcgaggttggagtttaaggaagggtatatttggtagaaggtaggatcgttgggtagggcgttagtagagggtagcgttgttgaggagggaggtgggttagggtcgtcgaattttttatttatttttcgacgtagtttgtgggtcgtatcggttttttggttagagttcgagtttgagggggcgtatggagttcgatggtttttgtaggggagttttatcggggtttattttttggtttttgggaagatttaggtggagaggataaagtgttaggagcgagggagacgacgtcggggagcgttgttaggagttaagcgttgcggtagtttttaagtttcgaaagcgattttagtttttttaggatattaaagggggataaggattgttgtgtgttttgtggattgttttttttttttttgggtttcggtgtttttgtttgtgtaatggtttgagttggattttgtgaattgaggtttttttgtttggtttttttttgggtaagattattttattttacgataatttcgaggattttgttttttttagggttacgttttattgcgggaagtttttaggtttgtgtatttttcgtgttggggtgtagcgtttgggttttgaatttcggtttagagttagaggtttggatttcgttggcgtagtgattacgggttcggattgcggttagggagttttatttttttttttcggattcgtaagttcggagagtagtattgggagtcgggtagaagcggagcgtagaacgtttttttagttggtgcgtttaaatttttatcgcgtttatattttgtgtttttagtttagcggtaaaatttatttggattttcgttcggggaaaaaggagttcgtaggtagcgtttagttttaaggtgtattgaaatagggagtaagattttgtgtttatattttttcgggaggagatttcgaggggaaatatttcgggtttttttagcggatgattcgtgttattttgttatttttcgcggggtttaggcgcggaatgtgttcgcgtaaaagtttttttttttcggtcgggtcggagtttttaggtttcgtcgtttttttcgttcgttggtcgttatttggcgatttttttaatatttatgggcgttaatagagaggtttttagtatatcggtttattgtgggcggttcgtaggatttgaataggtttcggtttttttttttcggcgcggtttttcgaggggtcgggttaggagtgaatggtttcgtttttcgtttcgcgtttttttttttttttagggagaatatttttattttttttttcgttgtcgtcgtcgttcgggtttttatttacgcggtttcggtttcgggcggaacgaattaatttgtcgcggtttttcggaggttattttcgtcgttcgggtgttttttttttttgagtttacgggagtggagagagggtcgtcgcggtaggtcgacggttttacggagggatattgaaggggaagtggaggagaagagtaggggcgattcggaggggtggttgggtcggggcgggtaagatagttttagggttcggtagtcgttcggggttggttaatttttagttgttgtttcgtttagggcggagcgtcgaggggaaggaggtcgcggtttaagttcggaggttcgttcgttttttttttgaggtattagcgcgcgttttttcggttcggttgaggtatttatgagaacgggggcgtgtgggatagtttagggtttcgtacgacgttttcgttttcgtcggtgcgtcggggtttagtttcgggagagttaggtttcgatagtgcgttttagggggacgttcggaagggcggtcggtttcgcggtttttgcgttttcgttttggggttcgggtttgggtgcgggggaggggggtgcgagtcggttaggcggggttaaagcgtacgggttttcgttttgttcgtttcgtcggtttttagaggcgtagaaagaagtttattgttcgtcgagaaatatatttttgggggtcgagtgaaagttcgttttttttttgaattttagaagaaagttttttgttttcgtttttcggagggagagatttgttttttttttcgggagtttcgcgcgtttttttttttcgaaatatttgtcgggggaaaatttattttggagggtagatcgcgttcgttttaagtttggcgaatttattaaaaagatattagcggcgggggtaggtttcgcgtaggtatcgatcggtcggaatgagttcgaggaagaaaaggcgaagaatgcgttcgcgtcgcgtttagacgtttattcgtttcgtttagtttttgcgttttagtttcgtatagggagaggggttttcgcgtcgtttcgtattgtttgtgagtttcgcggttcgcggtttagtcgtttttattcgggtttttcggtatagtttttcggtaatttttttttgtcggtgttgcgtttcgttttggttttttttgcgcgtaggttttcggtcgtttttttttttcgttcgttgtcgtcgcgcgtttagtattcgcgttttttttttttttttttttttttttttttttttttttagcgtttttttttttcgttggcgtttcgattttttttttagtttcgtatatttttttcgtttttttttcgtacgtttttttttggttttttgagttttaatttttcgtagtggtttaggaaatttttttttcgcgtggggttcgcgtcgtttttttttttttattttcgtttttcgtaagacggtttagggttttagggcgttttcgtcggcgcgtataaaggcgcggttggttgttaaggcgggtgggggcgaggtcgaaaaaaacggttttaatagacgtgattcggggttaggtttgcgcggggttgtcggcggagtggcggtttcggtttagtgaatggggatagcggtttttttttttattttatttttgtttttttttaatgtaattagtttttaaggttcgggagagataaaggcgcgtttcggggcgtttacgtggagtgcgtaggcgcgaagtcggcgtttcgatcggtaggtgattggtacgcgagtttttttaggcgtttaggggcggaggaggggaagttttttttttgcgtttttcgaatttttttttatcgtttatatttcggtttttaggttagcgatgttagcgttatagtttaggttgattaaggcggcgggaacgacgggagagacgtcggggatattaggagatcgggcggtgggagagatagaggcgtaggtttttggaagtagagggggcgagataggggtcgggggagattgaggtaaggcgatgtcgaggtggagggagtagatgaaaggtcgagtcggagacgtaggggtataaagattcggagatgaaggaagtagagggggagaggtacggttttcgaaagagcgg

SEQ ID NO: 7308 - DNA, 1434 bp, Artificial Sequence
  Description of Artificial Sequence: Synthetic polynucleotide
cggtttcgcggcgaggggtttagacgaaggaaacgtcgttttaggggcgcgcgggcggagatggagtggtttaggttgggggagcggggagtagggtcgttatcgttgcgtcggttcgcgacgtttgtttttgttcgttttgtttttcgtcgtttttttgggcgattcgggtttcgcgcggcgttcgtttagttcggggtttcggattgaggagggggaggaggaggaggaggaggagtcgcgttaaggcggtcggcgggcgtatttacgtcggtgttgcggtttagcgtttcgtcgtcggtcgtcgagagtttggtggtgttgaggtttattagcgagggtagcgtttgggatatttagttagtgattatggttatggtgtttagtacgatttcgattttgagtagcggtatcgatatcgcgtttcgagttgtttttagcgttcgtttcgagttggtatcggttttcgcgtttaggcggtttttaggcggcgggtatcgcggcgggtaggggcgtttggttgtgttttcgcgttttttcggttcgtcgtcgttcgttcgtcgtcgtcgtcgtttcgcgcgtttcggttatcgtcgtgtttttttcgggcgttagggaaggtggttaggtggtttttgttcgtcgcgttttgcgtttcgcgtcgttcgttttgcgttttgttttgttcggttgcgttttttcgggttttttcgtcgttatcgggaagcgtcgttcggttttgagcgttgcgcgggttgcgcgcgggggtcgcggtcgggaggcggggttcggtcgggcgggatcgacgtaattcgtttaggaaatgggtggattttttttttcgttcggtttttcgtcgttttttggttgttggtagcgaggtttgtaaattttagttcgtttaggagttgggattagggtgatatgaggagacggatatattattatttttagattataaaatattcggcggcggcgcggggattttagttgggggtacggttcgcggttttttcgtttcggggttttttttatttttacgtcggggtattttttttcgattttcgtagagggttcgttttggggtaaaggttgtcggtagagagacggcgtcgttttgtttattggagttttttttcgcggtgattcgagggttttagttagtttgggtcgtcgtttgaaatttagtaggtagggtaggtttcgaaaagtagttagattcgcgagggtttttagcgttaggggggcgtcggggtatcggtggagagttaaaggcgtttttgcgattttagggtagtcgcggtgttttaaggttttgtttgggaggaagggagttaatcggtatttttgatatttgtatagtaaggcgggggttggggtggtttgtcgtggttcgcggtgcgtagtgagggttttgggagggcgtatattcgg

SEQ ID NO: 7309 - DNA, 5053 bp, Artificial Sequence
  Description of Artificial Sequence: Synthetic polynucleotide
cggttcggtattttgcggtttcggtacgtagttttcggcgttatatttattttttttgcgtttcgggttgagttttcgtcgattatttgttgttttcgaggttaaattttagcggcgggaggattttgttgttttttcgatttttttttcgggaattttagtttttttggcgtgtgttttagtttaggtttttgtttttgggtcgtttcggcgtaggaagttgcggggtcgggacgaacgttggcgggaagttttgatttgggtttttttttatcggtgttcgttttcgggtcgggtacgcggggcggtttttgggtatcgtaggtttcggcgtaaaggcgtttagagttcgtagtggttcgggttggttttcgcgattttcggtttcgtttcgtttcgcggtttcgtttttcggtcgtttcgtttttcgttcggttagaggtttcgggttttagggcggttcgcgggcgtagcgtttagtagtattcggagtcgtttggacgtcggttcggggttattgcggggtggcgtcgttgggttcgggaaagttcgggattggagagtggcgacgtcgggcggcgggatttatggaggcgcgcggggagttgggttcggttcgggagtcggcgggaggcgatttgttgttagtattgttggcgcggagggcggatttgcgtcgaggtgggtgttcgggtcgagtggttgtatcggggagattaggagatttttaggttttttcgggtttggtcgcggaggttggtaggagttagaggatttgggcgggagtgggcgcgaggatttcggaacgttcgcgtttgggcgttttagtttgtatttgttgtagggtttttggtttgggttgttagggagtgagtgaggttgtggtattgcgttgtttcggttagggagttttcgggggtttagggtgggtttaggagatttttgtagttcggagttagttttttgggttggaggaggcgtagggagtagtggcggggtagtgattacgggataggagggtttttaagaaggtcgttttagtcggattttttttacgttttagcggaatagagttagatgtaggggttaaggtcgagttgaatttcgatcgtcggttttttcgaagttaggttttagcgtttgcgtttatagatattcgttcggtttattttcgtttagggttcgtttgtaggaaaaagttttttttttttaggttttttagttttttggtggtattattttagtttttagtattttggtttttagggaatttgggtagtttttttcgattttcgggttagttggagtcgtaggatggggaaggaggtttcggagttagtggggagtgagagggatcggtcggcgggaagggggttatatttaggttgtgggggttcgcggttttttatttatttatttatttttcgacggtttttgggaggggttggtcgcgggggttggggggcggagagagggagggaggaaggaggattgcgcgttcgcgttcgggagagttggtcggagcgggcgggttggcgtttaggtttcgtcgatttcgttatttttgatataggagttttcgttagggttggagtcgttatgtagcgtaaggttggggtcgcgggcgcggcgcggggtgggttggggcggtttttgttcgacgcgggcgtcggcggcgagttgcggtcgaggcgttgttcggttcgcggtgttgaattcgcgttgtgtcggtttgtcgggtcgtttcgtttcgagtcgggttttcgtttgcgatcgttgtttacgatggggatttcgggcgcgtagcgggttttcgacgtttcgtattcggagttgcggttttgtcggatgcggggcgtatttatcgtcggtttttcgttattgcgtggggaggcgtagtttagtttttttcgtcggaggtcgagggagtttttttttggtgttttttatttattgggagatgggttggagtcggcggggtttatagttagggaggcgggtgtaatatgttagtaaatttcggtttttttagcgggtattttttttttttagagattttttttaagtgaagagggagtttttagtttttgatatttggaaaattcgtttatagattcgaggtttttatagggtatttttggatttttttagtgtggtttttttagggggtttgtagtatcgaagtggggtgtggggggtagaagtagcgggaagttagacgtttgagtaattttgacggtgttgggggtatttacgtttgatataaaggtagtggatcggtttgtttagtttatttataagtaattttgcggttgtttaatgatggggaaggtattgatatttatttcggaggtttgtagatagggttattaggtagggtagttatatttgcgaggagtttttagaaagagtggttatgacgtttaatatgaaggagattcgatggggtgttttagttttaggtgatggtgaagattcgtttttttatgttttttgtcgggttttagagagtagatttttttggggtggggtttttatttgagttttatatgtattttttttggtattggtaatattttgtaattgagtatttagtttcgtgaaatggtttgggttgtttttttgtttatatatatttttagatcgatgttagtttttttttagtttttgatataggatgcggtgtttgtatattttcggaatttgcggggttatttaagttggttggggaagagggtgtgtagggaaaggaggatttttcggtagttttgagttttgtgggtcggaggggagattggttcgcgttggggtgggaaggtggttttattgttttttggtttacgaggtgatttagaattttttcgtgtttatagagatttcgttgtgcgttggttgtgattagtatattttggatcgttttatttttaaggttttggatcgttattggtatagtaagtgttttaagtgtagcgattgttatacgttattggtcgagcgttgttttagtcgaggggagagcgtttattgtaaggacgatttttttaagtgagtttcgaaattttattttagtgtgggagcggagggtacgtttgttttagggatttttttttttataattattaaggttaggttttcgaagtttgcgtttttcgtaattttagtttatttttgttatttaggtagggtattttgtggtttggttaaattaagggtggggtttttttatgggtgttttttgggtggttgggtttggttgggatattagtaagtattatttggaaaaaaaagtaatttattatttaaattatagaagtagttattagagaagatatatttttatttgtaggattttattggatttagttttttcgaaattggtgatgttttagtttttaatgttggtatttagcggttttggtttagtggtttttatggttttagttgtggggtgtgagggattggttttagatgggtttttttttttcggatttatttttttagatttagtatgggttttgtaggtaatggcggttgggtttttcgaggtttttttgagattgaggttttttttttagtgggagtgggtagttttgtttcggcggttaggttggcgattattttgtagggtcggatagagttttttttcggggtcgtttttttaggtagtcgtttgtttttttttaattcgttcggggcgaaatgagtttcgcgttttcgcgttgagttcggttttgtgcgtttcgtaggcgtttcgggattaagtgcgtcgcgtgttagttgggtatttcgtttacgtaggtggtgcgtcgcgtttaggatttcgtgtattatttgtattgttttgtttgcgtcgtgtgtaagcggtagttggttacgggcgacgagttttattttatggaggatagtcggttcgtgtgtaaggcggattacgaaatcgttaagtagcgaggttagtcgaggggacgacgtttttattttttttggtttgaaaaaaatggggttgaggttacgtttaggggggcgttcggggaaattttttttttaagcgtttattaagggggtttgggttagggcggtgtaggtagtaggaagtcgaggtcgggaacggcggagttacggatagattcgcgtttcgaatcgtttcgttcggttcgaagtgtgcggtttttcgtttttggtcggaattatcgttttaaatttttggtcgcgaaggttgggttatatttatatttttagaataaaggggagttcgcggggaaattagggtgtttggagaagggagttaaggttgaaggcgggggcgtcgtggaggtgcgattttagggaaggcgtcgttttcgttttcgcggtagaattcgtttttcgtcggcgttttttttattttagttcgggtgttgttcgtttttgttaatcgtttttagcgttcgcgtttttcgagaagtttgtggggcgggatgggggtgggtatttgaggtttcgacgttttcgcgtcggtcggggtgggagggttgggggttcggtcggggtcggaggggttgtcgcgttttatcgttcgttcgtcgcgtagaggtcgaggttacggttaagcggtcgcgtacgattattatcgttaagtagttggagacgttgaagagcgtttataatatttcgtttaagtcggcgcgttacgtgcgcgagtagttttcgttcgagacgggtttggatatgcgcgtggtgtaggttagcgttcgtttttgtttttttttcgttcgcggttttgggggttttcgtagagtcgggcggtcgtttatttcgtttcgtttttaggtttggttttagaatcgtcgggttaaggagaagaggttgaagaaggacgtcggtcggtagcgttgggggtagtattttcgtaatatgaagcgttttcgcggcggttttaagtcggataaggatagcgtttaggaggggtaggatagcgacgttgaggttttttttttcggtaggcggagggatcgcggagttcggggggggacgagcgcgcgtcggcggggtcgtaggggttttagggagttcgcgg

SEQ ID NO: 7310 - DNA, 6343 bp, Artificial Sequence
  Description of Artificial Sequence: Synthetic polynucleotide
cggtagggcgggacggggttgcggtttattatggaatagtcgtatacgtgaatttttttgttttgattttggtgggagatgcgttcgtcgtttagatatttatagtcgtagttttgtttttgtatgtcgttcgatattttgtcgtagatgttcgttgggatgggagggcggttttaggacgtgttttggtcgtttttggaggtcgcgggaggaatttttagtcgaaggggtttgaaattttagttttgaatagttttttttttaggagagacgaagttttttgaggttgggatagggatgaatgagcgaaggagggtggaatcggggagggcgcgggaattgggagattgttggggagggtgttaggtcgtgttacgtttttttcgtttaggattttagtttgggttaaatttagtaggggtaggattcggagtagagcgtagttcgttacggttcgtagtttcgttttcgtttcgttagtttcgtttttgtttcgttagtttcgttttcgtttcgttagtttcgttttcgtttcgttaggcgtgtttttggtatgttcgtaggtttcgtttttattatggtatttagtttatttgtagtcgcgtacgatttttttgttttttgtagtcggagtttcggagcggggagtcgagtggattcggattagtatatatttgaagacgtcgtcggagtcgatgtttatattaggaatgagagcgaggttcgttatcgttatgttttttttttcggagttttttttttttattcgattcgggggtcgtttgtattgcgggaggcgggttttgcgagagcgacgattaatttcgtcggggaatgttttttaaggtttagcgttttagttaattgtatcgtcgatcgaggtacgtgttgattaatcgtaatttagttttttgtcgttttgcggtttcgttagtttcgtttaaaggaaacgtggaatcgggaatgggtggtgatgaaatttagttaacggagaagtttttttttagcggggttcggtggtatttttggaacggggtagttaggcggttcgcgaggttggggtaacgagggaggtttgagggatttgttagttttgattttttgtttcgtacgtagttcgaagattatttttttcgtggtttttatcgtttaaaggttttttttttttttttttttatcgttcgaaggtttttttttttttcgttttttatcgttcgaaggtttcgttttttattttttttatcgttcgaaggattttttttttttttcgtttatcgttcgaaggttttttttttttttttttttatcgatcgaaggttttcgtttttaatttcgttatcggtataaggaggtaacggtagtcgttatatttaagttttattttatttggttcgaaagtttttgttttttggaaattatttcggtttaggggcgttttcggtcggtttttaggggtggggtcgaatgtagaggttttggggtagggggcgcggggcgcggcggcgggtgggtaagcgggacgtttggtcggtgtagacgcgcggggacgagatgggcgtgtcgggtgcgaaagtaggagcggaggcgggggtgtttaattttttttatttggtgtttttttttttggtttcgaagtagggttggggattttaggagggtttttgcgtttggtttttatttttttttcgtatattttattttttagagagttttgggcgcggattagggtgtatttgggggataggtggaggtcgggtcgtcgggtttgcgtttttacgttcgtagtacggcgtgcggttagagcgggtgtgcggggatttttcgggataggttaagttttttcgggtgggtttttacgtttattaattagtttttttttttatttgttcgtattacgttttgttttttaggtttttatttgggaacgtttcgttttttggtttttttttttttagttaggtgttagttttggttaggtttaggtgttttgttttttttgtttaggttttttgttttttcggttgggagatttgtatatcggtttgaagatttttttgcggttttttttagtttttgtagggtttagattgtagcggttggaggcgaagggacggtagggcgcgtggcgtggttagtgtgttggtttcgattagcgggaacgtattgcgtatcgttcgttttgtttatcgtttcggcgggacgcgttcgcgtatacggacgtatagaggtcgattagggtgttttttagcgaggaggtaatatagtcgcgggaggcggggcggggcgtgtttaaagtgatagattgggttttggttacgtcgggtttttggacgaggggaaatcggagtcggggaggttttagcgagagtttcgcggatcgacggggatcggatttttacgggtggggtttgtgtagtagtgattttttcgagtgaaggtagagttcggcggtttttaggtttatttcgttttttagcggggagtatcgagggcgaggatcgattttttttggggattttcgagggcgagttgggagagggaggaggttcggaggagggagaggggttgttgggggtgggaaggcgaagggtttgtgaggaatattacggggacgaagggtcggggggtgggggtttgggcggagttggaggtcgaattgagcggagtttggaaggttggggaattagaggcggggtttagaagaagtcggggtggggttttggcggggttcgggggcggttttgggtgggtcgggcggggtttgagtgggtagggtagggttcgggttagcgtttgggttaggtttggtgggttcggcgttttatatgatgtcgtttagtaggttggcgttggttatttagtcgagcgcgcgcggttcggaggcggttatgattatgtatatgaaggggcggtcggtgcgtcggttcgtggggtagatggtggtgggcgtgaagcgtttgttggtttcgacgaattcgtaaagttgttcgtagacgcgcgggaattcgtggcgtaggaagacgtcgcgtagtcgtagttcgcgttggatgtggatgaaggttatttcgcgcgcgcgtcggttcgtttcgtcgttttgatttaggttcgtcgtgttcggcggtggcgttaggattagcgtttttatgtcgggttcgcggtttcgcgtcgggggcggtcgcgcggggttgtcggtcgttagcgttattttggcgaatttgcgtattgttggttcgtggttgcgtggcgcgggcgcgggtagggtcggtgttttcggtggcgcggtgtcgggttttacggttacggatacgttgagtaggaagtattttgtcggttcgtagaggcgtttagcggtcgttagttcgcgcgcgtagttgtttaggggcgtcgcgtgtgtggttagtttacgtagcgataggtaggtgggggatagtagtagtttttttaggttaaagcgtaggaagttgtcggtcgagtttggatttgggaagtttaggaagagtacgtcgcggtcgcgcgataggaagtcgatacgcgcgatgcgcgagaaagcgcggtgtatcgggtcgttgtcgcggtaaaattgtagtacgtggcggtatacgttgtttacgcggtcgtatacgtagcgcgttttgtgggcgttttagttttcgcggcggtataggcgcgagtagtagtaggtgtagtagttgtggtaggatttgaagtagaggtaggcgttgaatatggtttcggtgcgtcggtagcgcgtattggagtaggttattaggtcgttttcgtcggcgttgggttcgggggacgcgtcggtcgtttttttcggggtcgcgggtttttcggcgttgtcggtcgaggcggggggcgagcgtggcggcgttagcgcgggggtttcggagttcgcgggtcgcgagtttagtagtcggcgtagttgggggtttaggtagtcggtcgcgggttttgaggtttggtcggcggtgggtcgcgagtcgatgattaggttcgtgatgagttcgtttagttgttttaggtttcgttggcggttagaggtggggtcgtcgggggtcgcgtggggaggtggtcgcgtgcggttttcgggtaatttttaggttttggcgttcgggcgttcggtggcgcgtaggttattgttagtgatggtgatttcgggcgttacgtattagttgcggtttaggttttcgttcgcgcggttttttttcgttagcgacgtttcggatagggatagtgcggcgtagcgtttgggagaggtggataggtttacgacgacgggcgggcgtcggttttcgggggatacgtttcgcggttttcgtatttcgcgttttagtaggttttcgtagttgcggtcgcggtttaacgggttttttcggcgcggtttcggggttagaatgttgttttaggagcgcgagtagtggcggttgtcggtggttagtcggggcggattggtgtcggtgtcgtcgtgttaggaggcgagtaacgggtcggggttagagggcggtattatttgtagggtgcggtacggtcgcgggttttagttcgtttaggtcgggttgttgcgcgggtgcgggtacgttcgagttaggacgttacgttcgcggtatttttcgaagtttttcgtgtaaaaggggcgggcggtggagtgggttcggggtttttcggggatatagcggggttcgtagggtaggtcgtaggttcgtggagtttttttatagtaggagcgggagggcggtttttggattgggaaggtgcgtattttttttgcgtagtagtcgtttatgcgttttggattgggtttcgagagtttttcggacggatagggtttggggtagtaggcgtcgaaggttgggtcgggattggttgtaaagttgtttcggaagttttggggtttttttgtatagaagaattgggtggggttcggcggggtggtgaagggtagattgcggcgttcggcgtagtttcggggtttaggtaggggttcgtcgtagtagaacgttcggggattcgtatagtatgagtcgttgggcgtcggggtgcgcgatagcgttatgtggcggggttcgggtatcgtgaggtcgtggaattgcggggcggggcgggtttagtgcgcggtttcggtgggttcgtaggatcgcgagtttcgggtggcgtgttggagtattgcgtcgtttggtttgatgtttaggcggtagcgtacgtggggggcgggattcgcgggtggttcgggcggtgcgtagcggttcgcggcggcgtataggggcgcgacgcggtcggggtcgtttcgttgcggttgtaatttgatgggatgtagttcgttggtaagggcgcggagcgtcgggtacgcgggttttcggcgcggcgatgtttcggttcgcgtcgtacgttgggtttttcgttttcggcggggtaatatcggcggcgaggcgggcgcgggcgttaggttcgggggcgcgcggggcgtatttttggagcgggcgcggcggcgtggttcggtttcgcgggttcgggcgcgcggtatagcggatttcggcggcggtggtttcggtagggtttttatggtcggttcgtttagcgtttttaggaagtcgaagttgcggtagtggcgtttgttgaaaggcgcgggtttagtaggtcgggttacggatcgtttatatggcgagtatttggacgcgggtttcggggtcgttattttgatgttttggtatacggtcgatattagtaggttcggagggttcgtacgggttattttaaaagaggtttttaggttggcggttttagtttatattgttttgcggggtttttgttttggggggagacgcgggttagggcggtttttttcgtagtttaggtttcgttatttttttacgttggttcggtttatttggggcgtagcgggcggagtagttttggttgcgggtttgggtcgagaacgcgggcgttttttttatgtcggggttagaagtatttgcgggaggaatttagttgtttaggcgttcgttttgttcgttttttcgttttttttttgcgatggggcgggcgggttagaaaggtttagtcgtggttgtggttttcgcggcgggagttttcgcgtgaagttttagggttttttttttttcgattagtgacggcggggtcggttcgggtggattttttttcgggtggggtaggggagtgggggcgtggttttggggttgcgttttttggtgttcgtagttggaaggacgggtcgtatttgggttttatttataggtgttgttttaggagacgttagtgattgcgttttcgttatagcgtttattgtagagcgattttttcgatcgcgtatagtggaaggcga

SEQ ID NO: 7311 - DNA, 1089 bp, Artificial Sequence
  Description of Artificial Sequence: Synthetic polynucleotide
cgttgaggggtcgtatttattcgcgtaggtattagtaggtagttttggcgttcgcgggaggcggtcgggggcgggggtttttcggtgtttatcgtcgtttttgcggttgggttcgcgtttcgggtcggtcgagtttaacgttaggatttcgttcgagttttttagggtttcgttaggcgtcgcgttcgcgttcgcgtttttttgtcggtttcggttcgggttttatcggggcgtagggttggggaatcggagtttcgttcgtcgattcggagtatcgtttacgtagattcgtttcgggcgagggaggggtcgggcgcgtattcgcggggagggcggcgagcggggattagtcgaagtcgggagaggggcgtttttacggggcgggaaattggcgcgcgattttgggggaagtgtaggatggggggataggggcgttttcgcgggggtggatgggggattatagcggggttggcggggtaggggtcggcgtacgaggttggaggaggggagcgcgcgtttttattcgggttgggtcgtcgaggttcgcggcgtatcgtggcggcggtgggcggaggggggcggggggtatttttttttttttgtggcgtaggtgggcgcgttttggatcggtttgacgattttttttcgtcgttttatttttttggttaaaggtttttagtttttaattagggatatttttagtttatagtttcgaagttatgggtttttttcggttttttgaagtcgttatatttgtgttagtcggtcgcgtttttagattttttttcgcggagtttttttagtatttggagacgtagcgtagggtttcgaggacggtttggttcggagaaaagatatcgaagttttaattttttttaatttcgttttttttttttttttatttttttttttcgtttttaaagttcgggggttttatttttttttcggttcgcggagtttttcgaattttgcggggattcggcgttcggcggtgtttttttggggcgtacggggttggggcgggagcgaggagattaggtggggaggggattttagattttagacgttaggggagacggcgtttttcgt

SEQ ID NO: 7312 - DNA, 1020 bp, Artificial Sequence
  Description of Artificial Sequence: Synthetic polynucleotide
cgtagagatcgtagagattaaggaggcgttcgcggttgtagagttgtagagcgggattttttcgagttgtttgtgttcgggtagtcggcgcgtaattgagttagaggatagcgtattttttcggcgcgggtcggtagggtttttgcggtcggtaagttggtttttcgggtggttatcgggattttcgagtttaatggcgggggcggcggtaaaatcgataatattgtagagattatttttatttttaacggagtaagtgttcgagttttaggtggcgacgttatttttttttagtattttcgttttcgcggagcgtttggtattttttttttgcgtatttttcgtttttgattgtttttttagtttttttttttatttgttttttgtttttgttttgcggtttttttcgttttattttttttttgttattttttgttttttaatagtaggtcgggattttcggagatgcggtgtttacggagtagttgtagggtgagcgggagcgcgagcgggagggggagggagacgcgggcggcgacggattgggtagtagtttgtcgttggtcgtgtttttaggtttttttagttttgaggcgttgttcgtttaggtgggggcgttgggcggcggttagtagttgtagttcggtttttgttgtttgtcggtgtttttcgtggttttgggtatggtttcggattttatttttacgttggcgttttcgttgtattgttattacggggtttttttttttaatgtttttggttgggagtagttttttaatgttagcggcgttagcgtcgttagcgttgttttagtagttagcgtcgttagtcgtgtcgttattagtatcgatttttcgtgtagcggtttcgtttcgtcggattttaattattgttttaaggattgggattataatggtttttttgtgtttattattaacgttatcggttaggtgaggcggttaggcgggtcgcgggtttgggggcgggtagagagcggcgagggcggggttttacgttcgt

SEQ ID NO: 7313 - DNA, 6343 bp, Artificial Sequence; identical to SEQ ID NO: 7310
  Description of Artificial Sequence: Synthetic polynucleotide

SEQ ID NO: 7314 - DNA, 1109 bp, Artificial Sequence
  Description of Artificial Sequence: Synthetic polynucleotide
cgatatagggtggcgtgtagggagcgtgttttggtattaggcgggcgcgagggggtagggcgtacgttcgggatacgttttagggaaatcgtttttgggtttggtagttgaatttagacgtcgagtgtagttcgttcggtgcgcgcggcgttttattgttagatttcggaaattagttgttagggtggggtcgcgttttggcgacggttattcggttatttttgtcgttttcgttttttttaagagatttttttagcgggttaattttttgttcgggtaaattttttggtgagtttttcgttttttttttttcgttttttttttttttatttttgttgtttcggttttttagttcgttcgcgtcgcgttttatcgttttcgtacgttcgggcgtacgtttttttcgttcgggtcgttttttggtttttcgcgttcggtagttagtgttttatcgcgtcgtttcgcgttagggttcgtttcgagagtcgtttttttttcgtcgcggtcggcgcgggtttttcggttatgcgttttcgagttttagtttgcgtcgtcgcggcgttcgggttttgtagttttttgttgttgttcgcgttcgggtacgcgtgtttcgcgggttgcgtttgtatcgattcgtatatcgtggattgtcgcgatcgcgggttgtttagcgtgttagattttttttttttggacgtgcgtaagttgttggtggtcggtaatcgtatttagcggattttcgaggatttttttattttttacggcgatttggtttatttggattttaggaataattcgttgcgttcgttggaggagggtacgtttagcggttcggttaagttcgtgtttttcgattttagttataataatttgatttagttgggcgtcggcgtttttcgttcggtcgggaggttggtgaagtttagtttggttaataataatttggtgggcgtgtacgaggacgttttcgagattttggagtcgttgtaggtgttggagtttaacgataataatttgcgtagttttagcgtggtcgttttggtcgcgttgttcgcgttgcgttttttgcgtttggacgggaatttttggttgtgcgattgtgatttcgt

SEQ ID NO: 7315 - DNA, 1109 bp, Artificial Sequence; identical to SEQ ID NO: 7314
  Description of Artificial Sequence: Synthetic polynucleotide

SEQ ID NO: 7316 - DNA, 1384 bp, Artificial Sequence
  Description of Artificial Sequence: Synthetic polynucleotide
cggaagggattcgtcggttgcgtttcgtttaggttggtcggggtcggtgtgatcgtgtgatttcgtgtatattgcgttcgggttttcgtgaatgatagtagtttgtaatttttagtcggagagtagcggtggttatcgtcgggcggaaagggttataagttagaatgtaaagcgatttcgtttcgggtgtgggggatttcgggttttcggttattttcgaggtcgggcgtgttttgttcgttttttttcgttttgggcgtcggggcgattttattttgcgttttaagttgggggttttttatgttcgtcgtcgtcgagtttttcgtcgtcgaggcgttggtcgcggttttcgggttcgggtcggggtcgtcgtcgtcgtttagtttcgttagttttcggttggtggtcgtgagttcggttcgtaggttggttattttttggttggtcgattggatcgttttatcgatgcggagcgcgagttgtttattgttttttattatgtttaggattttggtttgggggcgagagaggtgataaagagttgtatgatgcgcggggggcgcgcggtcgggtattttcggttttatttgttgtgtttttcgcggttcggtttcgttcgcgtttcgatttttaggtatcggtagcgtcggttttttcggtataggaatgatagcggcgtttttagttttagtcgcggcggtggcgaggcggcggggggaggaggcggaggagaaaaaagaggaggagaaggaggaggaggagtagcgatcgtcgagatttcggcgggcgggcgtcgagagttgttttaagaaggatatcgcgcgttattaggtattttttaaatggagtttattattcgtcgtcggttcgggagggggtttcggtcggaggttgggggtatttttggtttttcgcgttttcgtatttcggagatatatttttcgggggggcggaggcggcggacggtagtcgggagggggttaaggtggcgtttttggcgaggggtaggggtcgtttggatcgaggtcggttttttgtttttttttttgagcggtggggtagttttcgttttggagaattggtgtttcgagtcgtgttaaggttggggaggtgttgggtgttcggaagagagggtgtttggaaagggggttttagaggggagtcggggtggatttttatggaagggagacgtttgcgttagtttaggagtggagttcgtgttttatcggttttttaaattgcgagtacgaaatttttagaggggagttgagttggtgtttcgcgtgttttttattttttattttttattcgtaggttagatttgcgttgtttattttaggagggagcgtttatttttttcggcgtgggtcgttggtgttttcgt

SEQ ID NO: 7317 - DNA, 1384 bp, Artificial Sequence; identical to SEQ ID NO: 7316
  Description of Artificial Sequence: Synthetic polynucleotide

SEQ ID NO: 7318 - DNA, 835 bp, Artificial Sequence
  Description of Artificial Sequence: Synthetic polynucleotide
cgtgaagtcggcgttatttagtttttttcgttaattgtttatttttttcggttattgtttttcgagtgtttatcgagtgttcgtgggttagcgagcggggtcgttggaggaaggggcgggtgtgtttagggttggcggcgggttcggggtttttgggaggaaagggtcgttcgtttagttttttttcggagtttagagacggtttcggcggcgcgggtatataggggtatatagcgcggggcggagggagggggtggcggtatcgttcgtggagggcgcgggttcgtttagtttttcgtatcggcgttttttcgcgcggtgtttttttcgtatatttatacgtatttatttttatagttatatattttagtatttgtaggtataaacgtttgtagggatatattacgatatagatatttaagtatatataggtatcggtttatagattcgtttttgagttatatataggtatcggtttaaaggtataggtaggtttatagattggtttttgagttatatatagtttagatttagatgtatatatatagatgggaacgttcgtttgtacgtgtatagatatacggatatattcgtatattatcgcggggtttcgagtatatacgcgtttcggtagacgtttatagatatacgtagggtcgggagcgtatatatatagatataggtttatatagatagattcggttttaaaaatacgtattcgtagaggtaaaggttagcgtataagtacgtatagatatatcgataggcggttttcggatatcgcgttttttgtcgtatttacggtttacgtaagggtttatatacggttttacgg

SEQ ID NO: 7319 - DNA, 2248 bp, Artificial Sequence
  Description of Artificial Sequence: Synthetic polynucleotide
cggttttcgggttagtttttcgttgttatcgtcgtttagttagcgttcgtcgcgtgggagtcgcgaggttaggtttcgtagacggcgggttttcggtttcgttgttttcggcgggcgcgttttttttagttggttcggtcgttgggttgtcgtcgttttttagttcgcggtgttagttttcgcgttttacgtttggttttcgggtttcgtgttttcgtagtagaagggattggggtcggcggggcgggtggggacgtttgggaagcgaggagagttttcgtttttcgggcgtttttttataatggggttagggttttttttttcgtttttcgcgtaggtgtgagcgcgcgagtgtgcgtttcggtaagtgtgagtgtgaagtgtgtgtgtgcgggggagtgcgcggagggagcgcgggcggcgggcggcgcgggaggcgggaggtagggcgtaggggagggggttgggagggagagtgtgcgcgcgtgtaattttatttcggggttttgtgcgagttcgggcgatagtatcggcggcggttggaggaggagcggtcggagacgcgtgtagttcgttcgttagagttcggtagtcggggtaggtgggagttcgcgcgggagtcgagtcgacgcgagtcggagtcggagtcgagttcgagcggagttcgggcggagtttaggagtttcgttcgcgggtagttcgtgggcggtagttaggcggggcgggcgtcggcggggcggttttttagtaagatgtgcgcggcgtcgcggggcgttttttatttgtagcggcgttcgggagtcgggcggttgggttaggcggcgttttcggggttgttgcgcgttcgcgtttagagttgtcgttttagggagttcgttacggtcgcgtttcgggtacgttcggcggcgtttaacgatgatcgttttttggcggcgttttcggagtttggtttgggaatattgggtcgggtttttcgtgtgcgttttttggatttcggattcgcgcgggatgttttacgttattcggatcggtaagcgttttttggagtcgggggttttcgtgcgttcgggagggggcgggaatgagggggttttttaacgcgtttcggagagatttttttaattttttttcgagttgttgagtcgatcggtgattattaggagtttttttttgtgaggataaagttttagagtcggggttacgggttttatttattggggaggaggtcgtcgggtcgtagtgggcgaggggtttttggcgcgtttttgggaggttagatttggtatagtgtggcgaaggtttttagtgcgatttcgagtcgagggcgtatttcgcggtgattgttagtatgaatcgtagtcgatcgagttttgcgatcgggttttttcgtagagtggggattttggggaaggcgttaattttttttttttgtttattttatttttcgcgggtttttcgtttttatttttggtatagttcgagtagtcgtagcgaggtcgtagggtatagattcgtatgacgagggtagtcggtttttttttttggtggtcgtttttggtttcggtggtatcggtttagtttcgtgttatggggcgggggttgggggagtaggatttcgttgttcgttgtagttggtttttcggggttaaggtttttttttcgtttggggtagtgtaggtagagggaagggacgatggaggtcgtttagtgcggttcgggtaggcggtttagggacgttagcggtttttaaagttagttcgaattttttcgtagttggcggcggttggcggggttgcgcgcggtttttcggggtttcggttttttcgcgttttttttcgtcggagatttttatttcggtttttaattttgttgtggtcgtttaaggtattttgtaggtttgagcgtcgcgtatgtttcgggtcgacgatcggtagggttgggtttggtcgggttaagacggagtttttattatcgtaggttttgcgttcgttattaggtcggatatttgggtcgtttgggtttattcggcgttagtattagcgtttggtattaggcgagtcggatttcgtcgagttagggttattttttttttttatagtttttttttagggcggattttgggttgttagcggcgtgaaagaggtgtcggaatcggtgtcgggtttggttttcgtatttgagatttttttaggaggcggttagaaatttagcgggtgggtttttttttgggcggtcgttcgggagtcgg

SEQ ID NO: 7320 - DNA, 3541 bp, Artificial Sequence
  Description of Artificial Sequence: Synthetic polynucleotide
cgaggttggatagttttcggtttgtacgtcggatttttggagagttcgagttttttttttgagtttattttttttttttttcggggcgtgattttattacgattatagtcgatgagtcgtttaagttgggagaaggagcgagaaggttgtagcggcgtaggttagatatttttgggtttaacgtttatttttaattagcgtttttgttagtagcgtttttttcggagttatagtttttatttcgagattttttttttttggaatttcggagcgcggtcgggtattaggggttcgcgtaggattgtagaatcgttgtcgttcgtcgttttagttttagttgttcgcgcggtatttatttgggttttagtgttcgggagaaggtgtgttcgcgcgaggcgtgaagttagagttcgttcgatttcgttcgtatcggacgcgtttttagggtagaggaggtcggcggagttgtgacgttgggattagaggaaggagaaggaaagtcgagacgggtcgggtagacgcgtcgaggagcgtttagtgtacgttggtagtcgcgggaggcgaggcgggcgcggtgagtagtcgcgtcggaatcgagtcgcgaattcgcgtcgtttcgcgttcgtagtcgttaggattcgcgggaattttggttcgtcggtagcggtattgaggagggaggggcgcggggttgagtcgtttttcggagttcgagcgtttttcggagtcggtaatttttgttgttcgggcgggatgcgggcgggaatttagttcgcgtggaatgtgggatcggtcgggttcggagtttttagcgttgggggaaagcggggtttatatagttaggacgagagggggtgcggttttagggttattttcgcgttattttttacgtggcggtcgcgttttcggggcgtgagtgtgtacgcggacggtaggggggtcgtgaatgaagttttagcggttaattagtacggtcggcgcgcgggatttcgggagcgacgtttaatggagagttttgggtggtcgggtagggtggcgggcgggcgcgcggggcgggggtcgggtaggggaggcgggaggtagtttcgcgggtagttaatgggcggcgggcggggtggggtttcggagcgtcgagcgggtcggggttttaagtcggcggagcgaggcggcggggttcgtagacggagcggagcggcggcggcggcgcggcgtagggcgcggggcggtatggttattatcgcgtagtatttgtcgcggggtttcggtggcggagtcgggggtatcgggtcgtttatgtattcggacgttgcggcggcggcggcggcggcggcggtcgcggagcgattgtatgtaggggtcgcgtatcgcgaagtgtagaagttgatgtattacgagtggttgggcgcgggcgcgggttatttcgtgggtttagcgtatttttagtggttatttacgggaggaggcggcggcggcgattgggtcggcggttcgtatttagaatacggtaaggtaggcggcggcggtatcggtcgagtcgacgacggcggcggcggcggaggtttttacgcgcgtttggtgtattagggggcggtttacgcgggcgcggtatgggcgtagggtagtatagcgtattatttgggttcggttatgtcgttttcgttcggggttagcgggggttattagttttagtcgttcgggttgtacgcgtaggcggtttattcggggggcggcggcggcggtttggtcgggatgttggcggcgggcggtggcggcgcggggtcgggtttgtattacgcgttgtacgaggatggttacgaggcgtagttggagtcgtcgtcgtcgtcgtatttgggcgtttacggatacgtatacggatatgtatacgcgggcggtttgtacgcggcggcggcgtatttgtattcgggcgcgggcggcggcggtttatcggtgggcgagtattcggacgaggatgcgtttagttcggacgatttggagtagttcgttaagtagtttaagtagcggcgtattaagttgggttttacgtaggtcgacgtggggttggcgttgggtacgttttacggtaacgtgttttcgtagattattatttgtcgtttcgaggttttgtagttgagttttaagaatatgtgtaagtttaagtcgttgtttaataagtggttggaggagatcgattcgtttagcggtagttttattaatttggataagatcgcggcgtagggtcgtaagcgtaagaagcgtacgtttatcgaggtgggggttaaaggcgcgttcgagagttatttttttaagtgttttaagttttcggcgtacgagattatcggtttggtagatagtttgtagttggagaaggaggtggtgcgcgtttggttttgtaatcggcggtagaaggagaagcgtatgatttttgcggtcggcgcgggttattcgtttatggacgatgtatacgcgtttggggagttagggtttggcgggggcggcgtatcgttatttttcgcgtttttatcgttttcgtcggcggcgttgtattattattattattatatattgttcggtttagtgtagtgatttcgcgggtcgggttttcgtcggcgcgttgtagggcgcgggcgcgtagttcgttcgcgcggtttggattttttttgttcggttgttttggattttataaaaaaaaaaaaaagtttagaaattttcgaataaaattaaatattcggacgatttttttcggtgagcggcgaagatagttcggtaggttgcgtcgttcgagtttcgggagagaggagcgaagattcggaattcgttaatttatttcgggtattttgttcgtcgtttgttttttgtttttattttttcgacgattttcgtttttgttttttcgggttgttcggggtcggatttcggtagcggtttttttaaagcgataggtaacgtagtgcggggttagggatttttcgggagagaggacgaagcgaggagagttttttatttttttttttcgcgtggatttttgagtttgcgggtttagggtggggggttgttattttattcgttatacgtttttttttttttataaggatgcgttttatttcgttttttttttttttcgggtttggttttttacggtttttatttattcgtggagtttttcggtttttggggtttttttaatttcgttcgcgtttttaatttaaatcgtagtatattgtatttatcggggtttcggaggggaggtcgcgagagtcgcgtttgtgtataaaagtaggaaatagttaaagttttaatttagtttaatttatttttttttttatatttttttattttattttttttttaaaaaaaagtaaaaaaaaaaaaaaaaaattaataaaaaaaattcgagtgtttatttttcgtttcgttttattcgagtttcggtttggttttcggttacgtcggaggggtttgcgtttttatatatttagacgggaaggggtttttgttttgttgtagatcgatcgtcgtatagcgcggtttttgtttttcgcgg

SEQ ID NO: 7321 - DNA, 1513 bp, Artificial Sequence
  Description of Artificial Sequence: Synthetic polynucleotide
cgtaagaacggtttagcgaattttgtgtaggggaggcgtcgaggattggagaggttttgttaagggtttcgttgggcggaaggcgcgcgtttttttttatgggaaagatagatgtggggttaatgaaagggaggtcgagaggcgcggggacggtcggggagacgggggcgtggcggggagaggaaagttttcggagaaagtcgatcggattatcgtaagcgaggtatgtagcggagttcggaggaggaaggcgtcggggattggggtagggttagggcgggacgggggtggggggtgtggggggtattataggtagttggattcgagggttttgagttgaaatttaatattcgtttttggaaggatcgtttttttttttttttcgttttttttttttttttttttttttttttttttttttttttttaatttttaggacggagttttgcgcgggagaggagagggtttgaggggaggagaaaggaatagtattgagaggggttaggagtttaggaaggggagggaagggtagtcgcgggttaggggtgagtttgcgggttacgcgcgattttcggagttttcgtagtttttttagtgtttttatttttagtttaggcgagtttataggattcgggtttttgtttttttttcgttttttttttgtttttttttttgttttgtggtttttttttttttttttagagatatttgggagttgtttttaagttttggggcgtttcgcggggttttgttaagggtgcgtgtgagagagggcggcggagtcggcgtcgggtgttaggggtcgagggtgggagcgggagttcgtggttttgcgttttggagtcgaggattggaagggggttgggttttttcgtcgtttgggcgtaggtcgcgcgtcgggaaggtagtttcgtttgttttaggggtgtttgcgtgttggttgttgttgttcggggcgaggcgtcgtagcggcgattttagattttcgggcgcgttgagtgagtgcgcgcgtgaaaatcgtcgtatcgtcgggggtgcgagtgtttgggtcgaagcggttattttagcgatttagttttacggttacgttttcgggggtttttggttttaggtaatttggggtaagcgttttagttttcgtttttttttttttttagcggggtcgtcgtagattttagttttgggagtatcgttttgtagcgcggtcggcgggtggagacggttggtttttaaattcgttcgtttagtttaatcgtttcggcggttttttttagttttcgaggtttttttgagcggtttggagaggcgtcgagcgtagtttagcgttcgtttgtttattcgtttcggttcgggaagggaattttcggattttgcgagttcggggcgttttcgcggtttagggcgggtagttttcggggtttggtcgagtcggtggcgttcgggaggtcgcggggatagtacgtagcgcgcgtttttggatgtcgtttcgtagcgacgtttcggttcgtttcgt

SEQ ID NO: 7322 - DNA, 3541 bp, Artificial Sequence; identical to SEQ ID NO: 7320
  Description of Artificial Sequence: Synthetic polynucleotide

SEQ ID NO: 7323 - DNA, 558 bp, Artificial Sequence
  Description of Artificial Sequence: Synthetic polynucleotide
cgtgtttggttttcggaaagtgcggacgagacggtgtgggtgggttaggagttatttgtaagggtgtttgtaaatcgtgaagtttagaggagaacgggagaaggatggaatcgagcggagaggggaggtgtatggtaagaatttcgttcgtttcgggttgaaggggagttgtgggtcggcggttaacgtttgaaggagaggggtttcgggtggcgggaggcggttggggattcgcgtaggttagcgtgtcggttttttttagtttatcgttgtcgtcgtcggggttgttttaagggagttaagcggagtgggagcgggtttgcgcgtttttgttttgcgcgtaggggcgggggggtttaggacggggcgtttttttttatttatatgttgatttaggatttttaagcggttcggtttaggatatcgtttggaaatttagtcgcgtgggagagggcgattttatttttaatttttttgttgtgcgtcggtttagtttttagaagttagcggacggcggaggaggtggttcggttttttttggtggttttgcgttttcgg

SEQ ID NO: 7324 - DNA, 7244 bp, Artificial Sequence
  Description of Artificial Sequence: Synthetic polynucleotide
cgtatttgttgggtcgtttcgggttttcgagttttcgtggttatatttttggtttttgcgggattttcggttcggagtggggaaattttacggtgatttggttttaagcgagaaggatatttgggttatcgtttttttaaaagttaggtagatttgtatagtttatttcgttttcggtttaatagaatttttcgaaaattttgtttaaaggagttttgggagtaggcgtttggcggtttttgcgcggaattcggcggttgtcggcgtttttttttcgattttatggtttatttatttaggtgtagtcggggttagatatatttggtttcggaatttttaggtgttggaaggtggggtttgggttttgcgtttttagaggatatattatttttgaagtatttttttatttttattttacgcgggagattttcgcgggggttgatattttttttttttttaaatttatttatagattttagtaagtggtattttttgggagcgagtaattagttttttatcgttattatagattttgttcgtgtcggagcgttttcgcgtcggggtttggtgaattttttggaagtttttcgttcggttttttagcgaattatttttatttatttttttttttagttttagtttttcggtgggtattttttagggttttttcggggcgttaggttttgcggttttcgggtgggggttcgttagtcgtatcgttttttttttatttttatttttgggtttagaagttgatagattgataagacgcggtttagtagtcgtgttaggcggaatgggttgcgttttgaggtcgcgacgattcgggtcgagtttgcgcgtttagattttcgtcggtttggaggttcgaaagagtaacgtagagacgtacggttaagagtggagggagaacgataggaacgtttattttttttattatttaaacgaattttttttattttgaaggagagagagaaaagtagagaataaaaacgagagtgatagaatattagaaattagagggaaaaatagaattagagggaaaaatagaattttagaaattagaggggaaaagatatagagataaaattagagttatagaaatcgagggcgattcgttcgagggtcgcggtattaattttagatgtttgaaaggtaatagttttttaaaaaggaaataaaatttgaaatttgttattttttttgtagaacgagttgttttttagggtcgtgatattaagataagacgagaataaggcgaaagttaaaattgaaaattgttcgagggggttttttagtagtgattttgttttttgtcgggaaggtcggatagatcgatgcgcgttttgagtttaagagaatttgcggagatatagaggttattttttattttcgtttagaaaagaaaaaaaaaggggggggggttatttgtttatttgtaataacgataaaaagaattttattattacggaaaagaaatcgagatgttgaaaagtgaggaaaagagagtttaaaaggggttgagggacgcgaaaagaggggcggggagaggaaaggtttagggcgcgagggacgtggcgggtatcgataggaagtgtaattttattttttttcgttgagtttttttttaaatacgaaaatttttataaattatatttattttttaggatgattatcgtattaggatttttaaaataaagtaattgagttttaaggagataggaggaaaaaattaaagtagtttttaattattttaaattcgtcggatttgggagcgcgtcgaaatatagtaggaagaaggtaggaaaaatcgttttggtatttatgttttgaatatttttttttttttattttcgtatttttgtttcgtttttatttcgatcgtagtaattgaattgttatttgttttttatttcgttttagggttttagagttatttgggaagttcggttttgttaagcgttttaggttagtaagagcggtgtagtcgagtcggcgttttagaagtcgagaggttatataagtttacgtagagaggcgtatcggatacggtaattaggagtaatttatacgttttcgggcgtacggaaattatttgttaggaaatttttaacgttttttttcgtttatttttttttattttttttttggcgcgttttttttttttttagaggtacgtagtggagtttttggagtttcgaatttttcggatattgtagaatgcggggtttttcgggcgcgggttcggttaattagagcgtcgtttgttttttttggttaatggtaggcgttatattgttgtttaattttgtttaatggagttttaaggattaataatagagcgggcgagcggtttattgagagtttggtagcgtcgggtaattgggtttcggttgcgcgtagcgttcggcgcgtatcgcgaggggattcggtacggcgagagttaggtcgcgggttttaattacgcggttcgtagacgagttttcgattcggatttttgaagggagggttggattgcgttgcgttttgaggggttcggaagttcggatatggtgattgaaggagggtgacgtggttagataaggggtcgggggtaaagggaagcggttaagagttttagcgtcgttagtggagtcgggaggcgcgtgtagcgttagcggaggaggaggatttcggagtttaaggtaggtagttgagggtcgtagggagagtagtgggtggagatttggtttgcggtttttgttgaggaggtttgggtttcgtgggttttagggacgttcgaagggtttgggagaggaggtaacgtttatagagaggaggtttgggattttcggacggagatataaggattttgtcgcgggttttggtagggacggggaacgcgggaagtagaggagatcgcggtagaagcggggagttgggtttgtttgggttttatggggttgcggcgtgggagggattttggtgttcgtttatggttagttgcgaaggcgatttttttggtttggtgcggtttgttgggttattcgtgttttaggattttaattttgagattagaacgtaggagtttgcgttcgagaggggttttttgggattttaagacggggagggcgtgtttgacgattttgtttttaaattcggaggggaggggagggtagtgtgaggtggttttcgagaaagatttttttttcgaaatgtttaatttttcgtaggatacgtttttcgtttcgattattattttagattgcgaagttaaaaaattgtattataggttttatttaatttttttttttagtatttgtttgtggggtttttttttatatattttttttttttaggcgcggtttttggatttcggatatttagattagttgttttttattgttttttttgtttatgaagtttatttttgggttgggtttgtttatatagaaagtttttttggtcgaatttttttttttaatattttttagttttaagttaaattttatatatattttgttttttattttttggaggtttttatcgtggaatttttggcgtttatatttttacgggttttagagttattgggtttaattttgtttaagttgttttttcgtttttattttgttttttaaagttattttttttgttgttgatttttttttttaaagtttttgttttaaattgtattaaaaataaataaataaaaagaaataaaatttcggtttaatcggtttttatatttgcgtttttatattttttttttttttatttttttattaaattgatcgttttgtttcgggtttttttgttttgtttttggtattagtttaatttttgggttaaaattgtcgttttaattttagtttcgttaaacgagtattttttttattcgttttattttaattaggttaagttttggggtattattttaatttttttaaatttttattatagttatttgaattagtgatttttatattttatatgtttttttattttttttagcggaattattaatttagataaaattttatttttagcgtgtatattaggtttaagagtagttatggttagattggggtgaaggtgttagggtttataaggaggtttcgattgtatttttttttagtaattttggtttttttagtttagttttcgcggtttaaatttttttttttagtttgggttttttaaggcggcgttttggtttagcgcgcggtgtgttttttattaggtttttttttttttttattttttttttcgttaggttttgttatggagttgcgttcggagttgtttagcgtgttcggtgcggcgacggcggcggcggtaatagcgacggggtcgtttgtggcgtcggtggcgtcggtggcggtagtcgcggcggtcgttgtatcgttatcggtgagcgtggtaggcggtttgttgcgggggtcgttattgttgttgcgggtagtcgagaagtattcgcggatttttaagtgcgcgcgttgtcgtaattatggcgtggtgtcggtttttaagggttataaacgttattgtcgttggaaggattgtttgtgcgttaagtgtacgtttatcgcggagcgttagcgtgttatggcggcgtaggtggcgttgcgtaggtagtaggcgtaggaggagaacgaggcgcgcgagttgtagttgttttacggtattgtcgaggggttggcgttggtcgtcgttaacggtattattttttcgaggttcgtttacgaggttttcggtttagtgtgcgtcgtcgacggcgggggatttggagcgggagcgttcgcggggatcggaggcggagtagttggcgtagggggtttaggtgagagcgcggttaggtcgtaggtaggggtagtaggatcgtagttttggggtacggggtttaggggtttgtttcggtttagaaagagtagaattttcgtgtttagtcgtcgcgattgttagggtttatcgttcgtttagtttcgggtatggagcgtgggtatagaaatttttttttttttcgtttttggagtatttgtattttattttttttttttgtatcgggtcgaaatgtatacgttttaatttttttattcgtttttatttaaacgtaggtaggtttttgtttttttgtttcgttttttttttaggtggaaatttgcgtattttcgttcgttttgcgtttttttataggttttttttttttgtttttttttaatttttttaaggaatttttttttttttaattgatattttaggttttgagacgttttaggttttgagacgttttagttttttttttttttttcgcgtttttaacgttttttggataatcgtttgttgcgttttttttttttttagtttttttcgtattttttttggttttttaggtttgtttttttatgttttttttttttcgttttttattgtttgtttagtattattttttttttttggattttcgtggttttttgtggggagggaagaaattaggttagagtcgttgagggaaaggagggattcgttttaaatttgggagggaagaattttttaggttttaattttggaaagggtggattagaaataggggttgtatttttgtttgtagagaagtttgggattttttagataattaaggcgtttttttttataggttgtattgttagggtaggtattttttatatagtgggtttttttgtatagcgtggttaggtagaagttatgttgttttttgtttgaattttggatttggttatttttttacggtagggtaggattggaagggtagttaagggtggaggtgttggggtatagacgtggggaaagtagtattgaatatcgagtttatagggtataggtagttggggttttgaggagtatagaaagagagggagttttggggttagggttgtaggggtttagagcggaaggaatgttagagtaaaaagaaagaggggtattggagtttagtgaataagggttgtggggttgagggagaggaaattgagatttaaagggtcgaggtgttgtgattgttgttttttagttaatcgttttttacgatacgttttttttttttttagaggttaagttgtagaagtttgatttgttttttaagacgttgttgtaggtaggtcgttcgggtagttcgttgtcgtcgtcggtgaagtttttattattcgacggcgtagattcggggttcgggacgtcgtttttagaggtgcggttcggtttaggttcggagaacggcgatggcgagtttttttttggttcgtttttagttcgggtttttaaagaggtaggtggtagttgtttaggtagcgttggttttggcggcggcggcgaggaggatagttcgggtttcgttagttttttgggttttgaattcggtttagaggttgataaagaagagggtgaggtcgcgtcggcgttagggttgggcggaggttcgggtttacggtagcggacgtcgttggatattttgatacgcgtgtttttaggttatcggcgaggcgttttggagttggtgttgtagggttgcggcggcgacgtggtgtaggttatcgagtaggtgttgaattattatcgtgggggtttggcggtcggtttgggttttgcggcgtttttagataaggtcgtcgtgggtgttgtagtagttgtagacgacgcgtggtttagtcgcgtcgacgtcgtcgtcgtcgtcgtcgtcgtcgtcggggggtttgggttgtttgcgtcgttgtaggcggggttcgtcgtattttcgtattatagatttttgttggtcggcgttatggcgtttggggcgttgggttcgttgagtagtcgttcggttttttcgtcgttgtagtttaacgttagttatttcggtgtcgacgcgggcgtttattcgttgggcgcgtcgttcggttttagttttttgcgtttggtttatttcgcggcggcggcgtatagtcgcggtttggtttttatggcgttttattttattgtcggtttggtgtttacgttcggttttcgtttatttatggattacgtttttagcgattttatgcgtgatcgttcggtcgtcgttgttgcggcggtgtataaggagtcgatttacggcggcggtttgtacgggtttatggttaacggcgtttcggagaagtagtagggcgaggggtttggtagtcggtcggtttttaaataggaattttagttttgttttcgcgggttatcgattttttttcgtttagcgttttttttgcgttttggttgggcgt

SEQ ID NO: 7325 - DNA, 824 bp, Artificial Sequence
  Description of Artificial Sequence: Synthetic polynucleotide
cggagtcgttaggagtgagtatttttttttcgggatatttagtttcgcggcgtttttcgcgcgttttggttttatacggatttgttagttttagggaataaaagcggagttcgttcgttttttattgtagtcggaggatgagtcgagagggttgagcggagagtgtggttttcggcggttggaggtaggagaatatgttgcgttcgttcgtcgcggcgtgagaggttcgaggtgggcgcgtcggggtaggggcggtcgcgggcgtttgttcgtttagtgggcgttgttcggatttggcgaggtggtggtttgtaatattgtgttcgtattgtttattgtgggtcgggcgtcgagttttcgcggtcgcgagggagttttttgggtgggaattggaggtagtgggggaaaagtttggagttagaagttaggtagcggttgtcgcggcggttgtggagggttgtttgcggtatttggcggcgcgcgttttatcgcgaagagcgggaaggcggcggttgtagtgtgcgtaaagttttgggtggcgcgtaaaggcgtaggcgagggtcgtcgtatagagtcgtttaagttgtggtcggagcgttagggcgatttttgggaattttttaagcggaatttttcgagataagcggtttttgttttttgatattttagtcgaggtcgagttgacgcgtagttatttaattttttttgtttcggggaaataattttattcgcgtcgacgattggattttggttggttgggtagcgtcgagattttcggggggtttagttttgtggttttgagtattttttcgtttagttcgcgt

SEQ ID NO: 7326 - DNA, 824 bp, Artificial Sequence; identical to SEQ ID NO: 7325
  Description of Artificial Sequence: Synthetic polynucleotide

SEQ ID NO: 7327 - DNA, 1415 bp, Artificial Sequence
  Description of Artificial Sequence: Synthetic polynucleotide
cgtttaaaatgatttcgggcgttttatttaaagagacgttttggtttaggtagttcgttggggtcgaaggttttattttttttcgatttatcgggtttcgcggcggaagttttcgtttaggtaggggatgttttaggagggaaggaggcgacggtgtttaaggacgtcggaagtcggggattttcgtttttttcgggtttcggttaggttattagtgttggttcgcggcgcgggtgtttagttgcgtttgggatattgcgggtacggttgtggcggtaacggtagcggtcgtcgcgtcgtcgacgttcggtaggattgagcgtacggagcggcggaatttttcgtttttttacgtgtagagtagcggattgagcgcggatagggcgtagtataggagttagttggtcgtttgtattttttagggtatcggtagcgagaagtcgttggttaggtttatttatattagtggttgcgtggttagtaggaagacgtagtagagtagtagtatcgataggtcgttgagacgtcgttgtgttcgtcgcgggtgtagcgcgggcggtaggggttgggtttgcgtcgggtgcgcggcgttatcggggttcggcgcgtgttgggcgttcgggaaggcggcggcggcggcggcgtagtcgggtaattggtgtagtaggtggaagttgagtacgttgattcgtttgacgttgatacgtacgcggcgtacgatgtttaggtagtagtgtagtagtagagttgtttgcgttagtagcgtcgcggcggttagtagcgtcgggtagtggattcgcggtggcgcggcgtcgggtcgcggtgtttagggcgggagtagtagtacgaggtttagggcgagcgtttaggatagcgttagtatgttcgtcgtgtggcgtttttggtatagcgtttggtaggtggcgggcgttcgggtgatgagtaggtagcggtttagggttacgaggtagtgggagaggagggatatcgtgagttcgaggtttagtagtttatttcgtagtaggcggtagttgtttttagcgtcgttttagtttgcggggggtttcgtagagtcggtgggtaggagttcgagtatcgttttttgcggtatttagagggcgtagacgttgaggtcggcggcgtagtcgtttacgatgaaggcgttgttggtggtttgtagttttcggaaggacgatacgagatagatgattatgtcgttggttagcgtgttttcgatggttaggttcgaatataggagtgatatcgggatgcgtcggttcgtttacgatttttttttttcgtagagtagtagtagcgagttatcggtggtggaggaggtggatgtggaggaggagttggttattttggttaattttttatatttttttcgttagcgtcggtttttggtagcgcgg

SEQ ID NO: 7328 - DNA, 1415 bp, Artificial Sequence; identical to SEQ ID NO: 7327
  Description of Artificial Sequence: Synthetic polynucleotide

SEQ ID NO: 7329 - DNA, 3039 bp, Artificial Sequence
  Description of Artificial Sequence: Synthetic polynucleotide
cgggcgtttataggcggcgcgggtagcgcgagtttcggagtttcggaggtttgtgcgttttgagtcggtatggatttcgagtattgcgcgttttttcgcgtggggtttgtattcggtttttatgtggtttcgggggacgagttttcgggttcgtagggaattttcgtcgttgcgttttatttgtatttcgcgtcgtttcgcggttcgcggttgattcgtttttcggtttgcgggtttttggagttttattttttagagtcggttaagtcgttcgttaagtatttgtaggatttcgggttcggttcggtttttaacggcggttatttttacgagggtttcgcggaaggtaacgcgcggcgcggggcgtagcgcgtagttcgatttttttttttttttttttattcgggtttattcgggtttttttgtttatttttttcgttcgtttattttttaattttttgtttttttcgtttttcgttacggtttttacggaagtcgggttggcgttggttcgggttaggtaaaggttagtgtggggcgggagggtgaattatcgtttttcggcggcgggaatggaaggcgggaggtcgagggaaggtgtagtggcgacggttcggagtttagtcggggttcgaaagtagttggatttgggaaggagagagtatgttttgtcgaagttggattggaattgttatttattttgaagtttagattcggtcgagggttgtggagttatattgagatttgacgaagaagcgcggtttttgtgtttggcgttttttgagggttttgaggttgggttttaatttagagtggttaaatcggggtcggttggggattgcggtttggttttggttcgtttttttttttcgggtttagtttttataggaagggtgttgtttgtgcggtagattggtatagtttggtcgcgattggtcgtgtaatgttagggttgtttttaagacggaataattgtatttttattttttatattaagttggtttttttgtcgttatgtattatgatagtcgtttttttggtagttttggttttttcgcgttggattattatcgttgggtagttaggagtagttttgggtagtttaattttttggcgtcgcgggtttacgggtcggtgttttgtgttaaggtcggttggatcgcgtcggtattcgagaatgcgtttgaaggtaggggtttggtaggttgatcggtagttttgcggtcgttcgtcgtattttatgatttgtaaggcgtttcggttttcgtattgtatttattttatttgcgttgttatatttcgtagtttaggtttagaattggattttttaagattcgttttaattttttgtcgtcgttcggttggcgtttcgcgggtttttacggagtggtcgggtattttcggttttcgtttagtcggggcggtgggaatgtgtaggggagggcggggaggtgtgtgtgggttaacggaggaaatgaacgagttcgcggagtttcgtgtttgtgttttttgaaagaggtttttttgataaaaattatagttgggatttaatgagaagtagttggtttggtttttttgattttagttagacggtagaggtcgcgtagtgcggtgagtatcgttagagataggtattcggtttggtttagcgtttcgcgtcgggtaggagttatttttttaggttcgcgtttttgttaggcgcgtcgtattcggtatcgatagttcgggttttcggattatatcggtgtcgcgcgaattgtagagagcgttggtgcggaacgagcggtcgggagaaatttagtatttcgggattcgacggtaagggtggttttgataacgaaatatcgagaaagaaaattaaagaaagcgagcgataattaagaaaaggggaagggaaattgaataaaataacggagagcgcggcgagaacgagagggtaaatggtagtcggcgagttgggatgaattaaaatgaataaatgaggaacgaacgaataaaaaaagtaggagtaagatcgaacgaaacggataattagagaagggggaaaggataaagagggagggagtagattaaataaaagaaaacggagtatgtttaaagcgtagaatatattaaaatgagaataagggggtaagaaaattaacgattttagttgaacggaggataggttaaacgaaagggaggtaggcgggtgcgagtagagtttggtagagattttggcggtcgttagtttttggcgtttttgtcggtgtttaacgggttgttagcgtttttgcggtagagcggatttcggcgtagcgcggcgcgcggtggagtttggttgtttgaggatagttagtttttagggtcgtatagtttatttggtgggaagtggcgggcgaagagggaattcgttttatttttcggtttttaaaataatcggttcggagcgtttttagtttatacgagtgagcgcgtagttgcgttttatttgcggcgcgattttttacgaggttgggtagttgcgcgttttagagtttggcgtatttcgtttttttttcgtttgtagttcgtcgttcgcgtagttttaggtcgttttttgttgagagcgtttagttttgttttgaatttaggttgcgtgttggcgttgttagttattttcgcgtcgttcgcgtttggttagtttgtttcgagtttggttttgacgtcgaaatacgttttcggtaagagatttttattagagttttgttcgttgtcgttgaggttttgagtcggatgattcggtcgatcgttaaagtcgaggagagttttaagtttttagattcgggttgaggtttttgggttaacgttgagaatttttaagaagggtatcgaggttttatcggggttttgtttacggcgtttatgtttattttggttttgagttttcggcgggagttgtaggagtttgggttttagcgagttttgtaggtcgtttagtgattttatagtggtcggaggaaatagtgcggcgcgggataaggttgtagcgaaatgtgaaagttaaggttggtttcgcgg

SEQ ID NO: 7330 - DNA, 1277 bp, Artificial Sequence
  Description of Artificial Sequence: Synthetic polynucleotide
cgcgtttttggggagcggtttatttatagtattgcgagtatttagtatcgttttagagtacggcgtatataggtataaatgtagtagaggtttttcgattcgttaggacggcgttttttttagatgggtattatacgtacgttttttgttttagttatttcgttttttagatgcgttttttacgagggaggaagggttttttgttagtttcgaatttagcgaggattagttttaggattgagaattaaatatttatttcgggcgtgatagttttgtttcgtttgttaatgttattgttaaggttataggtttgaggtcgagcggttggggttggggtttttagttgcgtaagaggtttttagtggaattgcgttttgggcgcgtagttttaagtcgcggatgggtcggataggtttttttcggtttttcgcgggcgtttgttttcgtagttaagtttaatttttttcggagtttttgggtttttttgagtattagaagttgaagttcggtgtttaattcgtgcgtacgtcgttggggatttcgatgcgcgaaggagagcgggtttcggggtttcgtcgttaggtaacggcggttggagcggcgagaggagttcgggacgagcgtagggtcgggcggatgcgggggtagcgtcgttttatattttggtttttagttttttttggttggggcggggttagaatagggaaagttgtagtggtcggttcggtaaagttaggcggggcgcggttagcgatttatttgttacgcgtgggtagtcgcgtagattcggttcgtgtatttcggtcgagtagttgcgattttcgacgggtcgcggacgtatagtttttttttcgggttataggttttcggttggggttggggcgattcggagttgcgcgtcggcgtacgcgatttcgttcgttttttattttttgttttattattagttttaatttggttttcgttcgtcgcgcgttcggggtttaggggagcggcgcggggatttaggttttacggcggagagagcgcgcgggattgcgaagattggggtcgagtgtcgttttttttgcgttttggtagcgtcggttttgcggagtagaacggagttgggcggagcgttgcgcgtattgttttttcgtttttcgaaaggttattttggcggcggggcgtcgtgacgtaggtttgatttacgcgcgggtcggcgttaatgcgaggttttcgggtagcgagcgaggttttgatggtcgacgtaggcggagagggtgggcgtggggcgg

SEQ ID NO: 7331 - DNA, 2394 bp, Artificial Sequence
  Description of Artificial Sequence: Synthetic polynucleotide
cgttgtaaatgcgttaatatttcggttgttagcgtatggcgagcgttttttacgtttattcgtaggagcggcgtttcggtcgttttttcgtttttagtttgttttgttttcgtttttttttttttttcggttatggttatttttggacgtttgagttttatcgtgcgtagttttttagatttattcgagtaggacgcgtaatatttgtcgaggcgggagttagaattacgcgttttttagttcgatttttgcgtcgtttggttggattcggagcgcggttattatttttgtaagtgcgtggtggattgcggtgcggggtgggaggtaggaggcgtggggtagtagaattaagggtttagtttacgaggggtcggaaagtcgaaattttagtttagagtttagatttttttagttttggaaacgggagttttgttttcgaatttttaacgtatttatttcggtcggtatattttaagagtagatttttgtttggtattggtgtttcgagatttggggtttttgtgtttgacgatttttagaggtcggaataattgaaatttaaaacgcgtcgttatttgtcgtttttattttatttttcgttttttttttatgtttgaaaatacggttacgatttttaggttttcgtttgggatggttagtgttggcgagtttatttttatttcgtttttatttagggtttcgtaaatttcggtatattgtagtgtagtcgatttggaggaggtcggcgttggtgatttagtttgtgataaattggtcggttagcgtaattatcggtgcggatatgttaagagggtttcggggtgggttttttcggggtacgattttaggttcgttgatgatcgttgtggtatgaatgaggttatcgtattcggagaggtggatgtttagatgtggatttaggaaatggttttatttcgaaagtttcgggttagtgggcgtgttttttggttagtgtttttacgttcgcgttagaagggtagtaggttttcgtagggttcggcgttttatttattcgtgttttttttgttgtttttagtttcggacgagagtagtttggagattagttcgttagattcgtcgtagcggtcgttcgttaggttcgcgttttcgggttcggacgtcgagaaaaggaagaagcggcgggtgttattttttaaggcgtagacgttggagttggagcggcgttttcggtagtagcggtatttgtttgcgttcgagcgcgagtagttggcgagtttgtttcgttttacgtttacgtaggttaagatttggttttagaattatcgttataagttgaagcgcgttcgcgttttaggggcggcggagtcgtttgatttggtagtattcgtcgagttgtacgtcgcgttcggtttgttgcgtcgcgtggtggtgtcggtgtttgttcgcgacgggtagtcgtgcggcggcggcggcggtggcgaggtgggaatcgtcgcggtttaggagaagtgcggcgtttttttagtcgtcgtttgttttttgtcgggttattttgttttcggtttcggttcggcgtttggtttttttttcgtttattagtatttagtatttttcgttttggttttttggaattggtgaggtcgtagggcggtatttggggttattttcgattttggagcgcgttttgcgattggagtagggtcggagtcgaacgtttggaacgtttttcgttcgtttttttgtagttttatttttttgggcgttagggtttttggcgcgtttttattagtcgtcgcgtaagtatatacgagggacgtgtgttagagtttttttttttattttttttttatcgttagttttagagttagattttatgtttgggttttatttgtatatttttaaatagcgatttgtataggaagtaagttatttttttaaaaaatagagtattttttttcgtagttcgagaataaaatgtgtggggttgggttttttgcgcgtttgcggggaacgtaggcgggagtcgtgttttttagatcggtgttcgtatcgttggttcgttttttgattggttaagtggggttcggttttagttggatcgaagggcgggttgtagtttcgatacggttttaggaagatatttgggggatggaggggtggtgatgttagggttgggcgcgggaagaaaaggagaggaggaagttgaggtaattttgggatttttgttagcgggaggcgttattggttttagagtgatttcgatttttcgttgggtttttagagttgttggcgtttcgaatatcgaaaagttaattttgtggattacgatagggtagaaggagttttttcggagatgagtcggcgaggttaggtgcggggcgcgttgtatcggagtagtttaggtcgggtcgt

SEQ ID NO: 7332 - DNA, 1627 bp, Artificial Sequence
  Description of Artificial Sequence: Synthetic polynucleotide
cgtttcgggtttggagggaggggaggtttttcggaaaggggtggcgagagattttcgttacgatttttaagttttttcgcgcgcgttggaggggatacggtgggcgtttaattttcggcgtagtagtaggttttataggttgtttgttggggtttggggaagtcgaaattgcgtatttcgggattcgggagtttttcgtagcgcggtttcggcgtggtgattgggaagcgtatattgtcgttagttagttagtcgtcgtcgtattggtttagtttcgaaaatttttaggcggcgtagaggtgtttaattttggttattacggcgtcgcgtcgtcggtacgtcgcgtgggttttagatagcgttagtcgttcgggtacgaagaatatttggtttggggattatagcgggttatcgatcgagggtagggtgggcggagaggggcggttgatatttaggaggcggagttggggtgcgggatcgtagaggtgttggatcgagtttgggtaagaggagttgggggatcgaggtaaaagtgtagggagggtttggagaggtgagttggagtttgggcgggcgggcgggttgatgggggggcggtgttttggagggattcggagattttgttttgattttaagttgaggtttatttttcgttttttatattttttagatttttttttaagattttgttttcgtttcgcgttttattcgttagcgcggaggtgaagtagaaggcgtcgtagcggtcgcgtattcggtcgcggggttcgtagttgcggatttcgggtcggtttcggtcgtcgtacggggcgcgtgcggtgagtatagggtagcgtacggagttttcgagtagttagttcgcgttatattagtttagattttcggtttaagttggcgggagacggcggaggtcggggataagaggcgttataggtaggagttagattgagttcgtttggcgttttttttcgggtttttgagatagtttcgcggggtttgggaagtgttgggttcggtcgtttattttggtagagttgggagtaggtggttaggcgttcgttttgtttttcgtacgtttgtttcgtttcgtagtaattgaattggtatcggtttcggttgggttggtacggaaatattatatttagggggtggcggggattttggggagggttagcggatgggagcggagggggaggaagggcggcgcggtttgggagagggagttggggtttttaggggtgcggaggagatattgggaaggagttttgggagatttaggcgaggcggattcgttgttatataggaatggggcgggagcggaagggttttattttttaagtttaaggttagcgttacgttttcgttttcgatgtcgttgatgagttcgtagcggtatcggttttcgttttttaggcgtacgttcgcgatgattagggaggcgtttagtcgatgtttttttcgtattttggcgcgtttttttaggggtttatattttcgggcgtgtagttcgttggtgatgaggattagcgtttttcggagttttttaggttttattttgttttagcgtattttgtagttgggaggcgtggtgtttaggacgtagggtagcgtggtcgtggttttacga

SEQ ID NO: 7333 - DNA, 271 bp, Artificial Sequence
  Description of Artificial Sequence: Synthetic polynucleotide
cggttcgcggagttagcgtttttttcgcgtcgatttcgggtttcgggcggtcgtcggggggcgtcgggcgtatttttcgttgttaatttttcgttcgtgttttcgttcgcgtttgggtttcgtcgtattttagtagaagttattatagagaataaattatttttttgttttcgagatgggttttcggggaggaaggtaaattgtttgtttcgtgtataataagttaggcgtggagagtagcgcggaggaggtcgcggtagttatcgagcgg

SEQ ID NO: 7334 - DNA, 884 bp, Artificial Sequence
  Description of Artificial Sequence: Synthetic polynucleotide
cgtagtattttggcgaatttttttacgtttttggtgaagttgtttcgataaattcgaaatatatgttgtagcgttttttattgttggtcgttgaacgtgttttgggattaaggttttagagagcggacggtgttcgagtcgttgttttagttgtgcgtttgtagtttttttagttacgttaagtcgtcggtgcgcgtttagttgttattggcgaaggacgagatttggaggtagcggagggggaaaagtttttgcgggattgggagagaatgaagattggaggcgtgtagtaagtggtcgggagagtagttagtataaagagaaggaagaaagaaataagaggagatgagttttaggaggcggttgatgttagcgaattttgtgtcgcgttgttttttttcggagttagggagtagcgagttttttatttagatcgcgttagtgcgtttcgggttttattagtttttattaggcgttgtttttttcgtttttatttagtttttttttttcgttttttcgcgagtgtatttaagcgttttcgttttatttatttttagcgtttttttaagtttggaggagcgtttagagtagtagaaatagtaggtattttatatcgttcggcgtggggatttcgcggagcgtcgttgcgcgtcgttttttgatttgcgtatttttttttttcgtcgtttagtttacgttttttttcgttgggtgttagttaatttttaagtttagatttcggtagtttttttcgttgggtttgtcggcggtttgttgtttttgtcgaagggcgttttcgtttttagttgtgcgagttgtaaagaggtcggggttttaggaattttggcgtcgtcgtttattttagtaggttttataatcggcgt

SEQ ID NO: 7335 - DNA, 1007 bp, Artificial Sequence
  Description of Artificial Sequence: Synthetic polynucleotide
cgcgggtttggttttaatttagtacgcggaggtttttttttttttagttttagcgaaagggcggcgggtgggaattattcgttattttggtaatttttttttgtcgtttgtttataatagtttgaattatatttttgttaggtagttattagttcgattttttttttttttagttttcgtttttttttttagcgtttaggttgggggcggcgtcggtgttagtttagtttagggcgaagtttttagggtcggttcgggtcgggttgcgggattcgtcgtggagcgtaaagtgtttgaagttttcgcgcgtattcggttttgtttttaaaggttttttagaaatgtaagaggttaggcgtagaaatatatacggacggtagttttatgagaaaatgtagataaagagttcggcggtagggttatatgttttttataatttttaaagtcgttattttaattagagttttttttgagttttaatgtttaattttgagtaaataagtcgttttgaaagaagaattcggtttttaattaaaagtgtattaatattttttttttttttaattttcgcggagtaaagtttcgcgcgggcggaggcgaggttaggtcgcggcgaggtcgtttcgggttcgcgtcgtttcgcgtcgtcgcgcgtttttaggtgacgttaggcgggttcgggattagggtttattttgcgtttttcgcgtcgcgtcgtagagttaattaaaagtaatgttacggtaaatttaaaggtttttcgttggcggagtcgcgttttcgggttagtttgcgagagagggtttttcgaggtaggtgttggggatttatttgtgtgtgagtgtgagtgtgtgtgtgtgtgttcgcgcgagcgtacgtgtgagcgtttgtgttgaaagggagagttttttggattttttggagatcgagattgttttttttttttcgtttatgtttttagtttttttcgtatatgtattagtgaagaaacgtacggatatcgtcgt

SEQ ID NO: 7336 - DNA, 2191 bp, Artificial Sequence
  Description of Artificial Sequence: Synthetic polynucleotide
cgtcgcgttttgttcggttttatttattcggtggcgtttgggttcgttttagttttttatttttattttagggtattatttattagggtttcgtttcgttttagttttacgtgcggggttttatttcggcgttagcggttttttaaatatttttatttttatatattattttttttttattcggacggtagtcgaatagggataaaatttatggcgtatagttagtttttttcgcggagtacgttttgtgttgttttagtcgttggggttttttatttcgggttatagttttttggcgtttttcgggtcgaggtagtcgggtcgaggagtgtcggtgtggttcggttacggggcggggtcggcgggagtttcggtcgtcgtcgtcgtcgttgttgttttcgtttgttttttgggtcgttcgttcgttcgtcgttgggtgcgttgtacgcggggggtagtcgtggtgtagaggtttatgtagcggcggcggcggcggcggttgttgttgttgtcgtcgcggaggtagatagatcgggcgttgttatcgtcgttttttttcggttttatgtcgtcgtcgttgtcgttttttttttttcggcgaggggcggggggtttcggttcggggtgggtattatttttcgtagcgtcgtttttttttttgtttttcgttcgggcgttggagtcggcgagggtattcgtcgttttttaggagtgtatttttcgcgcgttttgtcggagcgagggggcgggcgtgggcggacgtcggggtagcggggatttcgcgcggttgtaagaggagggggtttttttaaggatgttcggcggtttttcgtttttaggtgcgagttgagtttgatcgggagcgagcggcgcgtcgttatgtcggcgtgacgggcgttttcggttgttcgcgcgggttttcgcgttgttttacgtcgcgtcgtgtcggtatcgggttgtaggatgggttgtatttaaagtattatttgtaaggcgcggattcggcgcgagaatatcgtggtgtacgatgtgtgcgttattatcgattagtgttttacgcgtatcgaggagatttcgtttatcgttttgcgttataagattttttattttaaagttttcgttcgcgtggttatgttttttatttttcgttacgagatttgggtggtgggttggatttaggcgtgtaattagatggagttttttaatatttatagcgatttgggtatgtaagcgattcgtcgcgcggtacgggagcggattttgggtttttagttttgtttgttattttgatttttttttttagtttttttttattgttgtttttatcgtttttttaaatttttttttcgtttttttttttattttttttttttttacgtttttgttttagtgatagggcgggtgtagggaggttttttgcgaaggtattttttcgtggtttgtttttgattttttagaaacgcgaggagaaaggtgcggggcgggaagaacgcgataaggagggttcgagaggcggaggtggggatggttggcgagtgtttggcgagttttagggcgtcgtttgtgttttgtggggtttttcgggaagagtttgggggaaattatagaggagtggagtggagtgtcgggggcgtatgggttgtgtcgcgcgttttttggagaaatcggagcgggtttggaagagtaggtttcgggtattcgagcgggagttggtagttttgtttttgttttcgcgattgttgaagtttcgaatttttgtttttcgggttagggagttcggaggcgttttcgtttggaattataagtcggatatagttgtttttttgttttcgcgttttttggattagttttggtggggagttggaaggtatcgagtgcgtttcggttaagaagggcggatagttttgtgcgagtagcgttcggttggcgcggcgcggggtgttttttatgttaaaggaaaggatggattttttgtttgtttagggtttttattttttaaaatttttttaattgcggtattggaagggatttttttggcgtttatcgtcgaattttatcggcgagttgggagttttttaatttttagtagcgtcggttggtgcgcgtcgggtttggttgttgcggtgaagattaaggatcgtcgcggttttttaatcgttaggggtcgtaggttacgggcggtcgcgttcgg

SEQ ID NO: 7337 - DNA, 859 bp, Artificial Sequence
  Description of Artificial Sequence: Synthetic polynucleotide
cggcgcgttacgtagggaggttgttcggggttggcgcgtatcgagggggtgggggtcgagttcggggcggatttttttttcgatttttcgattggaggatagggaggaaatggttttgtatcgtacgatgaaaggtaggtaggagggttattaggcggggggtggtaggggacggaggatgtttagagttggaggatttcgttcgttttacggatatcgttattttgttttttattttattttgttttttattttatcgtagcgtttggtttatttattttttggttttcgttgttcgtttacgttttaacggttcgtagcggggtcgttttattgtcgtatttttatttcgcgttttgcgcgtttatttgtttacgaagttttcgagtatcgagtttttgtcggcgttttggtcgtttattacggcgatttgcggtagttttagtaggtagttttgttttagcgtcgaaaacgcgttttgtagacggtttattagcgggattagtttttttatttttcggttttttattttgttcgaggggtcggcgattagttggtttttgttcgtttttacgatttgatagggagtaggggtcgcgttgttttggttgttgttgttgcgtcgggtttagttagttaggttttggcgtagacgtcggagttcgtcgttagttcgtcgtttggttttgatagttaacgattcgtagcgcgtttgcgcgggcgggtaggggcgtggtttattttcgcgacgtttcgttttcgtttcgcggttgtttcgtttcgggttttttatcggattattaggttaggcgcgtacgtattgtagtttagttgcggttagatgttacggtttttgcgt

SEQ ID NO: 7338 - DNA, 791 bp, Artificial Sequence
  Description of Artificial Sequence: Synthetic polynucleotide
cgcgcgattgtagttttggggggcgcgttcggaatcgaaatggtttaagagatttgaggatcggcgcgtttttttttttcggttttagtttttaattttcgttatagcgtagagggggtagtgcggtgggagggggggagttgtggggttggggtttcggtttggtcggtgaagttttaggattcgttcgtttggggttaaggtaaggggtgcggtacgaggagcgtagggagtttcgagttttaggcgtagatttagttgcggattcgtcgtatagttttggtgttgtaagcgtggatcgtgggcgtaaggtttcggcgggaggtattcggttcggtcgcggtcgggtttgtagggttttggcgtagcggatttcggcgcgttttggttcgcggttcgtagggtttagacggggtcgagatagttaagttcggttcgttcgcgttaggcgttggagttaaggttgacgggcggttttgaattatgtttggaggagcggcgcggtttttagggtttcgttgagacgcgttgtagggttgttcgggttttttttcggcgacgcggttagtagttcgcgtcgcgtttttagcggcggtaaaaattaggagtttcggggttttgtcgggcgtcggtattggagggtaagagatgttggtttttttcggggtttattatttcggggttttatagtatttacgtgggatggggatttcggagtagattacggacggaaaggaacggtggttttattttttgtaaaagaaattttcgcgcgtatacgggtgtttcgg

SEQ ID NO: 7339 - DNA, 586 bp, Artificial Sequence
  Description of Artificial Sequence: Synthetic polynucleotide
cgggttgcgcgtttcgagttgtacgggtaggtatttttttcggttttgttttataaggtggggagagcggggttggacgcgggagggggcgggggggggagcgtgagaagaaacgaaatcgcgggaaggaggggatatcggcgggttgggtagagggcgaggcggaggttaagttgggtttgggcgtcgtcgttttcgcgcgcgtttgttgtcgggttcgggttattcggagagcgcgggcgattcgggtttcgcgtttgttcgtcgtcgtcgtcgtcgtcgtcgtcgttacgcgtttagtttcgggttgttcgttggttcggtttcggtacggcgcggcgcgggggcggtgggtgtagttttagttgtcgtgcgtttcggcgtttttgtgcgcgagtttcgtttagttttttttcgtatgtttttgtgtgttttttttcgtaatgtttttcgtgtttcgcggggggtgtgtggtacggttcgggcgttcgtagttttgtagtttttcgttgtttttttttttcggttcgtttttgtcgttttttgtcggttcgttttttttttttcggaattttttttttttcgt

SEQ ID NO: 7340 - DNA, 1678 bp, Artificial Sequence
  Description of Artificial Sequence: Synthetic polynucleotide
cgggatcgacggcggcgtttttttttcgtttttcgtcggtaggagaggacggggcgggagaggaaggggttagttgtggttgtagtcgttatttttcggcgttcgggattcgggacgtttagtcgggttttgtagagggtgttttatttgggtattagcggtttttcgtttttagttagggtatcgaaggcgcgttcggcgggatgtagcgaattgttttttgtttcgggatagtggagcggtagaaggtttaatttttcggttcgtttacgttcgtaaggtggaaaaagtggggtgaaatcggggaaatttagcgaaattggggcgaaagaagagagattaaagcgtgttatttacgtgttagatggcgaagaagatgagcgtagcgtatagtattagagatagtatgtagtagaacgtagcgaaagtgaaggttatggtcggcggattttaattttattatatacgttaagaagtttttaggagttcgatgtttttttagaggatcgtattttttttaaggagtcgcgtttgtacgtttttttttaggttagtgtttaggagggcgtatagttagcgaagcgattcgagggttagcgaataagcgttggattttcgtaggtttcggcgattttagattcggtttttcggcgaagataggaaaacgtgtgtcgagagtcgttggagggaatcgttcgtaaatcgaagaagaaattaaattagtagcgaatatttgtaaattagtgttaagttgtgagtttttcgagattaatacgataagcgatgcgacgattttacggaggatcgagggaggaggttttattcgttttaggaagagttttttgtttttttttattaaatcgttgaggagagacgagcgtttcgtttcggattttttcgcgttatcggggcgtaaacggatagtgtttagcgaggtgttcgagcggttttcgagttttttttaaattttagagtcgggtagcgttttttttcgagagaaggagtttttaggtagtcgggaggaggtaggtttcgttggttttgcgttttagacgcggtttttagcgtagtcgtgcgtttcgaggcgcgttcgtttttaatcgtgatttcggttagtcggttttcgtaatttaagtgtttcggaaatcgggggtcggatcggggcgagtattggttttatttaacgggttaattttagttcgggtggttgtagtagtgggttttaggttaaacgttgtagttcgttttatttgttgttgtcgttgtcgtcgtcgtcgtcgtcgtttttgttattgcgagaattgtagcggtgcgattcgggatttttttttttcggcgttttattttcgatttttgtttcgttgagcgcgtttttttcggcgggcggagattgtagcgtcgggggttgaggaaaggtgggtggcgaagcgtcgtcgggcgtttggtggtcgttgtcgtcgttattgtagttgtgtacgttcgtttttcggaggaaatttgaagttagtagtataagtagggttggaggtcgagcggaggtggggcgggatcggttggagtagggattttttaaatacgtgcgtttggaggaggtgggaagttgcggaagggtatggtgtgtgtttcgcgtttaaacgtcgtagtcgtttttttcggtttttgtagtttcgtttatcgg

SEQ ID NO: 7341 - DNA, 1600 bp, Artificial Sequence
  Description of Artificial Sequence: Synthetic polynucleotide
cgagacggagttagtatttgattagcgattaatagtggatcggcgaggcgggtttttaattagagcgagatttttagaagttggatagtttttgtatttatgggagtatgcggcgtagttggtagtgatttttaggaaatttcggtagtagtcgtcgtcgcgggtgtggtgatttcgggttcgtcgtttatttggagcgtttcggcggcgtttggtttagaattatcggggcggatagttttttggagttgtacgcggattgcggaaggggatagtgagcgggatcggttcgtatttcgttcgcgggttcggatcgttggaagtattcgggtttttttttttttttgtttttcggtttcgttttttttttttcgcgttgcgcgtggcggtttcgggttgcgcgtttttgtaggaggagatcggtattgtcgtcggcggttttttttttaatcgttagtttcggtcgcgcgtttcgtttcgtttcgcggaggagggtgggggcgtttttcgcgtcgggttcgtttagttttttcgcggttgttcgggtcgggttttttattggtcggcgggcgggaggtgaggggcggtagggttcgtttttggcggttcgcgttcgggaaggtcggtagtcgagcgtcggaggtcgtggagagggcgggtagggaggcggcgggcgtcgaggagatgtagcggcggcggtggtggcggtggtggcggcggtggcggcggcggcgtttggtttcggtcgtagtttttgcgtttcgttcgttttgggtcgtttttgttagtttcgcgcgcggttcgtttttcgtcgcggttcgtagtttgcggcgttcgagtttcgagggcgttttttcgggcgttgggttcgaggcggttaagacggcgggtcggtcgggtacggggcggcgggcgttgtgttgcgggttgcgttggtggggggcggcgggtcgcggcgcgggtttagggttcggcgtgtgcggttgggaggtattgtgggggcgggcgcgcgggcggcggtcggggttatggtcgagggcggcgggggcgcgcggaggagggcgtcggcgttgttcgaggttgttcgcgcgcgttacgagagtttgtatatttcggacgacgtgttcggcgagttcggttcggatagcggcgggaattttttttatagtatttcggtcgtttcgcgttttttttcggtcgttttttcggacgacgagcgcgagttttcgggatttttaggggtcgtttcgttatcgtttcgcgtttcggacgtataggagtcggaggaggacgaggtcggcgcgggttggagcgtagcgttgcgggatcgttcgttttcgcgtttcgaggatatcggcggtaaggggttgttcgcgggtggatgtcgggggcggcgttggaatcgggcgcgggggaggcgtgggtgttggggcgggcgagtttagatttttcgtgggttggtttgtgggtgttttttcggaaataaatgaggttgtaggagcggtgatcggtttgattgtttttgggggtttcgaattcgtgggtggagagggtaaggcggaggtcgtggttagtatttttttagtgataatgtcgtcgg

SEQ ID NO: 7342 - DNA, 2394 bp, Artificial Sequence; identical to SEQ ID NO: 7331
  Description of Artificial Sequence: Synthetic polynucleotide

SEQ ID NO: 7343 - DNA, 1160 bp, Artificial Sequence
  Description of Artificial Sequence: Synthetic polynucleotide
cgtaggattcgtttttcgatggacgtgagttttatcggttcgttggtgagattttttacggagcgcgattattttagattttttttaatcgtttcgtttattattaagtatttgagttgtcggagttgggggttgatgtcggatagttttcgggggttgacgttcggtgatttttttatgttattgcggtcgtaggcgttacgggtaggtgggtgggtagggggagtatggatagagaggaggggattcgtgaggagtagattttagggcgagagtaagagcgcggtcggggtttttcgggggcgagcgtcgcggtagagttcgcgttttttttttttcgtcgttatttatttattttttcgggtagttgtttttagtgttttattttgggcgtttcggggtagtgcgggttggggcgagtggcgagggaaagaatgattgaaatttttcgagtagttttatcgcgcgcgtcgttttttttcgagttttagattgtttagtgttttagttgtaaagggttatttcggcgtttcggtttttcgttcgtcggttcgtttatttacgttcggggcgttatttatacggtaatgtttttgtttttgggtgcgtcgttgggaaattttcgaatttttataggtaaagatagagtgggatcggtagtttttagatttgaggcggaggggtcgcgggtcggagttttttgtagtcgttagtttgggaagattggagtgcgttgtttatcgagggtttgcgtcgcgtcggtcgtttcgggtcgttttgtgcgcgttcgcgcggtttgtattcgagcgttttcgcggcgtgcggtacgatgtaggcgcggcggtttagttcggtgattttaggtcggttcgcgcgttcgtcgtaacgattcggtagtcgaggtagcgtcgcgttttacgttcgttatcgtcgtcgtcgttttagtatatcgtaggcgtgagtttcgtcgcgatcgggagagtttttttagttgtgcgttttcgaggtatttggtcgggcggggaggcgtcgggtcggggcgtataggggttaggcgggggcgttgttgtttatttttcgtttttcgggcgtgcgtttcgtttcggagttcgtatttcgcgttcgcgtttcgtttggaagttttggggtatcggacgcgt

SEQ ID NO: 7344 - DNA, 588 bp, Artificial Sequence
  Description of Artificial Sequence: Synthetic polynucleotide
cgtaggcggcggcgttttgtattgcggagtcgcgttttgggggagtagtatttttagtttcggcgtttcgtagttagatagttttttttagggtggtagtatttttcggttagggtgtagggattttcggggcgaggcggtcgcgtattattttttattttggtaagggttaggatcggattgttgtaggcgttgagcggggttattcgggtcgagtgtttttttatgatgagtcggtcgtttgtaggagcgttgtcgtcgatcgtttatattttggggtcggttggagcgcgtttttttcgggttcgtggtcgacgcggttttttgtcgtcggggagtattagcggttcgttttttttagtttcggttttttcggttgttcgtcgggtttcggttgtcgcgttgtttattgcggcggtcgttttgtagcgtatatttttttcggtcgcgtagttattttatatatacgcgcgtatagttttttatttggaggttgttgtaaattttaacgttacgtataagtgtattttttgtttttatttcgtagtttatttgtttcgttttttttttcgggacgtttagtttcgt

SEQ ID NO: 7345 - DNA, 878 bp, Artificial Sequence
  Description of Artificial Sequence: Synthetic polynucleotide
cgggaggcgaaaacgaaatttatttttttgcgtttatttttgttagaggtttgtaggacgtgttttaatttggtatttcgagtttagaataaaagttacgggggttgcggtatgggtagggggaaggcgcgcggtggttgacgcggggtaggggttttggcgagcgcgggaggggcggttagtagtcgttcgcggggttggattgggagtttcgtgcgatttcgggtttggcgtttgggtcgggggtggttttcgggtttttttcgggggtcgtcgaggttcggtttcgatagttttgcggttgttgcgagcgtttttcgagttttcgtttcgcggtgttcgttttaggagcgggcgcggcgttgtgtttttttatttgcgcgtagagggtcgttcggtgaagttatggcggcgggttaggggtaaacgagcgttcgagcggggttggtaggttttcggggcgcgggaggatcgtgggattacggggatgaaaagttttgcggtttcgacgcgtttggagtaaatcgtggttttgcgcgtttttgttttttttcgtttttttttttttttttttttttttttttcgttttttttacgagtttattttttgttttggtaattagtaaagttttttcgttgcgcgtttttcggtatttttttttagaggcgcggggcgggagtcggggtgtcgcgattcggggttgggacgtaaggcggggtttcgagtgtttcgggcgtttttagcgtttagagcgcgcgttttgttcggtatttacgtttttttgggcgggttttagcggggggttgatacgattgtcgttcgggatagattgcgagcgaaggattggttttaagaaacggttgtagtcgcgggtcgt

SEQ ID NO: 7346 - DNA, 561 bp, Artificial Sequence
  Description of Artificial Sequence: Synthetic polynucleotide
cgagtgggcgcgaatttttatagtagcgttaagtagtaggattatagcgttagcgtttggtttcggaggaaagataagttggagtacgtaagggcgattcgttttcgggggtttcggttaggtatttgtcgtatgtatttttttcgtggtggtggtatgagcgcgcgcggggcgcggggggtaggcgaggggattttggtaggcgtcgacgttttaggtcggattcgggggtttttttgtttgtagttttttgttttaatgatcgggttgcggggaggggagggtaggtttttttttaggtttttggtttttgtcgattcgatttgtttatttgcgtttttcggtagggtttatttgtacggggttttggaggtgtttgtgtagagtgagtacgaaggggaagtgttattagcgtggtttcgagtaatttggcgttgtatggtagtgggttttagagcggcgtttgttcgcgtttttgggggttgttttatttagtttaaaaattagtaaattaacgaatgagtaaagttggcgtcgttagcgattagcgtggattcgcgt

SEQ ID NO: 7347 - DNA, 1235 bp, Artificial Sequence
  Description of Artificial Sequence: Synthetic polynucleotide
cgagttgagttgttcgcgaggttgcggtaggaggtttcgttttttcgggtagggttttttttggaggttttttcggttttttttagacgtattcgcgtcgcgtttttgtttttcgggagtagtttttttttagtcgtcggttttgggagttttatcgtttaaacgggagttgagtttgtaagcggttaggcggcggtgcggttggtgttgttgttgatgttagagttagaaagtagttgtgattggatttaattagacgttgttgtagtaaatagataagttttttgcgtgattggttttaaagtggttggtgttaaataattagtagaggcgtaaaagtagtttttttgcgttgggagtttagagtaggaggtagagttcgcgggaagttcggagtatttaggacgtcgcgcgttttttttcgttttttttgattagggagtagttcgttttaggcgtttagtcgaggtttttagtttagtgggagtaagttatagagaataattcgagagatagagagacggagcgcgtttttttgtttagttttgaaaagtgagtcgttttcgggtttgtaattttaagtttcgtagtagcggcggcggcggttgtcgggaaggaggtaggtgtaggtgtaggagggaggcggttttgggtttcgcgtttgggtttcggttatggtttcggttttggggagcggtagagggtttggagggttgagtagttaatttaaatgtaagtttaagaggaggaggaggcggaggtttaagcggaaaggtaaggatcgcgtggcgcgtcggtttttgtttttttttattttcggtttttttatttcggttttttatggggttttcgggtttgttcgttgtgagtagttttattttggggtgttggcgggatggttgtttcgtgtagggcgttcgggagtttagatttcgtggaaatgtttggggtttttttttgtttagaggggatagtgagtagttacgttgcgatatgtttgagggattcggacgaagtggggcgagggcggcgaggagtttttcggggatttcgcgcgttttcgggtttcgtagtttttagtggtcggtcgggttggtattgttttttatttttcggaggttatttcgttttttagtgttaaaggaattatttaaaaacgggggaacgagttttcgcgttagttatttttatttaaattgtttcggaggaagggataggcgaagttttgcgatcgt

SEQ ID NO: 7348 - DNA, 5964 bp, Artificial Sequence
  Description of Artificial Sequence: Synthetic polynucleotide
cgcggtggttggttgtagtttacgtttttacgatttttgtagaaggaaattacgttttttttttttttttcgtatttttatttttattttaagttttcgggaagttttgcgttggtattagggtaagcgtttgtcggttttcgggagttaagcgaggtcgcgcggtttgggacgtaaatgggagggagtagtcgttgtcgttttgcggggttagggttattgggtaggcgtagcgcgggttaagagtgggaggtttagggtaggggattcgtattcggggttatttttgtcgcggcgcgttttgcgttttagtagtgtatagggtggggatttttcgaggatagtggtgcgtcgacgggtttttcggtttttttttttttataggtttcgttgtgtggtgaaggagttagaagaggcgatttgggtgttgagattcggggttaaatcgtggagagtgtttggagtttatattttagatttttggacgtcgtagttagtttagtaggttttatttggagtcgtttcggggtttaatcgggaggtagcggggtgtaggcgagagggttaatgcgttcggttcggttggtttgaggagtttttgtttttagcgatttatagggtagagagtttagggtttcggtttgatgtttttaatagttggggattggagagttggaggggtcgtagatttaggttagagtttaaagtgcgtcgcgcggcgagtcgttggatttttttgggttttacgtggtttttgtgttatatggagtgataggtcggcggaaggcgttttagtcgtcgtttagcgttttttaaggtgtaaggaggtaggatttttttatattggcggcgtagggggttttacggttgcggacgttcgttttggattttttagttcggtagattttttgggtggagaggcgttttttagggtcgcggcgaaggagagcggtttttcggtacgttttttcgtattttttttagattagtttcggttttatcgtttaggagagggttcgtttgaggatttttgtttgtgtcgcgcgtggttagtttcggtttttttattttatggttggtttttagttttttagagcggatatttttttttagggatgtagggcgaggaagggcgggtggagttgcgaatttacggggatttggaggattttttggttttttggagaggggtattatgagagggatttatgggatatagatttgggggattgggtaattttattttttttggtaattataaaaattttgagtaaacgtgtttattcgttatttcgtagaaatatataatgtaggtttatataggtatttttgcgaggttttttagttaagggcgtagcgtttttcggaagtttttggttttgttattagggcgttatcggttttttcgtattggggatatttcgtttgggttttgcgtagtcgttgtatttaaggttttgggagtttcgcgtttttttttaggcgttcgggataaagtgttcgagggtttcgtagacgtttagttttgttcggggtttacggtcgtcggggttttttaacggatcgtcgagggttacgttttgttggggtgtgagcgacgatttttttttcgttttatgaggttcgttattagttaggtgttttatgagacgtcgtggcgagtacggttatttggtagttcgttcgggtagttttaatttaattttttgtttttcggggtatttttttttcgaatagtttttttcggtttttttagttttgtttaaggggtttggaaatgttcgtagttttaagaaaggttttatttaagtataggatggggtggggcgggcggggttaagattgttttggggattgaatttattttcgtttttagcgattttcggcggataaagcgtaagtttgtgtatacggtcgattgagttattggaaatttagtttacgaatcgtagttagggaaacgggagtttgtttagttgtttttgcggaggggtgtgcggaaacgttcgcgatgggaattttttgtagattatgtatggagggagtttataaaaaggaggaaggggagcgcggtggggaggaggtcgcgtgggcgtggaaggttttagggttttgggggtgttcgtttgtttaggcgtagggaatggcgcggagttggttggggaaggagtcgattacgtttcgtaggttaattggtttaagaaattttgtaagcgttggaaaaggtcgttgaaggagttcgttgtacgcgtacgtatatatatatatatatatataaaattttaaaaaaaaaaaaaaaaaaaaaaaaaaaagagcgtcgagtatgcgtatagagaggatgttatattggaatgagttgtagtgggagtcggaggatcggagcgggcgcgcgagggaggcggcgggcggggagcgagcgggtaagggcgggcgagcgagtaagcgagcgaggtcggtgttttttcgggcggcgatcggggtttgggtttacgtcgagggtaggacgaattttattaggtaggacgtcgcgtcggttgttgttttcggcgtttaggttggtcggagagtagtttttcggttcgtaggttgagtgcgttggttaggggttttttttagtttaggaaaaaaaaggaaaaaaaaaaaaaggaaggaagtttgagggagttggggttggaggtggcgggtgggggaaggttggggagggtgtaggggagcgaaagagaagggtaggagaagaaagcgattgtatttgagcgaagttttaaatttttttgtgcgttttaggttgttatttttgtttttcgggtttttttcgtttgcgttttcgggttcggaaaagtcgagtcgtgcgggagttcgttcggagttgtaaagtgtttttttttttcgggcgtagtttgttttttttcgtcgtttatttttttcgtttttgtatttattttagcgacgtagtcgtcgttgttatttatttcgcgttttcgcgtttttttcgcgttggggtttttttttttttttggtttgggtgggagaaaaagatggtgaggacggggaatcggagatcggtatgggggtaaaaatcgtgtagatattcggaatcgtttttttggaaatatttgtttgagtaattgaaataaaattggtagtagtagttttggagcgtgttttagcgaggatggtttttttgtttattattttttttttaaagtaatattttgttatttaggggtttttcggttgtttttttttattcgatttttttttaaaattgttgatttgagttggttttggagtttattttttaatatgcgtgcgtgggtatgtgtatgtgtgtgtatgttttgtagaaattcgttaaaatgtaattgtaggaattgcgagatgtatttattgattttgattaggggcggtgggaaggggttggagggagttgggggattttggagggtgggaagtggttgattttcggtggtcggatatttatttagagtttgattcgtattcgtgtttttttggaagcgttataattgcggggaaggagtttttagaaatcgtgttagttttaatatggcgggttaaggtggtttttaaaaattgaaaataaaggttttgaggtgggaaaaaatttagttgaagtttttattttttagtttcgattttttttggttattttaggaagcgttttagcgaattaagtggggaaaaaaagaaggaatgggttgttcggtttttttttttcgtggttagagtttgtgtgttaagtttattgttaggggggaaagggatggagaagtgtttttggttcggattagggtatcgaaacgtaattgtcgtgtgtgtttgtggattagtgtgtaggtttgcgtgtgcgtagtttttttgggtgtgtgtgttaaagagaattatttcgaatgtgtgtgtgcgttttggaattagattttgttatgatttgacgtgataaattgcggatacgtggtgtaaagtatatgagggtagagggagtgatttattttgtttttttaggagacgagttagttttcgttttgtgtgtgttggattttgcgcgggtagattttcgagtaggtggggcgaggaggtgtttattaaaaggattaattgtttcgggtattgggtgtaatcgggttgtagacgttagtcggatttcgtgtgtgtagggggcgcgttgtatttaatagtgggtttttgtttttttttacgtcgttttggggtgggaggtgggggatcgggatcgaagtttggagaagattaaagtggtggtggtggtggtggggtggggtagaagggcgggagcgcgcggttttgggagataagtacgtagggtcgaggcgaggggttgttttttttatttttgggtttcgcgttttagggaaggtgggggatggggatagcgtttggggaagaaattgttttttgttcggtttaggaattttttcggcgtatcggagaggggtatttttttgttttggcgggtatggaggtcgggtagtcgtcgggggatgtgagtgggcggcgaagtgcgggggaaaggtcggcgttttagggcggggaggatttgggagtggagttcggagataaaatcggggttaggtagaggagttagagggaaagttagtaaacgcgagttcgggtgagagttatcggaatgcgggaacgtagtttagtcgggaatagggttttcgataggggtcgttcgtggttaggacgcggtcgttgaatagaggtcgcgcggcggtttttgttcgagggatttcgtgggcgggggttatacggaggtcgcgtacggttttcggggttggcgggggtaggtgggaggatttttttcgggttcgcgaatttgatttggtagcggttaggtgtttggaagcgtttttaaatgatagggttataaagatatgttggttaggtttgtagttagcgtagtaacgtggtttgtaggagcgtagaacgaggttagatagggttattcggacgtcgtgttgttagtgggtgggggtcgggagtaagcggtattggtttggagatttcgcggtaggtgattttttttatttgggtagcgaggttgaacgatggcgatacgtcggttaggacgcgttcgtggtttttttagtttgcgtttgggcgcgttttttcggggtcggtttttttatgggtttcgcgaggtggggagtagtttaaaatggttttgtgttgcgaagttgtagttttagtcgcgaatttttttttttgtttttttgacgtcgtcgttgataagcgtaatttgttttaaggtttcgaaattcgcgattttgtacgaggtcgtgtcgtggaagcggatgtatagttgattataaagaatattttatagggttttcgaagggtttaagtttttttttttggtggggaggagggaggagtcgagattgggtaggagttcggtcgattatcgttttggtatttaggggttcggggcgtattagtagttggggttggggatttggatgcgcgaaaagtcgagggagttttcggggacgcggatggggattattcggggtaatagttacggatatcggtgttcgtggttgatggcgtttgtggtgttcgagaatttcgggacgacgttggaaagtttgggagatcgtttttaaatttttggagattagttcgtagtttcgttttcggaatttttaggatttttgggtttttaaagttgggtgggattttaagaaggtaaggcgaggttcgtggttttgacgatcggtcgttcgatttttcgtttattttagttttttttattttgtttttttgaattttgtcgaatcgagtcgggtttggggtttcggggtttcgcgtattaattttagtcgcgttttgagggttttcgtagtatagtcgcggttgattcgaggttattggtgggaaattaatttagacgaggtcgattttttttggatttggttcggttgtcgt

SEQ ID NO: 7349 - DNA, 5964 bp, Artificial Sequence; identical to SEQ ID NO: 7348
  Description of Artificial Sequence: Synthetic polynucleotide

SEQ ID NO: 7350 - DNA, 5964 bp, Artificial Sequence; identical to SEQ ID NO: 7348
  Description of Artificial Sequence: Synthetic polynucleotide

SEQ ID NO: 7351 - DNA, 703 bp, Artificial Sequence
  Description of Artificial Sequence: Synthetic polynucleotide
cgtttggggattttcgtgttgggtatttcgtacgttttggacgcgcgtagttttatcgggagcgaattttgtttcgtttgcgggtgttacggagaggggttgggaagtcgagttagttttggcggcgattgggggcgtttttggttttttgggggggcgggggcgcgtattgttgtttaggatcgggcggcgggcggtggcggcggcggtggcgcgcggtggtcgtttagtattcgatttagtagcgcgtcggggattggttcggggcgcgttgggcgtattatgcggcgggtcgggcgcgggcgaggggcgggtcggcggcggggtttattggcgtcgggttaggttcggcgcgagaggcgcgagcgggttatgggttgacgtcgagggtttgcggcgggggcggcggcggggacggggcgggggttcgttagttgcgggcgttaaggtcgtttagtaggttaagggttttcgttcgggcgaatgggacgttcgtttcggggtattagtcgtttgtagttagaagtttttcggattttttggaagcgtaaaaaataaaaggtaatgtgtttttgtttttcggtcgcggtggtagggaggcgattgacggtagtttttcgtttttcgtgtttttacgttgggtcggggaaaagggacgcgtcgttgtttttttattgggggtttggagtcgtttatttcgcgt

SEQ ID NO: 7352 - DNA, 1315 bp, Artificial Sequence
  Description of Artificial Sequence: Synthetic polynucleotide
cgtgggcgttcgggggattcgcgggtattcgggacgaggcgagggcgtagaaaatttggagtttaattagtacggagttgagttttcgcgttttaatttttaggtgatttcgtgcggcggcggcggtagtagtagtggtagcggcgatcggagttcgtagtagtttcgagcgttttcgggaggataggcggcgagttcggcgaatcgttatttgttagtcgatcgcggcgtttcgcgggtcggggtcgggagttcggggcgagttcgaacgcggtttttttttcgttcgtcgcggagattttgtcgggtgggttgcgggcgtttttcgttgtcgtttgtgaacgttgtgggtgcgcggggttgcggttacggcggcggtggcggcggcggcgggagtcgcgagtcggggtcgttcgggttgtgtttcgtttcggtagtagcggtggcggcggcgtttgtggtttaggatgcggtcggggggcgtattgttcgttttgttcgttagtttgttgttgttgttgttgttgtgtttgttttggtgttcggtagacgcgttcggtcgcgttaggtaatttatttattcgtcggtcgcgtttcgcgtcgcgcgtttcgtttggcgttttcggatttttaagtcgtttatcgttttttttcgggcgcggagatttttggtcgcggcggggagtagtttacgggcggcgacggtttgagagtggagtgggggagggggtcgtagggaggcgatttttcgatcggtggacggcggttggggagtagagggatcggttagggttgcgggggttttagcgcgtatcgttgtgggcgaggtagttgtggagcgggatttgtcgtcgggtttcgtattaggattttatgttttttattttggtttttgttgttttttttttttcgttttaaggtttttttaattttggggttggggatttggtttgggagtcggggagtgcgagatttttttgttaggtaaggagcgcgatttttagttttttagttaatagttttcggcggggtgtagtaatttaagtttttttttcggttgtgtaggattttggtggaggaaagtagggaggttatttacggtattttcgtagcgttgaggacgtttcggagttcggcgatcgcggtatcgcgcgttattaataggtatagcggcgtttagcgcgggcggattggggttcgggagttgcgagtcgggtatggggcgcggttgtatcggtttggattcgttgggagtaggtaggttgggacggcgcgagtgagtgtaagagtgtgcgtgtgtttgaagagggcgcgg

SEQ ID NO: 7353 - DNA, 1316 bp, Artificial Sequence
  Description of Artificial Sequence: Synthetic polynucleotide
cggggtttttcgaggtcgtttcgtcgtttaggatggagtaggtttggtttttggaagggcgcgcgggttgtttggggacgggggcgttttttttcgcgtttcgcggtttttttttttttattgtaggtagcgcgcgtttgtagcgttttgggatcgaattgatgtttttgggaaacgaaattaaatttttttgaagtttttagttcgggttttttttgtttttcgttattcggcgtggtttagttcgggcgcggaacgagggcggggtcgtggttatcgcggcggaaacgattcgggtcgggggcgggcggcgaggataagggggttttgtgcggtattcgtttagtttgcgttttggggattgcggtcgggcggcggggttggacgggagtggacggggttgggcgcgggttgggcgcgttgggtcggttaggcggcgcgttgatcgcggttttcgtgcgtttcgtaggcggggagttcgtatcgtcgcgttcgggtcgcgagtgatgataatttaagaggtcggcgcgggcgggcgtgagcggcggaggagtcgggcgcggcgatacgcggttatggagcgggagtcggcggggatcgaggagttcgggttttcgggacggcggaggcgtcgagagggtaggacgcgtacggtgcgttttaatttgttgtcgttttcgggcgtcgaggattttgcggttggcgcggttaagggcgagcggcgacggcggcgcgggtgtgtttagtatttggtcgataatcggtttaagattattaagtatacgttgttgttttttttgtttaagaatttgttcgagtagttttatcgttcggttaacgtgtattttgtttttatcgcgttgtttaatttcgtgtcggcggtgaacgttttttagttcggtttggtattggcgtcggtgttttttattttggttattacggtttttagggatttgtgggaggattatagtcgttatcgtttcgattataagattaattatttgggttgtttggtttttagtaggtgagttgggcgggcgggcgagcgagcgcgcggtggcgtagggtagggcgtttcgggaatttggtgttgggtatagtgattggtaggggttgggtgtttagaaggtagttttatttagggtggagggttcggttgcgcgggattcggtgtcgatcgaagttatagcgtcgttaaggtttttttgtgttttcgtcgtagttaaaggggcgttttggatgcggggacgcgtggggattttttgttatttcgtgtcggggttagaatgattttaaggttagaaatcgacggtcgt

SEQ ID NO: 7354 - DNA, 1110 bp, Artificial Sequence
  Description of Artificial Sequence: Synthetic polynucleotide
cgtttatttcggttcggagcgtggttaggagagtcggtatcgtagaaagcgttgcgggaagcgggttttttttcgtttattcggatttacgatttttagtaggtttagtttatttttttgatttatgtttttttatgtgtttttttcgggaaggggcgaggagggttagttggagtaattcgggagaagtttgggaggattggtaggtttttttcgtttttttttattggtttttcggaagtagagaaaaatggaagtcgaggtagagttaggaaaaggcgtaaaggggtagggttttcggcgttaggagaggagtagagggtgggtaggcgacgaggggaggaggtgcgaggttagagatttttgtagtggaggcgtcgggagaattcgaggtcggtgttttgttcggcggtttataaaggaaggagaaggcgtcgcgttttcgttatttgtgcggcggtttcgagcgttttcgcgggagttacgttttttagtagttttatttggattttttgcgttatcgtcgtcgtcgttgtgggaggcgatttggatatgtttttttggattattggcgaaaagtcggttcggagcgaagtagttagttttcggcggcgggttttttttttttcgttttcgttttttcgcgttttgatcggttttgggggtcgtttagggtttaggttcggtcgttttcggcgtagcgtttcgtagcgtttcgggattcggcgttttgttgttaggcgtttagtgcgcgggacggggtcggggtatcgggcgaagcgagtcgttcgggaggcgggacgcgggggcgcggttgcggtgtttgggagaggggagtttttagcggggtagtcggggtcgggagagcgggcgtagcgcggcggggatcggagtcgcgggcgtcgggaaaggttttcgttaggaggggagggaatttcgggagcgcgagttagggggaggcgcgtcggaaagcgagagtgataagtagtttataagtcgaaaagtttttcgcgggaggcgcgcgtcgcgtgggtttcgatttagtcgttgcgcgtcgtcgtggtatataggttgaaaagtttgcgaagttatagaagttaggttcggcgt

SEQ ID NO: 7355 - DNA, 1655 bp, Artificial Sequence
  Description of Artificial Sequence: Synthetic polynucleotide
cgggttttttatcggcgaattgaaattggttcgtgaagaagtggtaaagtaatataatttttgtagcggttaggtcggttttcgggaatttcgttatgtcgtcgtcgttatttttttattttattcgttagtttttcgtcggtgttcgggggttttcgatgtaataggtacgatcgggttaaacgttgcggatcggtttcggtaggattcggaggtttttgtaaatgtcgttgcgattttatagtagggaatcgagaagaggaagaagcgaacgcgagtaggagcgtagcgtttttcggatttttgaggttttttttgtaatttgttatattcgtagtttttattcgatattgaataataatcgcggggaggagaggttatttgtagtcgaggttcgtaaattgtcggttttattcgggtagcgttaattcggtgttcgcggacggtgattttcgagttttagcgatgcgttttattgggtttaaaatagatttaattttatagttagcgtcgttgtttgttttagatttattagggttggtcggttttgtaggaatttttttttgtttagggatggtttcggtaggaggtttaggtttgcgggaaggaggttgatgacgaaattttttcgataagttttgtttttttttttcgttcgacgtagggcgcgcgttttttttcgtagtcggaggaatgggtagttttaaagagttgagttttgggaaggttagggttgtagtagtttgaggttcgaagttaggaaaaaaatgtgtttaaaaaaaaaaaaaaaaaagaggaagaagaaaggaaaagggtggagtgggagggagttacgttggaatttatcgggagagggttttttcgggtttaggaggaggtggttttaagttttcgcggagttttaggagtttggtggcggaggaggcgttgtcgtcgttacgttttttcgcgttttttttttatattttgaggagggaaggtagttcgtaatttgttagatttgtcgtcgtatttttttttttttttttttcgttttttttttcgtttttttaggttttttttatttttttttttgaaatcggtagttcgtatagatttgtttaatggttgtatttttttcggggttggttgaggagtcgcggttaatagattaagtcgggggagtttagcgaaggggagggagagggttattttagtttcgtgcgttttaggtagtcggttgttttagagcgcggggagaggggataggtcggggagttatcgggggagcgcggggcggtattttcgcgtcgtcggggcgttattttcgtagtttgttcgtacgttttgggtagtttcgttaattgcgttttatatttatttggttttcgggtcgttttcgcgttcgattgcggggggcgatcgcgtttcgtttcgattttggcggggtttttttgggtacgaaagggttaattatagttcgttttttcgcggaggttggttttggtagtggttagggagtggagaaagtaaattagagtcggttcggttatcgattttgcgaagttttttcgattttagtttagcgcgggagggtggcggaaggtggtgtatcgtagcgtggttttcgtcgttgtcgtcgcggttttgtaaagtgttagcgggggcgaaagcga

SEQ ID NO: 7356 - DNA, 1655 bp, Artificial Sequence; identical to SEQ ID NO: 7355
  Description of Artificial Sequence: Synthetic polynucleotide

SEQ ID NO: 7357 - DNA, 304 bp, Artificial Sequence
  Description of Artificial Sequence: Synthetic polynucleotide
cgcggtgggtagggttttaggaggtagttttcgttcggcgatagttttcggggcgtaatttttcgtaggacgcgtatttgttaggatagttattaagaggatgcggaggttgggggttttttcggggataaaattagggtattttaaggaattttttgcgcgtttaggtttgtttgtgaagttggtaggcggaggataatgggagtaggggtaggtttttagaggcgagttcgtttttattttttttatttgttttttatttttgcgtcggtcgtatttatttcgttttttttttagcgttcgt

SEQ ID NO: 7358 - DNA, 1666 bp, Artificial Sequence
  Description of Artificial Sequence: Synthetic polynucleotide
cgaaatcgcgcgagtggtaggagtaggttaggtcggaggttttttttcggtttttaattcggcggtttgttttttttttttcggggcgtttgtatagtagatatttgtagtacgggcggtcgttcgggttttcgatataaggcgttggtatttgagtttttgattggtaatgtattataaatcgttttttttaggtttttttagagtaggagtacggaggttatcgtgtttataaatttttttgtgttcgttacgttttttgggttttgggcgttcgggtttttagtcgtagagtacgtttgttcgtgggaattttaatatttgtgtttcgcgaggtcggcggggcgggggcgggggattgggattattttgtttttttttagttcggtttttttcgttttgttcgtcgttggtttatagagcgtagcgagtggaacgaattgggtgcgtcgtttttagacgttggcggaaattaaatgatgaggcgaggtgggatattcgtttttcgtttcgcggtcgacgtttagtttacggtaaaggtattatacggtgtttcgtttcgcggcgacgcgagcggcgggatgattcggtttgggttttggcgtagttaaaggttcggttcgttggggcgcgattttagttcggcgcgtatagtttttcgagttttaggttggattgggtgcggttgtatttgtggagtgggtggttcggtgattgttattcgggttagtgttgttagtagatgtgtatattttgggcgggggttggcggtcgagtgttattagtaggggcggcggttaggtagttattcgtcgttttttaagttcggcgttgcgcgtagggtttggagtattcggtgttgagacgcgaatgcgtataaagagaaaagtgtttttagtgtttttttaaaatggggaatagggaagaaggataagtattatgtaagattgttattgttatttgttttttgcggattatgttgttttttttttcgttggtttggttttgagtattgaaagtcggggagagggcgtcggttttagagttagtcgtattcggggatcgtaggcggcgttggttcgggttatttaagttcggtagatgagtttttggtttgcgggggatcgggtcggaggttagggggacggtagtgtcgtcggagggagcgcgtagtttaaggtcggtgtttcggtttcgcgcgttttttttcgggttcgtagggaattcgggttatttggggagtcgggttttgtcggttacgttggtttttcgcggttttagaattaattaaacgttttttttggttaagggaagttttgcgtcggacgggggtgggggcgtgtgggggcggtatgtgggtatcggaataattagttttatttttgcgtttttatagaattcgcggcgtagcgagaagtgaatagcggtcgtttgaatggcggttttaaaaggcgatatttgtaagcgcggtcggttgtgaattgaattgagttaaatgcggcgttcgttcgtatttgagtcgcgagttattagtgttaggcgcgttcggtcgttcgggcggggaagcgcgcggttaggtcgttcgcgttgaatgcggtaagttgcggcgcggtcgttttatgggaatgtcgttatttgtgttgttagcggtcgggagggggtgcgt

SEQ ID NO: 7359 - DNA, 5030 bp, Artificial Sequence
  Description of Artificial Sequence: Synthetic polynucleotide
cgcgttatagtggtttttttcgtttagttacgcgtagtgaaattttcggtaatcgggttagttaagatacgggatttgtatcgtagttttttagtttttggagtcggagtcgagcgttttcggtagtttttttaattttttttttaaagtgcgaagggaaaagtttcgtttgttttacgattgtaaggtcggcggatttgggagtcgcgttcggtttcggaggattcggcgggttcggggtttttcggtagcggtttttttgttaggggttaatagtagttttcgcggtcgggcgggcgcggacgttttttttttattcgttcgggaacgtggatatcgcgttcgtaggatgttcgtcggttgggatcggtagttaggaaatatgagaaggtttcgttatttttgttttcgggcggcgcgcgtcgggttgggtaaataaagtcgagacgacggcggtggcggtggtgagcgcgttggagttcgcgtggagaatatgcggcggggatgggagtgcgtttagtttcgaggcgggagagttagtcgttttgtagtcggtcgtcggtttcgtagttataggtatagttttcgcgtcgtcgagttttagtcggttgcggcggaacgttaggttcgttttggtttttgcgttttgggcgtcggtgttttttcgttttttttttaatttttttttaaggtttggtggagaggcgttcgggtagcggttaaggttggtttaagggtttgcgcggagtttgggagtttatttggtcgcgttttttttgttttaaaattattcgtcggcgttgggggagggggatatttttgtagggagtgattttttcggttatagtttggagtgaatcggggtaagtgatttgagaagaggcgcgggtggtcgcgcgcgggagttttgggagggttagtaagtgtggtttatacgttttcggattttttgcgataggatagcgttcggatttttgttatcgtttgtttttgagtttgttgtttgtagatttatagcgcgtcgggtgtttgtgtttgcgatttttgcgtgggtttggggttgtcggggaagtgttcgaggtggttaatttcgtgatgatttcgttaggaaaaatacgtcgtcgtatttaggaggacgcgttggggtggttcggagaaggtcgggtcggggaagggtgttttgtataaataaagtagtatgaatatatatttttaagggtatgattttaaaagaaaatattaacgcgagttttgattgtagaataggggttgtaagtacgaaaattttttttgatatttattatcgaggttatgtgtatattttaggtacgtatttgtttgcgcgggaggacgtagttttaggggatatacgatatttagtagaggtttgattttatttttttacgaatatagatcgtagtcgtcgtttgatcgcggtggttacgcgtggttttaaatgttacgcgtggtttttgttgcggtggtcgaagggcggggcgggggcgttggcgagtgtgggcgtttggcgaggtaaagggtgtgtgtgtgtgtgtgtgtgtgtgtgtgtgtgtatgcgcgcgcgcgtgtgttagtggagtagtagtttatgtcgcggttggacgggtaaagggggcgttggtagcgaagttgaggtcgttcggaggaaacgggagttgtttcgaggcgcgaggcgaggagatggggcgggcgaagttcgtcgcgcgttttggggttgtaattttgcggtttcgcggtcgcgcggatttgtttttgacgtcggtgcgcggtaggtagaggtttagggttttcgcgattttagaggtgagttgttggtttttttcgatagtggtagtagtggttcgggaggtgcgtcgattaagttgttttttgttttgggtttttgatatttttatagtttttgaaagggttttcggagattttagagagaggcgggtgtcgaggggttacgagttcgcggttgatattcgcgttgcggaagagaatggtattgattgagggttttggggatttgggttttggcgttttggattttaggattatgtatttttcggggcgcgttgggggatgataggaagattttgggagagaagggggagaagtggtgttttcgttttgacgttatttaatttttttttgtttttgaatttaattttatttcgggggattttggcggatagaagatgcgggggttttaattaaattatttacgatttagaaaatacgaaaattttttaaatttcggtatggtttgggatttatgagttggggggttttgtggatacggttggtatattattttaaatttttttttttatttaattttttttgacgtttcgagttggggtttttagaggttttagttttttgttgtgattgaagaattacgcgcggttttacgtcggtcgcgtttcgtagttcggagtatgttttttttagatttaaattgaaatttagaggttcgtttgggaattcgttttttttgtttttgcgggtgaatgattttcggttgtagttttggggagtgaagggattggggggatcgatcgtttaggtaaggaagagggtaggtatttgttcggggaatttgtaggggcgggggcgtgtagttaattggggagagtcgtagggtttttgttagttgcggcggcgtcgttttttttttcggtttcgtagttcggcgattcggttaagtttaaggttttgaatttgtaggggtttgagtatttttagttagtaagtaacgagatgtattttttttttttagaagtcgagtttcgttgcggagttttcggcggtttagtttcgaggttttgcggtcgcgtcgcgcgtttttattaatcgatattatgaatattatcgtttttaataagtttagcggtgcggtgttgtttgaggacggaggcgtttcggagcgggagcggggtggtcggttttatagcggtgttttggatagtttttacgttcgtttcgaggtgggtattttcgacggttcgttttttaaggataatttcggtttgagatatcggaggatcgggtatgcgtatttttttgggggttttgttcgtttgcggttcggaggggtgggggtggtgagttgtgacggggtttcgtggtaacgcgggcgggtggacgggaaagggttcggagttttttgggagtgtaggtttgtttttttagggttcgcgtatttttatgttaaggggtttttattttaaaatatgagggattaattcgtcggggtagttttaaagagtttggtggagattaagggcgttaggagttgtttttcggtttttcgttgtttggatttcggagttgggggttatttgttttttttcggattgtgggtgtcggtgcgcggttgagggcgaggaaaaaggattgagttcggtgtagagaaataggcgaagtcgagtagtcggggagtttaggtttaggtttcgcggattttttttcggttattcgagtttttcgttagagtttcgcggttcgtttggtttaaggagtcgggaaggtcgtttttcgttagggagtttcgggcgtgagcgcggttcggttgggttcgcggcgaattcggagggggaggtttcgggtttgcggggtcgggtttgagtttagcggggtgaggggtatgttggggggggcggtagtttgcgggtgggttagttgtttagattgtcggtgagtggagggtaggttttgtttggttcgattcggcggtttttcgggcgtttcgtcggggaggggcggtcgttttagtcgtttttatttgaacgattgtattagttgtttgttttgcggcgtcgttgtttagtaaaatagagattcggtttcgttaaaatgttattattagtcgtttcgggtggaattgtattttaaagtgtttaaagaggtagaaatttaggaggtttcggcgtaggcgcgtaagtttcggggagcggttgggttcgttggcggtcgcgcgcgatatttttcggattcgtgagggagcgtagcgttttaggttacgttttaggtttttggttgtttttgttttttttttttttgaatgtgttttttttgaggtttttttattttatatgatgggatagagtttgtcgtatttttaatttttttttagtcgggaaacggttcgacggtgtttttgggttttgtagtttttttttataaattattaatttttttagaaagtttttttttttttttaaaagattaaaggaaatagtttaaagagagtcggggcggtaatgtttttttgttttattttttatgtttagtcggcgattttttttttgattataagcgacggaaagtttttgggagtagataagagattttcgagggaagtttcgagagttagtcgtatattttgttaggtttgttaggttagggttattcgagggtgcggcgttagcgggtgagggaagggtagtagttagtttcgttgtttagatacgcgattggaatagtagtattttttaaattatttgattttcgttttttaaatttttaattttggggtattgggtttaaggtatttttttatttaagataaatttatcgaaatgatttttttatttagaaattgtgtggtttttattttttgttttttttaaatattttgggcgcgcgtaaagtaggggcgtaaggtaggaatgcgtagtttggatgcggggttcgggtttggtcggggcgtggagcgttcgggcgggtaaacgcgtcgtttattagggtcgttttttttttttatgttttagcgttcggtagaatggcgggaaggtgaggtataagcggtaggttttgtaagatatggcgcgattttttaagtagtggttttataagtatcgtgataattcgtattttattaagatcgagaagatatttttggttttcggttcgtagatgacgttagtgtaggtaattaggatttattaatattttgattcgttttttcgcgaggggttgaagagcgggaacgtttagagttcgtgtggttttttacgtggcgt

SEQ ID NO: 7360 - DNA, 2868 bp, Artificial Sequence
  Description of Artificial Sequence: Synthetic polynucleotide
cgcgtttcgtattttagaggggagggagaaagggagtttaggcgcggggggtggggttgggggagtacgagagagtttttttttaaatacgtattttttcgttttttcgacgttgtagcggttttattatagacgtatttattgttttttttttaaaagtcgttttaaaaataacgtaggaattaaagcgagtttttcggttcgaaatgtacgtgtaattttttatatagtttgggttgcggtcggcggtagggtcgttgtcgtttattattatataaataggtatcggggcggcgtaggcgggggttgttttttttgcgttttcgtcgttttcgggcggataagtttcgtttttttcgttataggaattgtttagataataataattagtagatatttcgttgttgtacgagagggagagaaagtatagtatcgtttcgagataattagaaatataattaatttataacgtttttttaaattggaaaaggcgattgtgtaattattattatatgtttaggtttcgatttttcgggttgtttttttttttttttaatttttacgttaggtagaggggtgtgtgttttttttggtatagtagtataaattaataaatattgtagttgcggtgtaagtagtagtttcgcgcgttcgtcggttcgttcgtttttttttttattttttttttattcgagatttagagcgttatttaagttttattattcggttttagcgtttcgtgcgttcggtttaggtaataatttttttaaaaatcgaaagagaaaagcgcgaggcgtacgtatatcggtttatttcggcgtagagatttcgtttgtttcgggagggggatttgtttgtggtgtttttcggtttttaagtttaggtaataatttcgtaaatatattcgtcgtttagttcgtttttattcgcgcggttttcggcggcgttaagtgggtattttttttgttttgtttttcgcgtcgtttcgtcgcgtttcgttaaacgtggattttattcgcggggttcgtcgcggagtttttaggtcggggttttgggtcgggtagcgggaggcgttagggaggaggggcgtttagggattcgcgttttcgcgtttttaattttcgttacgcgagcgcgttcggttcgcgggttttaattttatcgtcgtcggtcgaattttgttcgttcgcggcgcgtatagtcggcgttcgcgtatacgcgcgtataaattttacgtaattcgcggtcgtttcgtttcgtcgtcgtcgtagttcgtttgtcgcgcgtttatagttcggttcgagtcgcggggttcgagcgatagcgacggcgtcggtcggggtcgcggcgcgcggaagttattttgtacggttagcgtcgggtataagtttgtttcgcggttttcgggggtttgggcgttgagggagaatcgcgttgagggggttaggaggagggggagagggaggcgtcgaagggtataagagtggggaaaagtgcggaaagaagtaatagtcgttttattcgggattagaaaagtggttagtgcgtttcggtcgttcgttttgcgtcggggatgcggcggcgtcggcgtcggttaacggtttagggaggcggtaggggcggcgggagtcgttaggcggagagagattaggtaagagatataacggtttagggagagcgagcggtcgcggcgcggtttcggtagcggcggtagcggaggggggtagagagtattattttttatttttttattttattttgtcgtttttgtttcggttgtttttagttcggttcgttttttttattttcgggggcgtttcggttgtttagttttttttgatttcgtcgtttttcggtttttttcgttatttatcgttattgcgtcgcgggttcgtttgttttttgcgtttatatttggggttattcgttatgattttttcgtttgtgtttaaatgttcgagttattttttttttttttttttttttttttttttattttttcgtttttattttttttttttttttatcgtatttggtttacgatattttcggttttacgatattattttttttatatttagaggttttcgttttacggtcggaattttgttgttagggatcgggcggtttgcggtaatcgtgggtattgttgaatttgaattgaggggcgagggaaaagttttttttaggtgtggtggggagagggaggcggatgtcgggaaatcgtagggacgcggttagaaaggcgacgggttgtcggagttggaaaggtaaagttggaggttcggcggcgttttgttttcgcgttggttatattcgtcgcggttgttcggggtagggagggatttggttgattttttttgtattttgtgttttcggagttgttttttcgagcgtttagaggttttcgtttgtttgttttttggaggtagggttattattagttttacgtttcgcgtgttcgtttttcgtatttcggggttaaggaaagggatcgcggtttggatttttcggggagtttttttgatgaggggaagggtaggtttggggacggcgaggatacgcggcgatcggagagaggttatttgattcgcgtagttcggatttttttttttttttttttagggacgtttggtttttttttaagcgaatcgggatgggaagtgattttaatgagattgaattttagttggattgaaagagaggttagaagtttcgtttgttagtagtttttttagtagagcggaatgagtaatatttatacggtgtttgttttatttttttattcgtattcggtttttatttgttgttatttcggttttttatattcggttcgcgtttttcgttttttttttcgcgtagaatcgt

SEQ ID NO: 7361 - DNA, 2678 bp, Artificial Sequence
  Description of Artificial Sequence: Synthetic polynucleotide
cgagaggcgatggcgtttgttttggttagatttaagggtaagcgaggttgcgcgcggttttcgtagggtcggattttcgagttttagggcgtttttttattcgggtgtagatttttcgcggattttttcgttttttcgggttttattagttgcgtaggaatggagttggttagagttttgggagcggggagggaggcgtcgttattagagggcgtcggagttttagcgttgcggtcggtgagcggttaggtttttcggtttagtttagtaaaggtttggggacgttcgacggttgttttttttattggattttattgtttttagttttttaagagtagggttaagttagtggggttttcggttttaagtttagtgtttagggtgggtgggtgggtgggtgggtgggtggatggatggatggatggatggatggagtgtcggtttatagttatttaacggttaaagtggttttggaaaaaaaatgtatagaagatatttatttttattagcggagtttcggagttttcgtagttttttgttgatcgttttcgtttaatgtagtcgttgatcgtttatttttcgacggttaggattttttagggatagggacgtgtttttagggtaggtttttggatggacgcggcgattgattttatttcgttggacgttgtgttgggaaggatatagagaggtggttggggtagtttgcggttataaagcgaggtttaaaggggcgttttttttatttttacgttttttgggtgtcgatttgtatttttttttcgttatcggattggggttatttgggatgtttcgggggtattcggagggttaagtatcgtcgagggacggtttcgtgggaagagttttttggatttagaaggtagacgttagtagtattgttttaggagtcggaggtcggggtgggggagtttttagttttttgggtcgtacggagttttttttgggtaaggtagtaagtatttaggtttaaaggatttatttatagttattatttattgagtattgtttgtttgttagatacgatgtagagaatttcgcggcgtggggcgggttttattgaatttttcgttttatttcgcggggtgggtttgtgattagtttattttattattgagaggtcggaagtataaaggttatattcgtttttattgagagtcgtcggcgttttttgttttgtttgtataggcgaggaaattgaggttcggttggtggcgtcgtgggtttggagttcgagttacgttgattgtaaagacgggttttattttcgtagatcgagttttgtcggcggttgcgtcgtaagtcgggtaggtggcgagtttgagtttttacgtatagaaagtaggattttttcggttgttttgggtcgttatcgttagtaggtttttcgttcgggattaatttgtttgttttttattggtttttatttagttttcgttatcgaaaggtttcgtttcgtagttttttacgcgcgttttattttacgtttaaggtttttagtttttttagtggggttttgttatagggataataagcggttttttagtcggcgtcgtttaggttgcggattttattgtagatcgggttagcggtgcggggtttagcggagtttgagaaggttaaaggtcggagcgtattgcgtttcgggagtatagagggagcggaggaggggcgaaggggatgggtggggggtgtcgtcgagggagtcgcgcgttagagatttcggttacggttagtattcggtttcgggttcgttttttatcgcgcgtttcgtttcgtttcgtttggtttttttttttaaagcgttcggcgcgcgttttttatcgtcgtatttttatttttcgttagtcgtattgttcgttcggcgttcggttttcgattcgcgttcgttcgttcgttcgttcgttcgttcgtgttatgaacgttaaggtcgtggtcgtgttggttttcgtgttgatcgcgttttgttttagcgacggtaagtgcgttcggcggggaggttttggcgaggttttgggtttcggttttcgttcggcgtagagtcgcggtttttttgtttgcgttcgtagtttgcgtcgttcgatatagtgggggtggaggtagttcgtttagttgggcgttttggtgcggtgtcgcgtttaaagttttatttttgcgtcgagggtttgtgatttgtagagagcgatcgtttgattttaagttggttgtagagcgaggttagtcgggataattgggtaggaacgttttaagagagcgttcgggattggcgcgggaaggcgcgagggtggggagtcgcggattttagatttttgtttgtttattttttatttattgttttttcgttgcgggttcggtttttataggcgaatgggtttcgaggttttgttgcgtatagtgttggaggtcgggcggtgtatggcgagagcgcgttttgtaaagttcgttttatgtcgcgatttgaggttgtgaggttcgatgtagtcgcgtagttttcgttttttgcgaagtcgattttttttttatattttcgcggggtttttggttaggcgcgggcgggttgcgcggcgtagttgtcgggtttgtgttattcgttaggtcgcgtttttgtatagtttcgcggttcgtagcgacgcggatttgggcgcgcgtttagtcgt

SEQ ID NO: 7362 - DNA, 2756 bp, Artificial Sequence
  Description of Artificial Sequence: Synthetic polynucleotide
cgttttcgtacgtattaaaagggttaggcgggttgcgaggttcgtcgttttggttagatataggacgtttacgtaggcgtatcgtatcgtatagattttgcggtggtttattaagtagtatatcgcgttcggaacgggagcgcgttaggaggtttacgttgcggagtagtagtaagacgggagtatagagtaggttggttagttttatgttaaggttgagttgtttaaagtttagcgagtgtataatgtggtttgttattatgggttcgagcgcgtaggttatcgaataggagatgtcggcgatggcgtagacgttgttatagattgagatatggcgtacgtttattaggaaggcgagcgtgggtagtagtgttgtgtcgattagggttatgttaaaatagaggtcgtatagtgagattattagcggcgcgaaggagcggtaggcgggtacgatgtacgagttggcgtcgattatagttagtttaagcgcgtcgtatagttattgtaggtgtgggtagcgcgtcgttaggcgtacggtgaggtagacgtttagtatatgaggtacgaaggtcggtagttaggttatgtttattttttattcggaagtcgttatcgtatgttttatttacgtggtaatggtgggttcgaggaaggcgaggggaatgttataggtggtgagcgcgtcggttattacggtaatgtaggggtttagtatgaggcggtggatgggagtgtttattggtaggttggttcgagttcgtgtagtcgtcgagaagggtttggttattgttagtagtaatagcgcgttaaagagcgatacggtagttagtattaagaagggtacgcgtttgtcggcgaatttatagaggatgttttcgaagggcggggttattaggttttcgaagttaatgaaggttagcgttacgtttagtgtacgattgcgtttcggttttttcgggtatttatcggcgattatggttatgttagacgtgtcggcgaaggttgagtttaggttttgtaggttgcgcgtcgcgaatagcgtggcgtagttttcggcgaaggcgaataggattgtagaggcgaatatgacgtttaggtcgattagtagcggtacgtcgtagtttatgcggtcgatgaagggttcgtttaaggggtttattagtagttgtaggatagttttggaagtaaatagtatttcgatttttacgttttcgtttttcgtagggtagcggggtcgaagggttgagttcgttggttacgtagttgtcggggacgtcgaggtgttggtcgtgtaggcgttggtattggtcggagtgggtagcggtagggtgggtttttatatttcgggagttcgggtggggttttcgtcgttttcgcgtatgtgggcgatgtagtcgggtattatgggtacgatgattatgtatagtatgttgtttagtaatagcgttacgtatacgataataagtattaggcgtttttgtcgtcggggtttttgtagcgtcgcgtttatagttttcgatagtttggtggtcgtcgttcgggtttggttcgtaggtttcgcggattttatgtttttatttcgatgttttttcgaggacgttttcgttagggtcgagcgttggcgtttcgtagtgtagaggcgagggtacgggatttcggggaggttgttttggtcgagtagatttttttgtgttttaggtggtcgcggagtttatggtttagcgtttcgggaaaggaaaggatttcgttcggcgaggcgttgtagttatttttagtcgatttcgggattcgcggttgttgggtttaggggcggtcgggaagtcgggcgcgtcgaggggtcggggtcggagattgggcgtatttcgttcggggcgcgtttagagtagttttcgtcgcgttaagaggtcgttcgcgttggtcgagggatatgttgttgtcgttcgttcgtttgttcgttcgttagtttcgtcgttgcgttttttttttttcgcgtcggtttttgtttttttcgtcgtttttttttttttttttttttttattcggggttgtgacgcggcgagttttagttttcgagtggtgttcgggttatttacgtcgtttatgttaatgcgacgtcggcggggcgggggtcgggggcggggcgtggtcgggtaggggttcgttttttagatgttttagggttggaggtttaggaagggttttcggtgtggaagttttgaattagtttttgggatgggcgtttcgcgtcggtagttggttttttgtttttcgttttttgtttgtttttcgttcgcggttttaggattcgcggggttagcgttcgtttttttttttttggggaagggggcgcggtagtcggtttttcgaggttttttgggagaggcgggagttagaggtttgcgattttcgttttagtttggatttcggcgtatagcgagtaggaagttttcgaggtgagtcgtcgttgcgtttatttgttttcgtagttggattgtggagtcgcgttcggaggagcgttggatacggatatttttaatttttttttcgatttcgttttttggttttttgtatatatattttcgttaggaggggaggggaaggtttagtaattgtttggtttggttttgatttatcggttttttcgtagaatttttcggtcgcgaatcgcggtcgggagtttgtggggattgagggtagaagttgtcgcgttttagtcggggtcgcgaatattagtttggtcgttgtcgttttttcgt

SEQ ID NO: 7363 - DNA, 990 bp, Artificial Sequence; identical to SEQ ID NO: 7133
  Description of Artificial Sequence: Synthetic polynucleotide

SEQ ID NO: 7364 - DNA, 829 bp, Artificial Sequence
  Description of Artificial Sequence: Synthetic polynucleotide
cgtagcgatttcgcgtaggtgagggtattggggagttcgtggtttttttcgttcgtcggtttttttttattagtcgttagttagggttttcggcgtcggggaagttttttatagggttttaggttatttaagcgcggttaaacgtcggcggttcggtttcgtttatttgacgtagtcgcgcgttcgtttcgatttattaggcgcgtagggttcgttttcgaaattcgcgcgggttttcgtagtcggtcgcgcggtttttagtcgcgaagagagcgtcgcgtacggtggcgtcgttatagtcgtgggtcgtcgcgtttaggtagcgttttagttgttcgtaaagtttttgtagcgtcgtttcgtcggggtttacgcgcgtcggttagagtagcgtttatcgttcgagttttagattttaggtttcgtcgtcgtttacgtttagtttcggcggtagtcgtgggaagtagtgttttagaggcggttatagcgtcgttggttgtcggcgcgcgtcgcggaatttcgcggtcgagagtcggtcggtttagttgggcggggatacggcggtttcgggtttgtgttttagttttagtcgggttttttcgcgtcgttgcggttgttgcgcggtgcggtcgtgataagttatagtaaatttgtttttcgcgtcgttttaagttattaggaagcgtaatcggtgtttttggggatcggcgaagaggttttttcggagcggcgtttagttttttaggttgtcgggttgttcgttttttatggtcgtcggcggtagcggttttagggtttggcgggcgcgggtttgatttcgtcgtatcgt

SEQ ID NO: 7365 - DNA, 4119 bp, Artificial Sequence
  Description of Artificial Sequence: Synthetic polynucleotide
cgggaaaggtggtagtcgaagatttcgcggttttttttcgtttaggtatttcgtttcgtttttagtttcggttttgtttttcgcgttttgttggtcgggtattcgggcgtttaggagttttttttcggggtggcgcgcggcgatcgtcggcgggtttggtagtagcgttagtcgcggggcggttcgggtaattcgttcgtttgtcggttcgtttacgtgcgtagagaggagcgaagcgcgagtagtcgtttcgttcgcgtttgttgtcggtgggtgttttatttaaggggtcggcgggggtcgtaattcgagttttatcgtagggattcgtatttgtataattcggttttttttcgttttttcggatttagggttcgagatgcgagtcggattttttttcgaggcgtcgttttgtttatggttagcgcgggggtcgcgggattcgttagagcgtaggcggagtgggttggcgtacgtggtaagaacgtagttatttttttttgtttttttttttttttttttttttttgagaaataggattttgtatatttttgttggggtggggtatttattagggtgttaattttgttgcgatttttttttatgttttttttatttttaattggaaaaaagcgtatagcgcgagcgagaaatttttttaaatgtgttttgggtgatttaagttagagagatggtcggtcgttggatatcggttgttttggagggagggggagaagtagcgttttagtggaagagtagagggagagatcgttttcggtagttttagggttttgatcgcggtgcgttgggttcggcgagagttggcgtacggttgtagcggtcgaggtaggtgagcggttgaagattcgtttgtagcgtcgcgttttttttacggcgtggcgtcgtggttttcgttcgtttcggtttatattaagttagggtcgtttcgggttcggggtgaaaaagggataggataggtttgcgaggttgattttgcgcgttatttttggttttcgcggttttggagcgggaaagggttttggggtagttcgtaatttgtataaacgattatgaatgagttatgtaggcggcggtgcgttggatttgggtattcgggattagttttttgtggggtttcggataggttcggttatttattgcgggttggggcgtattgggaggtagaagttttgcgtttagtaagttagaatttgttgttatttggattttggaaaagtttttaaaaattgttttgggaacgaaatagaagggtttttatcggggtttcgtaaagtaaaacgagtgggttgggggatggggatggcgttttgaaagtgattagagatgttttcggtcgttattgaggatcgcgttgggtttatcgaggtgttttttggggagggagagaaaatatttattttagtacgtgtattttggttcgggtgcgggtagggcgcggttttggattttgggttatgggggttagggggattttgtggttgtagggatcggtagtgaaggttaggttagtgtttttatagaattttttgtttagcgagttcggagttcgttttgtcgtcgggatattgttggtaacgacggcgcgcggacgtagttaatagggaggtgtgtagtgtaaggtgtgtgagcgggtgtgtgaagagggtagcgggggcgggagtgtgtagcggaagtggagcgagtgtgagtgtgtgtgtatgtgtgtttggaggggtagggtgagtgtttaagtttttatttggacgtttttacgtagtcgatcgtttagacgcgtcgggaagggcgttcgtttcgcgtagtagttgaaggggggcggggagcgcgcgggtagaggaaggagggtgttttcggttgaggatttttttcgaagttttttatagtaattttgttttttttagggtttatttttttagttttaaggtgtttaaaatatttaaataaataaataatttaaatttgtttcgttttcgtttttgtataaatagaatagattttttaaaaaagtaatacgtatttatttttattattagttatttttttttattaagtaatttagaaaaaagtagttagttttcgtgaatgtatgtagtttttttttttttcgttgtttttttttgtttgcggttttgagttgttaagaaagtgagtaggggtttgattgtagtgtttcggtttcgttcggttttttttcgaagtttaatttttcggaatggtttttaaataagggttagggaggcggagtcgtcggtatcggattttcgttttttttggaaagttttagagaatcggaattttttttcgtttcgggaggttgagtcgtagtttggagtagttcgtttttttgttgtggttgtgattgggtttatggcgcgttttttttttcgcgatttttgcgtttcggatttaggttgtagttagggtcgcgcgttcgggattttagcgattttcgtcgtttgcgagttggaagtcgcgagttcggcggagttcgcgcggtcgagttcgtgtatgtaaattagttatgtgacggtaaaagtcgtttggtttagttttgttttttagtttatatatgggtagcgacgttacgggtattgaagatttgtttataaatatttagagtaatatttttcgtttaattgagcgaggagtaattgattaatagttcggcgaggggatttattgattgttataataatattatattagtaatttttggttttttagtagtcggaatatagataggagagagttagtggtaaatagatattttttttattttttaaaaaatagtaatttgtttgttatttttatttttgttgattttttttttttggtgtgtgtggtggttgtttttaagtgtggagggtaaaaggagatattattttaggtttagtttaatttttttttaaaacggtttttttgatattttaggtagcgagggagttgggtttttaggttgtgcgaggagtaaatgatgatcgttaaggtcgtagataaaattttagtaatttttagtggttttgtgtattagttgtttgataatatttattcggtggaggatttcgtcgttacgtcggtgattattttttttaatgtcgaattgggaggtttttttgattagatgaacggagtggtcggaggtaagtcgcgtgttttcgtaggttcggatttgcgcggttcggaggtggtggatggggtgtagtgggtgtgcgggaatcgtaggagaggattggggttttaggtggacggtgttgattgtattggttttgaagattggaagtgggtgtaggaggaatttgcgatagttgagattagggcgcgcgggtagatgcgttaggtcgttagtaaatcggcgtgcgtgcgtttcggcgcgtttagtttcgggcgagcgtagggatgggggtggaagaggcgttttttcgggtttcgaggtttgcgtaggttttttggtcggtagtatttcgattttttttttttcggggtaggggtaaagtgacggtaaagttcggggttttcggggagagttgcgcgtttggagagtcgagcggcggagaagcgttaggggaaagcgtcggtagtttttttttgggtagagtcgatttcgggaaaatttcggagcgttttttttttgcggtttggaggcgcgtttttatttgttcgtcgttcgcgaagttgagggggttagtaaggcgggggtttcggtcggcggaggtagcgagtgggtggtggaggagggcgcgtaacggcgggaagtagttttcggattgtcgagggaggttcgcgggggtatcggcgacgtcggtttttttggcgatgttgtggaaagtcgtttttcgcggttttcgcgtttttttcgaggtcgggttattggttttgggttgaggcggggacgcgcggttgtcgggaaaggcggagaagattgggagggtacggaaatttacggatttttttttttatattttttattcgttttagtagttttcggttgaagcgtagcgggagagggagggagaaaaaggtataaggcgtcggggatggggagtagtcgggaaattatttatttttttttcgggtttttttttcggtttggtattattacgg

SEQ ID NO: 7366 - DNA, 1575 bp, Artificial Sequence
  Description of Artificial Sequence: Synthetic polynucleotide
cggtttgggtttttgggcgcgtttgtcgttgcgcgggcgcggggcggttgttatattattttggtcgggtttcgaaagggaggagtggagtttgttcgttttcgcgagttttcgcgcgtttagtttttttttatttgttcggcgtgtttagggcgtttttagcgttggaagtcgggggcgtttgttcgaggcgggagtcgttgggttatgtttttgtttattaggtttttcgaatttttggtagggtagcgtttgttcgtgttttcgatttttttcgtaggtaattcgcgcgaatttggggttcgtagagagcgagcgttcgcggatatcggttgaatagtttggaggttgcgcgagggggcgtcgcggggagggataaaagttagtaataaagagtatagatttcgtttagtagttgattgattcgttttaaaatagtcgtttttatttgttgtttttcgcgtttcgtttttaggcgtagtattcgggtttgtagttcggtcgttcgaaagtgggcgagtaggttgagtgttagcgagtagagggttagcgttagtagttcgtacgattttggattcggtagtcgtgcgtcgcgtttcgttcgcgtcgttattagagttatcgtttcgggcgcgtttaattttttagggtcgcgggtatcggtggttgtcgttttgtgggtgcgtttcgttattattttttcgcgttttgagaattaataaataaataaatagaataaataaaggcgatagtcgttgttaaaaggttttatttaaattgcggggtagggggaaagggtttgtatcgttggaaaacgttttttttcgttgttttcggtaaagaggacggaaaaattagtagtaggagaggaagtgtcgaaaaagtataattagcggtaattggggtatatttaggtgagaaaaaagttatttcgaagaacgttttaagtttaggaaagttaggggaatttgatcggtttttttttttttcgtttagtttttttttttaagtgtttgtagagtagttggtgtcgcgttgttagtttttttgggcgtttcgtgtttttcgggttagttagttttagttttcgggcgaaggggcgtatacggagggttttatgggtagaggtgggtcgtggcggttggcgaggagcgtaggggtcgatttcggcgtttttgtaatttgatatattttttgcggcggtacggatcggatgagtaattcgtgttattttttaaattaatttttttttttttttttttttttttttttttttttcgttattttttttttatttttcgcggggtcgacggtttggatttgtttatttatgtaaattcgtttagggtggggggcgtggtgagtaggttcggcggttttagttcgtcggttcgggagtttttttgtcgcgtttttcgttttttttgaagtgatatttggggttatttataggtaggaagggggtgtggagtggagttggcgttgtattttttttttttttttcggatttatatcgagggttcgtttggttttttacggaggcggtgaggcgggtattattttttatggacgcgt

SEQ ID NO: 7367 - DNA, 2401 bp, Artificial Sequence; identical to SEQ ID NO: 7143
  Description of Artificial Sequence: Synthetic polynucleotide

SEQ ID NO: 7368 - DNA, 1579 bp, Artificial Sequence
  Description of Artificial Sequence: Synthetic polynucleotide
cggttcggtgtacgtcggtgttattttcgcggttaagtttggggttgatattatgtagtatacggcgttatttataatgtatcggtttttttttgttatatataggtacgtatatttattttcgcgttcggagggagtttagggttcggttcgtgggcgtttaggcgtcgattttttcgatttcgtatttatttagaagttgtatcggtcgcgatttcgttttggcgttttcgggggtttggggttcggtcggcggcggtcgcggcgagcgatttcgggtaggatttagttagcgtcgaataaaggttgcgcgtaggtagcgggcgtcgtttgtattttcgtttcgcgtttcggcggcggcggcggcgcgggggttcgggcgggttcggcgttcgttcgtttcgcgttgttcgtttcgagggcgtttcggttttcgcgttttcgttcgttgttgttcgttatcgtcgtcgtcgttcggttatcgtatcgtatatattaattatttatcgttcgtttttagtttttcgggcgaagttaattataggcggaggtttcgttaatggggtcgtcgtcgtcgtcgtcgaggaggtagttagtcgcgcgttcgggcgtaagcgatagttttttagggacggggatgggtcgggggcgcgcggggggcgggggcgtacggggcgcgtcggagaaattttttacggttcgcgttttgcgtcgcgttcgcggattttgcgggcgtgattatttattttgcgtgtgttcgcgtggggttgggggtttcgggggaggttaggttagtcgcggtggggggaggggagggaggaggaggaggagcgcgggaggaagatgaaaggcgagtagatttgttttggcgtttttagggagtttcggttcgcgcgcgtttttttcgtttcgcgagtttcgtcgttcgtatttcgttttttagttcgtcgttcgtatttattcgcgcgcgtagatcgttagtttagttatttcgttgcgagggagcgcgagcgagtatgaatcggaggtagtttatattttaaatttgtacgtaggggtggtgttggtgtacgtcgttgtcgagcgaacgtacgattcgacgagtagtattttagttttcgggcgggggcggcgacgaggtttttttttttttttcgtttaggtaattaattggaagtaatatttgtgcgagtggggttttcggagcgttgtcgttcgaggaggtcgtcgggaaggcgttggcggtggatgatttcgggtgtttttcgttttttagcgaatttttttaagtgggtatgttaatgagggtttacggcggggagggggtggaggagggagttgaattggagggggtttcggtcggggggaggggaggggaggggaggggagggcggggttaggtatttagattaaatttcggtttaaaggattttcggaacgggttacggggtggagaaggtaggcggttcggtattttatttttttgattttgggtgttttggtattttcgggatttttcgagcgaggggtttaggatagggtgaatacgcgtacgtacgttttcgtttttcgatttcgg

SEQ ID NO: 7369 - DNA, 919 bp, Artificial Sequence
  Description of Artificial Sequence: Synthetic polynucleotide
cggtttatttatttcgcgcgtttttatatacgttttttttcgattttttacgagtatacgttcgtttcgcgtgttcgtttttttttgtttttcgtttcgattttacgtttttttttttttttggatttcgttttttggagcgcgttcgtttttttttgttacgtttttttttttttatttttttttttttttgttcgttgttttttcgtgcgcgtttttttttttgtatatcgttttatttttgtcgtaggttcgatttttgaacgtttttttttttttggtttttttttttggcgcgcgttttttttcgtacgattttttttttttgtcgggcgtttcgcgtttgtacgtttttttttttttgtcgcgttttttttattttgcggcgggtttttatttttgtacgttttttttattttgtcgcgttttttttattttgtcgcgttttttttattttgtcgtttgtttttatttttgtacgtttttttttttttgttgcgcgtttttttttcgttgtttatcgcgtgttttttgtttatttattcgcgcgtttttttcgttttgcggcgtttatattggtttttgaggcgcgagttttcgttgtttggtaacgggacgtcgtttttgggtggcgagtaggcgcgtgtgtaggggtgagcgtatcggaaaggttcgaattgtttttgggatttgtttttttagtttcgttgggttcggcgggtagaggcggttttgatcgttgggttttgggcgtcgagtaggatttatttgaggcggagagaggtcgtttcgcgtttggggttttcgaaagcggttagttgtttttttgttttttttgagcggggagcgttgcgttttttgcgggttgcgggagatttttttagattttcgggtgggaaaattatattgagcgtttcgg

SEQ ID NO: 7370 - DNA, 944 bp, Artificial Sequence
  Description of Artificial Sequence: Synthetic polynucleotide
cgttgggcgaggttagggttgcggtaggggagtcgagtcgggagaggggcgtaagatttggcgttgggcgggacgttcgggtagggtgcgggaggggttgagggtcgtttttattgttttttcgttttggagttggggttaggcggtcggagattggttggggcgtacggcgaggttcgggttggagtttcgaggtgggaggcgttaggattagtcggggcgttcgtagcgtaggttgttatttatttgggcgatttttgcggcggcggcggcggcggttgggtagagttagggtcgggggcgtacgtcggaatatttgggtcgtcgggtatcgagcgtcggggggttgcgcggcgcgtatttggagagggcgtagttatgcgggcggcggcggcgggggggggcgtgcggacggtcgcgttggcgttgttgttgggggcgttgtattgggcgtcggcgcgttgcgaggagtacgattattatggttggtaggtcgagtcgttgtacggtcgtttttattttaagtcgtcgtagtgttttgatatttttgtcgatttgtcgttttgttatacggtgggttataagcgtatgcggttgtttaatttgttggagtacgagagtttggtcgaagtgaagtagtaggcgagtagttggttgtcgttgttggttaagcgttgttattcggatacgtaggtttttttgtgttcgttttttgcgttcgtttgtttcgatcggtttatttattcgtgtcgttcgttgtgcgaggtcgtgcgcgtcggttgcgcgtcgtttatggaggtttacggttttttttggtttgagatgttgtattgttataagttttttttggataacgatttttgtatcgtcgtgtagttcgggtatttgttcgttatcgcgtttttaggtagcgtcgtcgtcgtcgttttcgcgcgtttcgacgg

SEQ ID NO: 7371 - DNA, 1096 bp, Artificial Sequence
  Description of Artificial Sequence: Synthetic polynucleotide
cgagtattaggaaagcgaagttatataacgcggttttttttagtttcggcgcggtagtttggaggggatgttttttttgtaaagcgagttttttaattttttcgggttttggcggagtttcgggatcgcgtaggggtaagtggagtgtcggggaaggggcgttggggttggggtgtcggggtaggggtgttttgttcgtacgtatttacgatagtgagtagtatgttgtttagtagtagcgttaggaatacgatgaataggatgagttttcgcgagcggcggtttttttgtagttagcggattagcgttagttcgtttagggttatggtttcggggtttcgttgcgggcgcggtgcgcggtgaggatttaaggcggtcgtggattttttattttttcgttttttaggtcgcggaagggcgggttagggagtcgcgcgtatcggtattcggggatattttcgggcgttttagtttcggtttatttgtttcgagcgcgtttttacgagagttcgcgttttttggaaagagcgttcgcgagcgtcgtcggggatttaatttggagatttaatttagaatttttaggacgttgttttgattttcgtcgtttttaattgtgttattttttaaattgtacgttcggtttcgtgtattttgcgttttgcgttttgcgtttcggttgtttcggggttttcgtagtttcgttcgcgtagttttgggggtttttttgtttttttgtttttttcgggttcgttttttttcggtatcgcgttttgcgagtagggaatcggggtcgtgttatttcggggtcgtttgcgatgtttgttcgggtttttcgtgttcgcgttaacgttcgtatcgtagtgggtttcgttagttcgggcggtttcgggtcgtagttttcgttttagcgtttcgtcgtcgtcgtttagtttatttcgttcggttttgacgttacggtcggagggagcgggggcggggggttggggcgtttcggttttcgttcgttcgcgtcgtcgttgcgtaggaggggttgtcgtttttttgttttcgtttcggtcgcggtcgcgtttttttttcggatttagcgcgtggtcga

SEQ ID NO: 7372 - DNA, 4048 bp, Artificial Sequence
  Description of Artificial Sequence: Synthetic polynucleotide
cgtacgtttagatgggtttttcgcgttcgggtcgtagttatttgagttttcgtgaggttgaggttgtgtgttagttgttttttttcggcgtttattacgtagtgattttttttaaaggcgtgttttagttttagaagttgggacggggagaaggcggttcggattcgtttgggttttcgggttagcgcgttgtgtaaaaggaaattttcggggttagtgtcgttttttgcggggagtatagtagaaattttattagggggggttgttttgatcggagtcgcgtatttttttcgagtcgggttggttcggtatcgtgtttagggttttcgtatagtcgcgtcgttcgatttgcgggggtcggtggtttttttaagggtttacgaagggaacgtttgtttagttgttcggttcggaacgtcgggtttttatcggtgcggtatttaattagtcgttgtcgtagaggagttagtttttaggtttttgatttcggtcggtttcgtagtcgttttggcgtcgcgggtttcgttattttttcgtcgggcgttggaggtaggggagggagtcgtagagtttggttaggggattggcgtttataattcgaagaaattatttttttttttttttaatttttcggggaattttgatttacggtggaaaggcggcgggttgttttttagagtttttatggagatttatttttaaattatttgttttattgttttttcggaaaagtatagaggcggggcgagtcgttgaagttcgatcgggatagaaatttggtcggcgggtgtgtttggttatagtcgttgttgtttttcgcgaattgggtttcggggttttcggttttcgagaattagaagagaaacgcgagcgaagggatcgaaattcggggggttatcgatttgtagatatcgttaggatagtttgtaacgtaggaagattttagcggtttcgggtttggtgaggggattataagtatgattgatagcgaatgaggaagggtagttttaaattttttaagtaaagttttagagttttgggtttatttattagtataggaaatcgatttatcgaaaatttaaataaagaaaaataagtcgatagtttaggtaggatgtaggtaaatttagttcgggattaagggtaaaaggttttttgggtttttttttttttggtttgattttttaaaatatggggaggggggtgatatttattcgattttaggtttcggtaggaacgtaatgggttaatgaatggataagtcgcggagtattgatcggttgtcgtcggaggtaggttttttattgattttaattcgtaaattaattatttttttttttgaagttttaatttttttttttttatttcgtatttagagaaaaataaataaataaaaaatatcgtaagaaatgaaaatatacgaatagatatttttttttaagatagttttttgattaggttttttttttttttttttaaagaaagaaagaaaaataaaaattagatcgaatttgttttttcgttgtggttgttcggcgttttaattaagtaggtcgcggcgagagcgttaagttttggagtttttttttcgtacgggttttcgtttttttttaggttttcgaaaagtaggaaagaaaaaataaattttatatttttttttcggggcgcgaggattttttcgtttttagaagagggtggaagattaagaagtcgcgggtttggattgaaggggcgtaaagtgggtggtgaatagggtcgaacgtagtcgaaagtaagtttggcggtcgagttttgttcgcgtttttcggagttaggacggttgggggtattgtcgagggtattaggagtttggggatttcgcgggttttgggtttcgcggcgtcgggtacgtatagtttagtttgttttgattcgagcgtattgggggataattttttcgttcgtatttttttttaaagggttaagcggttcgtaggttattattttaaattagtcgtagtttcggagattggggatcgatattacgttcggtttcgcgtcgtttagttttttaatagggcgcgttggttcgcgagtcggaggaattttcgtttaggttttgttaagcgtttattcggagtaggtcgggggtagtgaaggatgcggcgggagcggcgcgttgtagtttcgcgacgtggtacgtattttggaagcgatgatttagatatcggtagcggtggatgagttaggggtagaaggtggacggatttcgttgttgcgaggcgaatagggggtgtggcgagtgcgaggagggtagggggtgggcggttagggcgtgcggcggcggtatcgggtgtattggtacggcggggttgggcgggtgcgagatcgtttcggcgaatattaagttcgggttggagtagacgtttttatcggcggcggcggcggcggtcgagtggaagtcgttgaggaacggatttatggggttggagttagcgtagttgagtgtcgcgggacggatggggttttcggagcgcgaggcgggtaggggattgtttttggttattagcgattcgatggtgaagtagcgtttgggcgtcggttggaatatgttgcgtcgaggagcgggcgttttgggtttttagtttttggcgatcgtcgtacgttgttttcgtcgttcgttgttcgcggcgaggacggacgagaattggggattcgtttgtttggggtgggggtgggggtggggggaaggaaaggaagaaagaaaggaaaggaaaggaaaaaggaaaggaggggggagggagagggagaggtaaagtcgaggatttcgagaattttgtattaaacgcgtttaatttgaagagaggggggaaaatttttttagaagaatttgtaggcgtggattggggtaatttttttttttttttttttttttttttttttttttttttttttttttttttttggcgagatggcgtggggggatcggagttagaggtagggaggagaaggggggaaagttttcgggggaggtaaaaaaaaaaaaaagtttttttttttttgtaaaaggcgggtagggcgttttaagtttaaggataatttatggaagtgttcgtttttttataagttgtgtaaacgatttgttagtttatgagtttaattagtgcggggattatataaatagtttttttcgaagtttggtaaatggtttgatgattggtcgttattattcgttttgaggtggaaggggggagattttttaaagtgcgttagagggaggtgagcgtttgggaattcggaggtttggattcgggtcgagagtggaacggagtcggcgtcgtcgtttcggttgagttttttgtcgtttatcgggcggtcgggttttttcgcgttttcgtttttcgtttttagtttattcgtttttgcggcgttcgttgcggtttttttttttttttcgtttttttttttttttttagttttttttttttttttttttttttttttttttttttttttttttttttttttttttttttttttatttatttttttttagttatcgtttttttttttattagtattatttttttcggggtatttcggtttttgtagagtttttggtcggcgtcgttttcgttgcggttttttgaatttcgagtttgtttcgtttaagttggtaggatagaaggatagatagatttttttagtttagcgtttcgtcgttgttgttttacgcggtttcgcgtcgggagaattgggatcgttttaagagtatcgcgagggtaagcgggtaggggttggttttcgggttaaaggcgtcgttcggttatattaatttttatatttagtaaaatttttagcggttttttaggttaggagggattttggagtgaggggtacggggtttttttattttattaattacgtttagtttcgaggttttagggtcggtgcgttcgcgatttttgattcggttcgttcgtttgcgagttgagatcgggagttgtcgatttcgtcggagtagtgggtttttaattttttttttttttcgttttacggtttttagcgt

SEQ ID NO: 7373 - DNA, 3292 bp, Artificial Sequence
  Description of Artificial Sequence: Synthetic polynucleotide
cgcgtttaagttttagtttttgaaggtcgttggatttttcggcgttttcggttcggtttagtttttttcggggttcggataaggaggtcgggcgtttttttttttatttttttggggttttagatcggtcgtagtagcggtacggaagagattatcgggtgcgagtagtagacggggtgcgggaaggtgagtagcggttggttgattggtatcggggttttcgcggttgtagtcgtcgcgttttcggtcgtcgagttttcgtggtagaggatgggtattcgtacgatgcgttgcgtcgcggtatggtttaggttggtcgtttttagtttcgtcgttagttgtcgtttttatttgttgcggcggttttggaattagattttgatttgcgtttcggtgaggtgtagggacgcggttaggtcggttcgtttcgagttgtttagatagcgttttatgtcgaaggtggattcgagttggaagatttggttgcgcgagaagattgtgcgcgttttttttttgcggtacgtcggttttttttttggatttttagcgttttttttttagttttttgcgttcggagtggtcgtcgtcgtttttacgttcgtttcggtcgcgtttggcgtcgtttcgtttttttttttgtttttttcggagtcgtttttttttagaatgatttcgttcgggtttttggagtttagttttttgtgatcggggtcggttttgagtagtggtttcggagagtcgcggtttgtgtcggaggcgggggaggagttttttagtaaggtttttttcgaggttggggagatagatagacggacgtatatatatgtatatcgatatagttttgagcgaggttcggcgtttggggacggtaggtttaattcgcgtcggtttttaggttttaggttatgaggttttattattttcgcgggttgtttttttttcggttgggttagagaagggacgtcgagttttgggattttttttttttcgaggataggtaagtagatggtggtagcgcggttatttttttttatttttttagttttttcgttaggggtcggtagaacggttttttttcggtttaggcgtattggaattattttttttttttaggtcgtgttttaagtttcggtcgttcgaagtttttttatttacgttcgaggttatttttttcgggaagtatcgtgttcggggttttaattttatttttttttttattaagtgggattggattaacgggtagcgtaatttagcgcgagggtaggttaggggtcgaaaaaaattgatcgagtagagggtttgcgggtgttggggttttagaattgcggagggaagtagcgcggggcggggacggggcgggcgcgtagggggataacgaaagtttaaagagaggtcggtatttttaggtcgcgggaggtggtcgtcggcgggggttagggtgtaggggtattattaggttggggagcgttttaggtagtgcgcgggtagggtaaatttttgcgtcgggattttaaagcgagggaaagttaggtcgtttatttgcgagagcgcgaagttcgcggcgttttttagggtttttttggtcgttgcggtagcggtagcggcggcggcggcggtagtcgaggttggcgcgaagagcgttcgtgggggcggttgaggtttagggggcggtcggtggtggttttcgttgagtaggtttttgatggagaacggggattttttgggagcgggtggggggggcggcggcggttggggttgtgcgttggcggtgtcggtagcgttcggttcgggtttcggtatggttttttttttttcgggttttcgggagggagggagcgggataggcgggcggcggggcgagtaggcgagaggtcggaaattagattataaacggaatttaattacggggcgtaaagtcgggggtcgtttcgggcgtaaatttaacggcgggagggcggagtgaggatttagacgggcgggttcgtatgagggaggggtgcggaggggcggggagcggttttgtcgcggtatcgagggatcgaggcggttcggttgcggttgcggttttcgcggaggaggtagtaagagtagttttcggttcgaggttgcgttaattcggcgtcggatgttaatgatgaaattaaaatgttatttaagttaaatgcggggagtatacggcgattgggcgcgtataatggtaaatgggattaggtaggcgaaggtttagtcgagtttcggtttcgtagtcgttttcgttatcgtttttttttcgttttttttcggattttggcgttttggtttcgggttataagagttcgttcgttattggttttatatagtttaattaggtagtaaatgaggataagtttattagtataaaaggatattggttttcgttaaagaggtattcggagcgtttttgcgagcgtaggaggcgagcgagggacgcggagtaggcggcgtttttggtcgaagcgtattaacggtcgcgagttcggagatcgcgtttgttttttttttttgcggcgtagggattcgtttttcgtcgttaggtttgcgggaggggggaggggcggattaggttttttcgggttatttcggggttatttgcgttcgtagttgtcgttttttcgttttttggggttggataggggttcgtcgtttttacgtagttggagagttacgtagcgtcggtttaagaggtaggacgtgatttcggttttcggagaatttattatttttttattttttggggttcggcgatttcggtattttttttaaagtttgttaggaagggcgaggttaagaagagagggatttgggttttttatttattatttagtcgatagtaagggaatttaggtgtaagttttcgtattgcgttttcggatttagaaattcgcgtggttttggtttttagttttggaaaatcgaagagtgagttttttttcgggattaggagtgggtgtgtttgtgtgcgtatgcgcgttgattcggttaaaattcgcgcgttattcggtggggttgttggggtaatagtttttcggtatcgacggttgttttcggaagggtatttttttgttttggtcgtcggtgtttaaggttcgcggattaatttcgagtttgtgatttcgacgatagtatttttttttaggaagttttttcggttagttggcgtttggagttgtttaattaacgttttaatgggggtaaggtgaatcgaaggcgtagcggcgtagtttttttcgtcgcggtaagtagcggtattcgttgcgcgtttcgacggtagcga

SEQ ID NO: 7374 - DNA, 3753 bp, Artificial Sequence
  Description of Artificial Sequence: Synthetic polynucleotide
cgcggttattttttcggtgtagcgtttttttagtttttgcgcggtcgtaggtgttagggcgaggaagttcgtgggcgttttcgtcgcgcgttaaggttttatttagagtaagcggtcgcgtgttagtcggtgatttagttatacgttgaattaatgtaaattattaataataaaagagtgtagggaagcgtttttgttttttttattttttttgtttggtttcgggtttcggattttttttgagtcgtagaattgttttatcgcgtttagtttttttttcgcgcgagatatataattttgttatcggtcgggtagttgggcgtagcgataagttggtcgcgttaagttcgcggcgagtaaagtggaggttttattaggtataagtagcgttatcgtttgttttatatttttggagaggaagtgcgcggtatagggtatgttatagcgggagttgttgtggttaagtttaaggcgagtttagtgtcgggaatatgtcgttgggtatttagttcgtttgtttttagaaggtaatcgtttaaatggcgaggtttgttttttagtttttgttttttttcgcgcggatttttgagttggattttagtcggggtgcgttttagttcgcgcgacgattttgggcgttaggagggagagtgggcgggtagttttagttacgtgtagtttgggcggcgttaaggtttcgatttttaatttttgatttcggttttattttttacgtggagcgagttaaatttttatagatagacgtatgtaagtttttttatcgaaaaatttgaaaatttttcgtgcgttattatgtcgggtaattaagtttattaaagttagtaaagatgtttaaaatgttttatttttttttttttttaaaaatatttatagatttgaattttttttttttcgtttttattattttcgggatgagggaaacgaaaagaagtaatttagtaattgtttaaagtttttgagggtttggtttggtcgagcgtgtatgtatgtatatatatataggtgtatatatgggggaggagtgtatttggttttgtaggtgtttttttgatttttttttttattaattatagtttgtttggttaaaatttttttttttattattattcgagaatattttatttcgaatggtttttaaagcgtattggttcggtttaggtaggaagtaggttttttgatttagggaatgttaataaatattcgaaataattaaaataaaaagtagggtagagattataaataagagttaatgaatatatatggtgtatttttttatatttttggaaatacgtcgttttgtttcggagttttgtttatagtatagtacgcgttcggttttgcgggtagttgggggcggcgcggggcggcgggtcggttagtagtcgagtttgttgtataggttgtagagaggtaaggtcgagaggttgtttttcgggtagtagagcggcgcgggaaaggcgagcgagcgcggtatcggtacgcgtagtagcgaattgtttcggaatattagcggtatgtttattagagtttgcgtcgacgcgtgcgttatgttggtcgtttttagtttagtcgagagttgtcgtttttatttgttgcggcggttttggaattaagtttttatttgggttttcgtgagttgtaggttggaggcgaggtaggcgcgtttcgagttgtttaggtagcgttttatgtcgaaggtggattcgagttggtatatttggttgcgcgaaaagacggtgcgcgttttttttttggtcgcgtcggtttgtcgtttagcgtcgtcgtttcgcggtcgttcggatttcggcgagggcgagttcgcgggtaggagttttttttttttttttttaaagttcgagtgcgaaggagagaggaaaggcgtgcgttttaagtcgttcgggttcgagttttcgttgtttttgggggtatttgaggagcgagaatagatagaaaggttatggagttggttggggagtttcggagatcgttagttttttttgggattaagcggttggtaagcgtttgtagttttggttttattttattaattttttttttttattttttttattggttttttaaatttagtatttcgttttttaaaagcgataagagagggatttagttatttggagtatggggtttttgtgtttttatttttatgaatgggttaggggtaatagggagaggaggtttggagggggaaatattagtatggttttaaaaggcgaatttgtttggtggtaattgagttggaagagtttttcgagttttatagggtggtattattttataggtcgtttgtttggaaattacgttaaggattaacgtaggattttttttcgttaaatgttgtaaagaggaatcgtttttgaaatgtattattgttaattattttggagtgttaattattttaaggaggagagagagagaaaggtagagatacggagcgagtgaggaagaagatttagaaagagattacggtggagatagattgtttagattcgatttgtagatttttatttcgtgttcggaaagaaagtattagatgtgtagtgattgaggatagtcgggtgtaaggtcggtcgcgtgtttttttcgttgtggtttatttttttaataatttaattttttttaggaagtttaagtcggtacgggtttgtgttcgtttgtttttaggggtttatcgggcggaggaggtattatagtgcgcgttttttttttcgcggtttcgaattttcggttgtcgtagttttggttagagggggttcggcgcgggagttttggcggggcgtttagttttttttttttcgcgttcgttcgttgttatattggcgacgtgcgatttttatttaggtaaggaaaagggatggggggatggtgtttggggttttgttttttagggtcgtgttggtttgggtagaagtaggcgggcgttttttagtcgtcgttcggttttttttttttcgaggatacggataggttgcgttttttggttggttagtcgacgggttttcgcggtgttttcgaggggttttcgtttaggatggattggatggtgaagttggagacgttatcggtcgtcggatattttttgttcgtattttttttgttgtttattttgggtttataagaaatcgaaggaaattaagaattttttttagagacgatttgggtgatttgggtggaaggtggtgtagtaggtaggtagtggggaggggcggggaggaaatttagggggagggggcgtcgaggttggtgaggcgtttttttcgcgttagggatatgtaggtatcggatggttgcgtaggggtttttgttcgtttggttttgggtgcgttcgtttagtttcggtgtaaatgtttttttttcgttcgttaattcgtcgggttttcggcggcgcggaggcggcgcggttttatttgtatagaggttattcgaacgcggttaatcgtagcgtcgtcgagcggtttcggaaaattttaaaacgtttcggttaggtatatagtatcggtgcgtttttagagcgcgtcgagggtttggcgggtattagcggcgtttaattaggggtagttagggttgaaagtagttgtagattttagttcgggtttttggcggttgcggtaatttcgattttttggattttttggatttttttttttagaggtaggggcggtgcgggattcggagttggagtggttcgacgttttcgtaggcgacgggttttcgcgt

SEQ ID NO: 7375 - DNA, 829 bp, Artificial Sequence; identical to SEQ ID NO: 7364
  Description of Artificial Sequence: Synthetic polynucleotide

SEQ ID NO: 7376 - DNA, 1328 bp, Artificial Sequence
  Description of Artificial Sequence: Synthetic polynucleotide
cgggcgagagatgtttttttgggcgtttagggtcgggcggggtcgcgcgtcgggttgtgggtcgcggtggagatttgattcgtatttcgagggtttttagagagtcggggagcgagtagtagagttatcgtttttagttttagtttgaaaagttggatcgtgtcgtcgtatgtgcgtttggtagtcgggcgtttcgggttttgcggttatattattttggggcggggacgtgtgcgtttcgggcgttcggacgttattgagttacgtttgagtcgtttattttcgggggtgagcgagtcgcggttcggggcgggattttggcggggggattcgagcggtttttaggattcgcgggacgtcgttaattggcgggggtgcgggggagataataatttgtttcgcggtaataagaacggtgattgttggtcgtggatttattttataggtttgtttttttttattaacgttttttttagttttcgggttaattcggatagtttgtttatttattgtaacggttaaggttggtttgtgttagaacggcgcgcgcgcgcgtacgtacgtatatatacggggggaaatttttttaaaaatgaaaggttagaagagtttagcggcggcgcgggcgttgcgcgagggtttcggagttgattcgtcgaggtaggaaattttttcggtcgcgacgttcggtttcggttcggcgttcgcgtgggatggtgtagcgttcgtcgtcgggttcgagagttgttgtattgaaggtcggcgacgatggtagcgcgttcgttgttcgtgtttttcgttcgcgtttttttgttcgttttggtcggtgttttgttcgcgttttgcgaggttcgaggtaagtcgtcgaattagggcggttcgttgttcgtttcgtcgagggtatcgtacgttgcgtttgggcgcgtcgaggtttagggttgtttcgaggggcgacgcgtttcggcgtattttcggagtttcggggtttgcgtttttagcgcggcgagatcgattttttttttttaggtgttaattttttggggaagggcgatatttggttcgtagttttataggagttagtatttgtttcggagggtatagtttcgggatcgttttttcgtttttatttttttgggtgatatttgtagatgtttttgtattttgatatttatacgtgttattcgggacgatgcgtgtcgggtttttttgttggttttatttcgtagtgaatatttttattttaggtttcgggttagttttttattaggttttttttttagtttcgtttttttcgttaatatatttaggggggcgcgtagcggtttcgt

SEQ ID NO: 7377 - DNA, 2957 bp, Artificial Sequence
  Description of Artificial Sequence: Synthetic polynucleotide
cgagtcgttttcggttttgcgtttttttttagggtattaaggtttttaacgttaatacgtggggttgttattaggggaaatcggaggtttgagtttagtatttttggattcgtattcggttagtttttagtttttttttaaatttcggttttttttcggttgtagaggaggtgattgaggcggaagtcggcggtcgcggtttggtggttaggggcgaagttaggggaggggttaagggtttggggagcgtgggtggcgattgtcggtggtcgtttttcgaaagaaaagtcgttcgttaggttttcggggaaggtgttaaggtcgttagttagagcgtttatagtagaagcgaaatcggagaagtaggtggcggtttcgggtgcggatggagagggcgaggtttgtaggtttaggtaagtcgcgttcgggggttttagcgttggcgtttcggttttttttacgtttttggttttcgagcgtacggtcgcgttggttttagttttttttttttttttttttcggaagttttcgttgttaaatattttttcgtagttggggtttagggtttagtaattgtttttatttgtagaagaagaaatagtttagtttagaaggttcgagttttgacgggtcgtggtgtgagttagcgaggaggttagttttagaaagattttttgttggtttttatagagggtttgagttttcgtttttattttatttttgacgggtattttgtattcgatgggtttttatagtaggattgggaagaaagtgataatttagaaaggaggaggaagggagttttgggaaaggtcgagtttcgttaaggtgaaggaaggtttgcgagatgttaatggtgggatttcgttagtcgttttgttaaggatagcgtagattacgttaggtttttaggtaggttttagagttttttaaacgggtattttatttgttttgtttatttttggggtaggcgttgttttttttattttattaggtagggtattgaggtttagggaagttgagttatttttaaggttatttagtttgttggttttttcgttttttttttcgaaggagcgtatagagattgagagtttcgggatcgtcgtattgtaaacgcgggtttgtggtgggtttagtcgttgtttgagaatttgtttatgtttaagtattttttttttttttttttttttttcgggtatttttaatcgcgtagggagaaattaggttgtttaaggtgtttttattttcggagtgttcgcggttcggcgggaagatggggagttttggacggagcgagtcggcgcgtcgttgttatttgggtcgttttcgtcgcggggtatttttttgaagtagtcgttgagcgataggttgtggcggatggagttttgttagttcgttttgttgcgtttgtagaaagggaagttattagttacgtattggtagatttggttgagcgttagttttcgtagcggcgcgttttggatggttatggcgatgagcgtcgagtaggagtagggcggtcgtattagttttagtagtttttgttggtcggagaggtttagttaggcgaggtcggcgttcgttaggtcgttcggggcgtcgaggagcgggtcgggagtttcgtagttcggggtcgcgtagggcggcgtaggttcgggattcgaagcgtaggatttggggttgagcgttggcgcgtttatttataggagggggttttcgtttatcgcgtttagattttttggtttatagttcggggggtgcgcggtggtttgggtttggtcgggcggggtcgaggaggggtttaggtcgtcgtagtaggtggttatgtttagtcgcgttcgggtttgggttagcggtgtcgtatcgaaatttattggcgatttatttagtttggtcgttagtagcgttcgggtgcgattagttcggtttagtttttcgttttttaaatatcgtcggggttagagtttatggagagtgacggtggcgagttttttttttggtagttttggaggagcgaaatttttgttttcgttttggtgttagtttttcgtttcgtttaggtttgatacgttttggatcggacgtttttttgatttttttttttttttttgtgcgattcgtttcgagtttatagtcgttcgcggttttggttgtagggattttaagttcgtagtttcgtttggttttacgggtttcgtagtttcgattgttttggatcgtattacgattttttaaggtttttagggttgtggtttgggagtttcgtttaatgcgcggtttttttgttcggttcgggatatttcgttttaaagaaattcgtttcgtcggggtttttgggttattcgggattcggggttagggatagagggcgattatattgcgtaagagatcgtaatgaagttcgtagatttttaggttggagtcgtagagcgaggtggcgaggtggagaacgcggggttgggtttggatagcggttttggggtcgtttggagttttcgtttttttaattcggaaggtagcggattgatatttgcgtcgaagtcgcgcgtattttacggagggtcgggattttggaaatttcgaacgttttagtagtttagggtagttatcgttttttttaagtcggggagttcggggtttcgttaggttttttcgcgttgtgatttcgggcgcgtagagcggagagcgttaagttttttgttgggtgtcggaggacgcgtcgaaaatagggacgtttttgtagtgcgttcgatattagttttttagttttgttgtcgttcggggttgttgtagttcgggttatttcggttttttaagttgttcggttttcggttttttttgtttttcgcgttgtggggtggcggaggatggatttaggttgacgttgggttgggtatttggaaagagggttcgtttttcggatttcgagtcgggtatttgtgcgaaagaggcga

SEQ ID NO: 7378 - DNA, 1860 bp, Artificial Sequence; identical to SEQ ID NO: 7150
  Description of Artificial Sequence: Synthetic polynucleotide

SEQ ID NO: 7379 - DNA, 1422 bp, Artificial Sequence
  Description of Artificial Sequence: Synthetic polynucleotide
cgcggggagtagaggtgtttagatacgcggtttgttttcggtttttattttatagagttttttatttcggtattgagttcggaagttcggttattagttcgttattttataatttttttagtttgggagtttttatacgggtggtcgttttttcgtagcggtttagtttttagttgtaggattttcgggattttcgtatttattatgagcgttgtaaagttgcggaagcgtgagcgtcgttggaggaggcgtttagggggaggcgattaggtggcgttttgtttttcgttagtttttatggtttttggaaggttaaagttttagacggcggttaggaggtcgcgttttcgggtttttggttttagggtgatcgcggcggggcgggcgtagttcgggagttgtttttatttgtgaagatagcggcggttagcggggcgggcggagggttttcgcggagggtagttcgtagtttcgatttcgttagggagtagtcgcggtttttgtcgttttttttttttcgcgggcggtttgggggttgcgtttggggttggcggaggcggtgtcggtggggatcggtggggggttcggatcgaacgcgttagcggtagatgcgtttttttttttatatttaaaaattaatttgcgttttattttcggtttcggagttaaatttaattatttcgggttgtataaagttagaggcgcgtcggggggtttgtatcgggaatcggtatcgagtgattcgttcgttttagttcggtcgcggcgtttgttttgtttggatgtggttcgagtttcgggtcgggcgcgcggggcgggggttttggattattcgtggcgtttttcgttttagcggagtcgaaagttattcggagttgtttttttcgcggttagtgttatttcggggcgcgagtttttttgtcgagtcgcggtttcgcgcgtttttttcgtcgtttagattcgcgcgttttttttatttgttgtggtcgaagcggttgtcggggcggtcgggtcgcgttttcggagatagacgcgttgcgtttttttcgtcggggattcgttttttattcgcgagggtagcggtcgagttgggatcgagttattaatagattgcggggttgcggcgtcggtcggtgagttatagtttcgcgtacgagcggtttagttcggttagtagcgtcgtcgtttttgcgcgtatttttcgcggcgatagcggggattcggggtcggaggtaggcgcgtaattatggggatcggggcgggcgatggcggcgggcgggtttttgtcgtagggtggggatggtttttttagtcgggcggtcgtcgttatattgtagagcgtatttaaagagatatttcgtttcgcgttcgttttttagtattagattttcgttcgaaaacgtcgtcgggcggattgtacga

SEQ ID NO: 7380 - DNA, 1479 bp, Artificial Sequence
  Description of Artificial Sequence: Synthetic polynucleotide
cgacgagtttacgaattttatcgtggtcggcggtagtcgttggtcgagtttagcgtttaggtttaggttatttttatgtcgtgcgattcgtcgggaacgggtttaggttcgtttgtttaaggttagaagtattttgttttcggtttaacgtcggatcgcgtttcgttttttttattttatattaaggaaaggaattagacgtttgggagaaaggatgagtagtattcggtgggattcggttttaattcggggtcgtttttaatttttaattttttagagtttttttcggtttcgtttttttttttacggtttcgaggtcgtcgcggttttttttcgttttgagtgtagatagttcgggaagtggagagcgtagttcggagttagggagtcgtttttaggagttttggcgatgggagcgtaggtggcgggcgtggtttttttaattttgttttagtcgattcggagtcggttttcgtgtagtagttatcgttcgggttttcgtttggttatagtattaggttatagtgcgttggtttttgattatttttttggttcggtggtcgtttttcgtttttttttagttcgcgtcgttgttttgttttaggtttcggtgcggttttaagttttagtttagggtttttaggtttttttaggcggcggtggcggtatttatttgggtcgcggagtcggggtttggtacggtttcgtaggtggtaaatgaaattttggtagttgtcgtgttttagggttttacgggtatagagttcggttagtagttgtagcgtttggtgatagagcgcgtttttggtttcgggtatcgttttttcgtattttcggatcgcgtcgggtaggcgggcgtaggagatagtttttcgtttgttagtttagagtcgtcgttttcgggtcgttcgcgtttatcgttagggatttgtcgagaaacggtgcgagtttgagttcgagttttagatttagtcggttcggttttttatcggttgtatgtagtttttcgttagtcggtcggttaggttttttttttttttcgttcggttttttcgtttttttttagatatcgaggagaggcggtgtcgtatagtttagagcgtttttttgtttgcgtttcgttcgttattcgcggtcgtcggggggcggggttaggttaggagtgcgcgtcgtagggtaggatagcggcggttttagatcggggatttggggtatttttcggtttttggtcgagcgcgagatttggtttgggatttcgcgtttagagcggtcgcgttttggtttggggagtgtgagtgagtgcgcgtttcgggcgttttcgttattttattttttatttttgatgtaaattaagtattcgtttttatcgtcgagtgtgtttaaagtacgtttttggatgtttagtgcgaaggttataatttgggtatattcgttagatgcgtagaatcgagtttttgtttcgaatttggaaagagtcgt

SEQ ID NO: 7381 - DNA, 446 bp, Artificial Sequence
  Description of Artificial Sequence: Synthetic polynucleotide
cgtgcgtttcgcgtattttgtttttcgcgcgacgtcgttcgcgtcgttcgcggttcggtcgggagcggtagttcgtgtttcggtttcggtttcggtttcggttggcgtttgtatttgcgattatcgtgagtagttatggcgtattttatagtgtagagagtcgttttggtttttgggtttgttttggttttgtcgttgttgttgtttaaggtttttttgtttcgcgggaagcggtaggagtcgtcgtcgatatttgaaggtaagagtaggttagttttttttgagtttttcggcgtcgaagagtacggagaacgttgtttgagggaggggtgattttgagagtttgtagtttttatcgaaatatttattaaattgattggagagggcgggcgagacggcgttgaagggttaatgtttacggtttcgttgttattagcgggtggcgg

SEQ ID NO: 7382 - DNA, 2991 bp, Artificial Sequence
  Description of Artificial Sequence: Synthetic polynucleotide
cgtttgtcgtttataggcgtcgttgagggatagttggtttagtttgcggattttttttcggattttatatttatgtttagggaaagtcggagttacggcggtataaattagcgtttttattttgattatttgagcgagcgttcgcggttcgttcgtttgcggtataaacgtataaattttttgtagtattatatattatgttttagagataaatatagttttaggggtttttgttttggtaaagtaatttttatttataggaatagattataaaagtattataaaaagtggttttgaatcgggaaacgggttgggggtgggttacggttatatttgttatatttgggatcggagtgtattgggttttacgtttttttaaataatcggtgtatttcggggtagggtttaggtttgcgagggttttatttttatgggggagggcgcgagaaagttgaatttagttttttaaggtttagttttggtttatcgaggaatacggagcggttatcgtaatgggttttcgagaagggtgttgcgtggaaaaaatcgcgttgtgtttttgttttgtggggcgggggcggaaattttagttttttcgttttttttattttaagagaggtcgtttttaaagcgttgttgggaggggggtatttaagtttaattttttgggcgcgagggattttaggggtattatttttcgggcgggtgggcggttattatttttttagagtatttggtatatcgggttggggttcgtattcgtagggtattgcggggcggcgttcggtgattgggtggggtcgtcgttgttttttttttcgttgggggcggtagttttttgtttgcgcggaggcgatttagaaggtacgttcgttagtaggagggcgggcgtcgtagggttttcggtggagatgcgttttacgatgttggataggtagtttaggttcgatatcgtcgtatttttttcgggtttgggttttgcgcggggagggttcggttagtaagtaggggtggggtcgcgataagttttttattttcgggtttagtattttgagatagattggaaattgaggattttagttagagttcgggataatttaaaagatagggagttatttgtttagtattttattttttgtattattttttaggatataggcgtgtgtgagtgggggtgggagcgttttagatagaggttaggatagttttatgaaggaggaggagcgagtagggagaggttcggaatatttatcgttgggcgtttcgttgtagtaggcgttttcgtagtagtttcgtcgtcgggcgtcgttcggggggtcgttgtagtttatttgtaaatagtaagggcgattgagttaggttcgcgggacggttcgaggttcgaatattaatttttgtagtcgttttttttttaattttagtttaaggttttagtttcgggtttagatttgttttggttgggggggtaattacgggtgggtaggagatgaggtttgtaatatgtagggttaaattaagggcggatagttattaaggggcgtaaatttatattttggaagtagggataagtagagaaaaagatttttacgttcgcgttgtagtgttttaatagcgtttttaatggggtagttcgaacgtttgttcgtatatttttaaaataggttattttagtgatagttgtttaggataagggggttttttttttcgggaaggattttggtttaaatttttcgtaaggttagtttttcgttttcggaaacgcgtttttgatatttcgagcgtcgttttaatttttttattttttggggtttcggttttattatgtcgtcggagtagttggagcgcgggttggacgcgtcggagtcgtcgttgtagtgttcgtcgtcgcggttcgggggtagcgggttcggcgtatagaaggcggttgcggcgttagggggcgcggcgttttggtcgcgtagtagagtttgtaggttttcgatatagcggatggcgttgcgtaggatttttattttgggtaatcgttggtttggattgttcgacgtgtagcgtttgagtgttttaaaggttttatttattttgtttaggcggcgtcgttcgcgtatggtggcggttttgcggcggtcggcgttggtggttttgcgtttgtacgttttgtaggtttatagtaggtagcggttcgtttggtggtgttcgttgggcgcgcgtatatgttcgtttttacgtgcgttcggggtcgggtgtatcgtcgcggggaagtgcgagtgtttttcgggttttaggagcgcgtttacgtgtattaggcgcgggtttaggttttcgaagaagcgtaggttcggggagtcgaaatacgggtcgttatagaagtcgttcgttgtggtaaaggagtagagagagtcgtcgggggtcgttaggtttacgtcgcggagcggtggcgatagtagttttatattttggcggtggcgcggtacggttttggtttcgtttaatttaagcggtagagagtggtcggaattttttgtcgttcgggagtttcggttgtagatagtaaagtgttggtagtttgaatgtttatttattgttttttattttttttttttttgttcggtttgatttgtggttaaggaaagcggcggtagcgttttagggtttttttatttttagtttttcgttaggcgttttgggttatttattcgtagtagtttaaacgtttcggagtttaggcgggtagttgggggagggggagttcgaggttaataggaatattgcggggcggggtttgggggggttttcggggtggtcgtaggggttcgtagattggttagttagttcgtttttttatattggcgtgcgcgttaggttttttatcgggtagggagggagggagcgatcggtagttttaggcggttgtatttggtttttcggtacgttttttttaaatttttttaatattcgattgttgtattcgcgggaaacgttggttgcgcgcgt

SEQ ID NO: 7383 - DNA, 928 bp, Artificial Sequence
  Description of Artificial Sequence: Synthetic polynucleotide
cgagtttcgtagtttttttttttcgtttcgttcgttagttttttgttttttttttttatattttttattttaaagttaggcgtcgggcgtttttttttgtcgtcgttcggtattcggttaatttttttaaaatgcgtttttattttgttggttgtttcggtagggagtatggaggattgggggttcgaagtttgtaaagggtgattttagcgttgtagttttttcgaaacggagatttgttatttttttagagggcggggaagtttatattattttttgttttatagtgttcgtttcgtttcgtttgttggtttttcgtttattcgagatattttaggtacggttcgtattggagagggtcgcgttgttgttgcgatcgtacggcgttcggggtaggaatatgttcgtttttttttgcgcggggggaacgaaatttttagagtgcgtttcgatacgttttttttattatttaaggtaggtttcggtagttttggttatttaggttcggggagttttagtcggatttgttgcggtttttttcgtagcgtaggtaaggattttaaattttaaattagggatttcgattttttttttttttttttcgttttttttttttttgaaagagaaatagatagaaagtttagttttgagataaagaacgcgagtgattttttcgaaataaatttgaagataacgatataatagtgaatggtaggacgtataaaattttatgggtttaggttaaatggtattagttataggttttagtcgtagtcgtcgcgtcgcgtagttttttgggttatcgcggagtttgaaaagacgcgtttaaggagattatttaaagtaagattttttcgttcgattttttgtttttttaggatttatttttttttttacgggcggttagttttcgttttttcgttttcgt

SEQ ID NO: 7384 - DNA, 1267 bp, Artificial Sequence
  Description of Artificial Sequence: Synthetic polynucleotide
cgcgggattttagggttttttcgtagttttttgttttcgtcgtatcgcgttttttcgggtttcggtcgcgttcgttagtcggaagcgttttttttgcgggtgcgattttcgtagttatttttttttagtttggcgggggtcggcgagagtggtttttatagtattttataagttcgggaattcggggtacgcgggttcgttttgttgcgggtttcgattttttgggacggaaagtcggttattagtagtaagagggtgcgtttattcggtcgcgttttttatttttgcgtttttgaggtcgggttttttgagaaggggtatttaacggggatatttttaagttcgtgagtttttatttttattttgttatttcgagtagggtaaagagattttaggaatcggtttacgttatcgtcgttttttagattagcgtaaagttcggttttaggtttttttacgtcgtcgtggtttgtgggtatttttatttttcggatttttttaatcgttatagttatgtttatttgttttggtagtgtatatatagaattatataattaaaattaaatttatcggtatcgttttcgagggttttcgtttagtagggggtatcgaagttaggtggaagtaaatgagtttggattttgaggcgcgtttggtttggagtcgttaaatttgttagcgggcggcgggggaggtggttcggtagcgtcgggtgttgcgttcgtatatgcgttcgggaaggtagtttcggtcgtttcgtttttagttcgttttttatcgttggcgcggcggcggcggcgtggggttcggggttcggtttttcgttgcggttgcgttcgtttgggagttcgggtaggagcgcggggtttggttattgtggtttgttgcgttttttattgggggtcgatttcgttcgtttttttcgttcgtagaattgcgaggatttggattgtaggcgtcgtagtcgttattattcggagtatcgaagtcggagttttaggatttgcggtcgaaacgagagagcgggaggcgtacggcgtttttacggttttacgcgttttagttttttcgagtcgtagtcgttaatgttgttttttttattttcgtatcgcggtgggggttgtcgaagttgttatagtttattttcgtcgagtcgaaaagtcgtcgagttttcgcgggtgggtattttttttcgggggaatttagatcgaggcggcgttatcgagcgcgtacggattttttcggaaaataattattcgggattcgt

SEQ ID NO: 7385 - DNA, 1225 bp, Artificial Sequence
  Description of Artificial Sequence: Synthetic polynucleotide
cgtcggtcgttttttggtgttttcggggttggtaagcgcgtagttgaggaaagggtataaaggtggcgagttttgcgggagtagttgtgtagaatttgtcggattttagggtttggtcggtaggttcgttttcggcggttgggttttttttttggagtttagattttttagtcgtaggttgtttttcgggcgggttttagttagggcgcgtagttttgagcgtttgtcgttgcggttcggttggtaggtttcgaggggcgcggggtcgcgggtcggtcggtagggttttgtgtcgttcgttttcgggtgtgcgcgaggcgcggagtatttaaattgatattatatgtttttttattagttgtttcgcggtcgagttttaggcgtataattatcgttagtgggcgagagcgttagtagtttttagggaagggatataatgattgaggtttaatttttgaaggggaatttggagttgcgttttttttttgttatttcgatgttgggagtggcgttttggttttggcgttttttgggtaagtattagtcggcggtatttgcggaggtggttggtacgttgttattttttgaaatgagtgaggagggaggtttagatttaggcggttttacgcgttcgttttggtattagtagattgggaattgtcgtggttatgttcgaagtttggaaagtttttttcggtttttttttgggatagttttttttttttcgggaagttttttgtgtttagaggtggggttttgtagttggaggggtagatggaatttgcgaagtaaaggaaggtaataaaaggaagttaggagaaatcggaaacgtgggttaggttttgttttgttggagaagcggtgttttcgtaaagtttttgtttgcgttggtttcggtcggagtttagattttttaaacgtttgttattttttatcgagttgaggtttcggtttttattcgcgttttggtgagggtttttttttagttttaagttttcggttattttgaaaacgcggtttttttcgaaggggaaataagtgtagtttaatttcgtttgagtgatttataaataaggacggaaagggtcgttttattacggtttcgtttgtcgtgacgatgtaatttttcggagcggagtattgttataaagtgataaggttgttataagcgtttcgattgatttttttaattagttttttatgtatgattcggagcgattttcgt

SEQ ID NO: 7386 - DNA, 1627 bp, Artificial Sequence
  Description of Artificial Sequence: Synthetic polynucleotide
cggttgtcggcgcgagcggcggttttttttcggttgtagaacgtttttcgttgtcggagaaggggtttagtaaaattgatttttttttatttgtttttatttataattgatggggagatgagaacgtaatatattttagtatcgagtttttgtcgtttggcggagattttgtttaagacgttttcgtaaagtatttttagtcggggaataaagtacggaaagttgttgggtagagcggtcgggaggagatatcgggagtcgggtgggcggtggggtggtcggtgggttgtttcgggttcgggagttcgttcgtagcgcgttttgttagtaaggggagagggacggtgggaagcggtcgtttttcgggtttgggtcggggatggggatggttaagttattcgagttttcgtttttcgtcggtaggtattattcgggggtcgtgtaattcgggcgtttattgataggtattttacgttcgcgaggggttgtttcggttttaattgcggcgttgcgttttttttttaggacgtaggttaatgttcgttcgttcgtttttagtcgggcgtagagttgttagatttcgggcgttttagcgttcgttttggggttaacgggcgggagggggcggttaagttcgtaggcggttttttcggttttggtttagtttttttcggttggtttttggagacgttgtgttcggtagagaagtaatttttgttaattttagttatgtgcgggggacgtcgagttggttttgtttggtaagaaatttttatttgatgtttttttcgttttttttttaagggggtgtatagtggaggagggtttttaagtttatttgtttttttttttaagtcgttagttttgttagttttgacgcgttcgttaaatttttttagttttttgcgcgttttttgtacggtaggtagagagagtagtttggaaaataaattaattgtttagtggtaatatatatatatatatatatatatatatatatatatatatatatatagcgattcgggattttaggtttcgatttttatcgcgcgtatatatatatatatatatatatatatagcgattcgggattttaggtttcgatttttatcgggcgttataagagtattagtaaattgttgaaaacggttttattttattggggggaggttggtaagaaaaaagaaaaagaaaaaaaaaagtttgttacgcgtaaggaagaaagaaaataaagaaaaatattgtaaaaatagatatttttttgtttttttaggttttggtttttttgatagaattttgaaattcgttattattttttgtagtagtagtagtagtagtgggatagagtaggagtaaaataaatcgatgtacggtaaatggtgtaattcgatttatttttaagttaatttattaggcgagtcggagtttggttttttttacgtattcggtagttttcggcgcgggttttattttcgggtacggacggtaggaggcgcggtcggtcgggcgcgttcgttttcgcgggtgaatcgtggttagcgtcgtttggaggtttttattttggcgtcgcggttttgttgatttttcggtggttttcgcgtttttttttttcggcgttttgttgcgt

SEQ ID NO: 7387 - DNA, 1857 bp, Artificial Sequence
  Description of Artificial Sequence: Synthetic polynucleotide
cggcggtcgtatttggttttatagtgtaaaatgtgtttggcgaggaagtcgaggcggcgttgtagtagttgagcgtgggggtttgtaagggcggttagttcggggaagcgaggttcgtggcgtcggtagaggcgtagtagtcgggtcgcggcgttttgttcgcggtgtagttttaggacgcgtcgcgcggttcgttcgcggaatacgtatattgattgtaatagcggttcgttatatttgttttatatgtttgttattcggtagtcgtgtattaagttcgttttattgtttagaaagattagcgtttcgttcggatcgcggtgtaggttgttggtggtacgttgtatgacgcgcgggttttattgtaggttgaagaggttgtttacgagtcggtcgaagttggtcgttaggtagtcgaaaaggattaagtcggtttattgtattaggtttattagtttcgtttggttgaggttggttagtttattttcggtatttcggagggggcgtagacggtcgtttttcgagcgttagggcgcgggtattattacgttcgtgaggttgggtagttagcgtgttaggtttattacgttgttttcggtttagtgcgtagcgcgtagttttttttgtatttgcgtttattgcgcgtttcgagtttttattcgagttagtgttagcggcggtacgtggcgttggaggtttagtaggcgcgttagatagtaagatagggtttcgttttgaatttgtttcgggttgatgtcgtagcgtacgtaggcgcgggtgtcgtcggtaaaacgggttagtcggttggagttgcgttcgtaattttcgcgttttagggttattattcgggcgtcgcgagtcgtttttagttacgtcgtcgtttgggttttcgaaaagttcgggggtatttgtttttttaggtcgcggttttagaagacgttttcgtgtatcgcggcgttttttttcggtcggggttgtttggttgatacgtgttatttgggttcgtttcgggattgtcggggcgggtcgttcgcgtcggtcgttagggtgagtagcgttcggaaagtttttagggagtcgtcgcgggcgttttacgttaggggcgggggtagagggaagcgaggcgcgggcgcggggtcgtcgtttcgggtcgggcgtcgtgggagtcggttttcgggcggtcgggaggcgggtagttcggttcgcggcggtaggagttttttttatagcgttagtagcgagtttagcgttagtagttagagtttcgcggtggcggcggcgtttcgtatttttttgtttatgttttcgcggttgtgtcggtgcgtcgtcgtcgttttaagtcgagtttaggtattcgggtttcggcggcgaggcgggttcggtagtttgtgggtttcggggtttcgggcgtttcggttttatcgcggtcgcggggcgttgcggggttttgttcggcgtttcgttcggcgttgggaattcgagttttcgtcgttttttagttgtttttgtatttcgttgtgagatttttcggtgggcgcgatttataggcgttcggattacgtgggagttagggggatttttttttttttttttcgttttcgtttttcgtttttcgttttttcgttttttttttttttttttttatttaaagcggcgatggtttttttcgagagggagaggcggttttatattcggttcgggatttgggggtttggaggaagtcggattggttgcgttcgcgtcggggcgtaggagggggtggcgtagagtcggagtttggggtttggcgggagggacgcgttttgggttttcgcgggggtgttttggtcgtcgggtttttttgtttaggtagcgcgg

SEQ ID NO: 7388 - DNA, 2423 bp, Artificial Sequence
  Description of Artificial Sequence: Synthetic polynucleotide
cggagcgtagagaacggttggagatatagcggtcgcggtttttttcgtagcgtaggagcgttaggtattgcgttgggttaattgcggttagggagttatttgttcgcgatagcgagcgcgtatttatattttcgattaatttaggttggtttttagtttattttcgggttttaacgtttaaatatttcgtattgttggtttcgatatttttttattcgtcgttaggaattagcgtagagggagatgcgttttttgtggcgggtgcggggcgaggattttgattttagttttgggaagtgaattgtacggaggagagagttttttatcgttagttttgttttcgttttttttgcggttttattttagttcggatgtcggcgatggggaatagattagggacgtaggagtatattggatcgggggtggatttatttggggaggtaggtaatcgattcgcgtatcggtggcgtaatttcgtttcggtgatcgaagtttgtggaggtagttttattttcggttttttggttcgatatttttttgttatttttttttttattttttcgagttttgggagtttggatttcgaaggtgtaaaaagttaagagtttggaaaattgtattgtgtaaatatattgattttatttgtttttttttaggagttttatagatatatttaggtaaaaagatcgttaaataaatgtttttagttatcgtaatgtaaaaataaatattaattttttagacgtagtagtagtcgcgttgcgtttaaagttttaacggttacgtttaataattataaaagtgtttagcgagagtgttggcgtgagtgtgaatgggtgtgcgttggggggtacggtggagcggtgtgtaaaatcggagttgtaaattatcggataagggtatggagtggttattcgtcgtcgatttagcgcgggcgcgttttttcgtatatatttatagtagagttcgtattgggaagagttaaaaaataaatatttataaggacgaggaaagcggtttcgttttcggcgttttcgggttagggcgagcgcggcgaggggcgtatcgatcggttcgtagcggggcgggagttcgagcgcgcgaggagcggcggtttcgggtttttgcgggtttttcgggagtagggcgcgggtattttcggggtttatacgtcggttttcgcgcggatcgcggacgcgcgcgtttttttcgcgggcggcgttttttatagggtcgagtcggagtcgttggagtttaggttgttttttagtttgtagttgttgagttgttttcgttgtagcgataggttttgcgtgttgcggcgtaggtattttaggttttgtaggaacgattttttggttttttttttttttatgggggatattttttttttttttattttttggatttcgtcgaaggttatcggttgcgttttgaagcgagattggcgcggtcgtcgtagtcggtttcggtttttgggtagtttggcgggtcgtacgggttgcgggaattcgtcggttaggtatacgaagtgcggtattatcgtttggtaattggagtagatgtttattagttcgtcgggtttggcggttatggcgttttcggcgtttgcggggtcgggcggcggggcgtcggggtttttcgagggcggtcgttgcgtcggggtttttcgggaggtagtagtcgggggttcgtcgggcgggggatttaaatttgttgcggggtggcggcggttttcgcgggttcgggtcggcgtttttcgggagggcgggcgggcgggcggattcgtcggggggtacggggttcggggggcgttgtttcgtcgcgtttcgaggcgttcgtcgtcgttgttgtcgtcgtttgtttcgcggcggttaggttcgcggtttatatagttcgcggttgtttatacggttttgagttcggatgatagcgaatgttatttaaagcgtgcgcgtttcgcgttttttcgtttgacgtcgtttcgtcgttttgggaaagtaacggtttttttttcggcgtcgttcgtttttcgttaatcggtttcggaaggtaggtttcgttcgcgggggtttcgggagaagtcgcggtttcggagtacgcggttggttcgagttgcgttcggatagggatttttaatcgtcgcgattgggcgggtattgttttttttgggatttttaagtttgtattaatcgggttggtcgcggggtcgtaggtttttttttttcgttttttggttttagatgtatatatttgaggcgttggttattttatcgtcggttttgcgcggggcgcgaggtagtttttagttttttttgtagtttggcgagtttgagcgttcggttttttagagttgagttcggaagaaggggtgggttttttttttggatttttgttattttttttcgtaggcgcgcgcgcgt

SEQ ID NO: 7389 - DNA, 1146 bp, Artificial Sequence
  Description of Artificial Sequence: Synthetic polynucleotide
cggtatttgggtttttgcgcgtttcgtttcgcggtcgggtttatggtattgtgagtttgtaagggagtttcgtttagcgcggggagcgttcggttttttttcgttttatgcgttcgcggttttgaagtttgagcgggggtcgggggtcgggcggggtcggggtcgtcgtaggtatggcgttcgggagtcggtggcggtcgatattgtcgtcgttgttgttgttgttgttgttggcgttggcggcgcgcgcggacggtttggagttcggcggcggtttcgggtagtgggttcgttacgcgcgttgggcgggcgcggcgagtagcggcgagtttagttttagtttgcgtattaacgttacgcgcgcgttgttgttttatttggacgacggcggcgattgcgattttttggagttgttgttggtggacggtcgtttgcggttgcgttttacgttttcgtgcgtcgagtcggttacgttgtagttggatacgtcggtggtcgacgatcgttggtatatggtgttgttgattcgcgacgcgcgtcgtacggcgttggcggtggacggcgaggttcgcgtcgtcgaggtgcgttttaagcggcgcgagatgtaggtggttagcgatttgttcgtgggcggtatttcgttcgacgtgcgtttttcggcgtttacgttgagtatcgttaagtacgagtcgttttttcgcggttttttggttaatttgaagttgggcgagcggtttttcgcgttgttgggtagttagggtttgcgcggcgttatcgtcgattcgttgtgcgcgttcgcgcgtaatttttgcgttaacggcggtttttgtatcgtgttggttttcggcgaggtgggttgcgattgtagttatacgggtttcggcggtaagttttgtagcgaaggtgagtttcggggagcggtcgttcggtgtttgggcgcgggggtgagggtttggggcgtttcgtgggggtcggagtgtgtgtgggtttttgaggtacgggggttgggtacgagggtttgtgagtgggtgcgagcgttttagggttgcggggacgcgtgttcgggcgagggcgcgtggggttggcggtgggcggggcgagtgggcggggtcggtttgggcgtggttagcgtgagttttgcggcga

SEQ ID NO: 7390 - DNA, 577 bp, Artificial Sequence
  Description of Artificial Sequence: Synthetic polynucleotide
cgttttttttattttgcgcgttttacgtgttttttgtaaataagagaacgcgtaggcgtcgtaaattagcgtttattggtcggcgtgtcgtcgtttcgttggagggaggatttaggtttcgttggtcgcgggttcggtattcggtgggtcggtggagcgtttgttgggttcgggtcgtcggtttcgttttcgttatggcgttttggttgtagtttttgtcgttgttggggttgttttcgggcgtagtggtcgttttcgtttagtttcgagtcgttagtttttaggtttgggggtcgtcgttttcggagttgttggcgtttattcgtttcgcgttggagatgtttaatcgcggtcgggttgcggggacgcgggtcgtgttgggttttgtgcgcggtcgcgttcgtcgggtgaggacgcgtcgggggcgggggcgttaggttcgggtttaagggataggagttttgatttaatattgggatggggtttgttcgttggacgaatcgatttttggtgatggggaatgggtagcgtcgtacgggcggggttttgggcgtcgttaagggtcgattgtgttcgt

SEQ ID NO: 7391 - DNA, 1721 bp, Artificial Sequence
  Description of Artificial Sequence: Synthetic polynucleotide
cgtgagttttcgaaaggcgaagggtaggtagtagtcgttggtttttgcgtttattaggagtttcggatgttcgagttagggttgcgttaaggcggtcggagtagagagggagacggggacggggataggtagggataaagtgtaagaggtaaaattggttgaaaagtagaagtgtaggagtcgttaaggggcgggacgaataggttcgtgggtcgggcggagttaagggtgggggtcggggtttttttaggtggtattcgcggcgttagtttttagtttttttttttttttcggttttgattggtaggcggtttgcgattagtcgcgaacgttatagcgtttcgggcgtttaggagaacgcgaacggtttttcgcgggagcgggcgagtaggagggggcgtcgggttatatatatagcggttcggtttcgggcgggtttggcgtttagggaggcgcgtattgttttttagagttttagttttagtcgcgcgtttttcgttcggttcgtcgttttatgtagtcggggtagagttcggcgttcgggggtttcgtcgtttgtttttcgtattttttcggttgcgtatttttgttcgaggtcggtcgtgcgttttcgcgggacgttataggcgtagttttgttttttagtttttcgggcgtattgatcgtttgatcgacgtacggttttcgggtcgggatgtcggggttcgggacggtcgcggtagcgttgttttcggcggttttgttggttttgttggcgttttgggcgggtcgagggggcgtcgtcgtatttattgtatttaacggtacgttggaggtcgagttggagcgtcgttgggagagtttggtggcgttttcgttggcgcgtttgtcggtggtagcgtagtttaaggaggcggtcgtttagagcggcgtcggcgattatttgttgggtattaagcggttgcggcggttttattgtaacgtgggtatcggtttttatttttaggcgtttttcgacggtcgtatcggcggcgcgtacgcggatattcgcgatagtgagtggcgcggttaggcgcgaaggggcgggggcggggggtaacggtcgtcgggttaattcgtttagttatattttgagattttcggcgggtatttgttcgggggtttcgggaatcggggcggattcgggtttcggttttttttgacgcggggttggggacgtagatatttttggtttcggtagtttagcgtaatttttgaggtcgggcgtcgtttttcgtttttagaaattcgggtttcgagcgtcgaattttagcgttttcgttcgtgggtatagggcgcgcggtgtagttatagggggttcgagatacgcgtttcggtttggtttaggttggggaatcgttggggtcgggttcgcgtttgaaggttcgggattgggtgcggtcgtcgggggttttttatataggtaagttaatttgagttagcgtaggtttgggtttcggaggttttagagggtagtttgggttttggaggtttttgggggcggttgcgtcgggaattttggttttttatttttaattttattttagaaatagggttttcggaggcgaataagtcgaggggcggagtgggttagggattatttgtttcgtaatgatttgcgtttcgtttttaggtttgttggagttttcgttcgtggagcggggcgtggtgagtattttcggcgtggttagtcggtttttcgt

SEQ ID NO: 7392 - DNA, 1721 bp, Artificial Sequence; identical to SEQ ID NO: 7391
  Description of Artificial Sequence: Synthetic polynucleotide

SEQ ID NO: 7393 - DNA, 615 bp, Artificial Sequence
  Description of Artificial Sequence: Synthetic polynucleotide
cggagtttcgggtacgtatcgtcgagcgttttattttgagttttttcggtattcgtagtttcgatagtttagttttttttatttgaaagttttatttgaggttttttttaattttgtttttttgtatttttggcgtcgcggggagttaggggttaaatttcgtggttcgcgtggtttttttttttttcgtagttttttcgtttttattcggcgtcgcgtttggagcgttcgtttcggagattcgtataagagaggaggggaaaaagtgggtttgtttttcgggtggttaatttatcgagttcgcggtgttttagaggaggcgttagcgttaggttagcgttaggtcgggttgtttgtttttcgcggtaaagtataaatgcgttcgagcgcggcgtttgaagtttttggcgagtatagtcggttcgcgtttagttttttttcgcggtcgtcgcgtcgtcgtcgttgttgggatcgtcgtttcgtcgggttttaggttttcgcggttcgatttcgagtttatcgagtagggggcgtcggtcgtttttagttcgcgcgttcgtaatattcgttggtttcgcgcgtttcgttcggcgttgcgcgttcggtagacgtcgg

SEQ ID NO: 7394 - DNA, 1542 bp, Artificial Sequence
  Description of Artificial Sequence: Synthetic polynucleotide
cgggacggtcgtcgcgcgtttttttttttcgttttttgtttataagatttaatgagttttttcgggaggtagcgtagcgagttaggttcggaattagtaggttgcgtcgcgcgcgtcgcgtcggggcgggagttgggtttgggcggcgggtaggagttggcgggggcgtacgggtagcgttgcggatagttcgggagtcgcggcgatggcggtgtaggcggcgttttttagtacgtattttttcgtgtttttcggtttcgggggtttttcggacgggttagggggcgttttcggagttttggataagggttgttgtttcgaggacgatgagatcggggtttcggcgggtgcgttgttgtcgggagtcgaaggaggggacgtgcgcgaggttattcgcgatttatttagttttattgattcggcgtttagtaatattaagttggcgttggataagtcgggtaagtcgaagcggaaggtgaattatcgtaagtatttgtagaagtagattaagcgttgtagcggttttatgggcgtcgcgtttttcggttcgtttttttcgagcgtcgtcgatacgttagttaaacggtcgttggtcgtttttagcgtttcgatagtcgcggtttcggtttacggtaaggttgtttttcggcgggaggcgtcgtaggtcgtcgcggtcgttagtttgtaaagtcgaagtttggtcgcgtttttcgattcgttgcgttacgttttcgggggtgtcgagtcggcggggggtgaggtggttgcgtcggcggtcgggttaggaggtgcgggtattgggggcgcgggaggggacgtggtaggtttcgcgggggttacggcgattttaggggttaggaaggtttcgttgcgggtacgtaatttgttttcgtttttttttacggagtcgtttcgggtaggcggcggcgggtgtggttcgtcggggtcggacgtgagtttgggcgatttggagaagggcgcggaggtcgtggagttttttgagttgttggggttcgattacggcgtcggtacggaggcggtagttttgtttgtcgtcgagtttttcgacgtgtttttcgtcggagttttcgtattgcggggattttcggagttggagttcggtttttttgagtcgtcgtcggtagtggtgggaaatttattgtatttcgagttttggagcgtttcgggttgtttttcgattaaaaagagttttttgattgtttttcgcggcggtttgattttgaacgagtttttgagttttttgtatttcgtcgttgcggattttttcggcggggaggacgggcggggttatttggtttttttcgtttttttttttttagattgcgttttgttttcgtcgtcgtcgttttattaggtgttttacgattatagcgcgggttatagtcgtatcgtttattttagtttttggagattcgacggggtttgggaaggggcgtcgggggaggagggggcgtatcgggattgatttcgaggtacgtttttttttattagagacggttgtggagagcgtcgcgttttcgt

SEQ ID NO: 7395 - DNA, 1542 bp, Artificial Sequence; identical to SEQ ID NO: 7394
  Description of Artificial Sequence: Synthetic polynucleotide

SEQ ID NO: 7396 - DNA, 1768 bp, Artificial Sequence
  Description of Artificial Sequence: Synthetic polynucleotide
cgcgtttggagtgggttttcgatatttagggtaagtgggggcggtagagtttttttttcggtcggtatagtagtttttgtcgcggtttcggtttgcgacgcgtttagttttagtttttcggttttcggcgtttgttgagtgttcggcgggagaggcgtagggagcgcgttatcgggaggcgcgggtagcggggattggttttttttcgggttagggttttcggggtaatcgtttttagcgcgtatttttggtgtaggtggaatagttttttgtttcggtagggttttatttatcgcgggagaggttaatttcggatttaaatttcgtagtcgtagagcgggttaaaatcgttattttatttttttttattttttttttttttattttaagataaaaagttttaggtcgggtaggatttgattatttttgtttttttttattgcgttaattttgcgagcgagaggtttcgtatcgaggcggaggttggtaaaggggagtggaaagggaggatggatggggtcggggggtggggtggtgatgagggcgacgaaggagggggtgttattttttttttttttttttttttaaaaaaagtatttttttcgcgagaaatcgttgcgcggacgatatttgaagaggtggggaaaggagggggttgcgggagtcgcggtagagattgtgggtgttataagcggataggagttatagttgggatagttgcgagcggagtcgagtagtggttgtagcggttacgattgggagtagtcgtcgtcgttttttcgggagtcggagtcgtcgtttttttagtgggtgtagtcggggtttcgacgggggtcgggcggttatcggggttggagttgcggttacggaggtttttgcgtttgcgtcgcgtcgagggtagggatagggattggggtgaggggttgtttcggaacgtttatagttggcgttggtttttttttgtttgatagttttttggttcggggtttttggtgtcgggtttcgcgttagatgttcggggggcggtggtatcgttcggagtcggcggggacggcgcggttggtttttagtttggcggagagggtaggttgaggagtggggcgtttagagcgcgtatcgcgcgtaattcgtgtcgttaaaaaaaataaatttagagagttcgttcggggtttaggatcgttggggatatgggtattttgcgtcgcgtttttttggcggggttcgggaggtcgagggatcggtcggggttgttgtcgtcgggggtttgggttttttagttagttgtggattaaacggtttttttttatttaaattaattgcgttacgcgtaggcggcgtacgggttgggtttgggaatggggatcgcgaggttttagtatttcgatgttttgaaagttttttcgtttcggggatttgtttttgtgttgtagttggtaggggtcgtttgaagtgggagtagcgtttggagaaggcgggaggagttcggttcgggggacgggcggcgggatagcgggatttcggcggcgcggtgcgttttagggcgtagcggcggtcgtagatcgagtttcgggcgcggtaagaggcggcgggagtcggtggcggttcggtattatgcgtcgagggcgtttgttggagatcgttttgggatttatcgtgtttttagcgttttatacgagttatggggcggacgttaatttggaggttgggaacgtgaaggaaattagagttagtcgggttaagagaagaggcggtggaggatacgacgcgt

SEQ ID NO: 7397 - DNA, 2656 bp, Artificial Sequence
  Description of Artificial Sequence: Synthetic polynucleotide
cgtataggaattttagtcgtttaagtttcgggtgggcgcgtcgtatttttttaggtattgtttagatagttcgttttttttttttgggcgttttttttagtttggttggggtcggggcgggttgggggaggttttcgcgggtttgtttgatatttgtaaatggaagtgggatttaatttggaaaataaacgcgttagagtttgggggcggagaggagcgggaggaggggagaggggggaaaaagattttaattattatcgcggttttagcgtttttttttttcgtcgcggttgttgtaggttcgtttaaattcgaagttgagttttattgggcgcgcggcggcggcgggatggagttggagttttcggtcgaggcgttaggagtttattagatttcgcgtgttagagttatcggtcgtttacgtttcgggtcgtaggcgttattttttttcgggagttttttttagttttttacggagatttcgtagggttttcgtagttttttcgttttcgacgtttatttcggggatttttttttatcgtttggtttgagtttattattttagcgagttgtagttttaggatgttatcgttagtatatttatatttcgggagtatttttgttttttttatttcgagtaatttaagcggtttttttagttcgtagttaaatttcggttatttttgtatttttgttttaagtacgttttcgttatttttcgtttataagaggagaacggtggaaagtgaataaaagttgtttttcgtaaagtttaattatgtttaatgttaaattatttcggaaagtatatgtgataaaagttaacgagagaggagaggagggaatttagattatagtatagttaaaaatattcgggttcgttattatgtaagtcggggggttagatgtattttagtttagcgatttttattggcggaattttcgcgtttatcgcgcgtcgcgttaagatggtttaggttatttttattgttttttcgttagcgttttttagttttttatatttgttttgtatatatattggtttgtagaggggattcgtttcgaatcgttcgggagtggggtttgagttcggagttggtgtttttggcgttttcgtttttaattcggagatagttttttcgtatttttggggatggttagattcgcgttgttttttttttaaagataagtagtttttttatacgttcgttaaaaattatgtattttcgtaaagtatttcggttttttttttttgttaagatagtagggatagtttttgtttttaattatttcgtaaaggatgtcgtttttagtcgaagagtcgtcgtcgtcgtttattatattttattttgattataagtttcgtaagttcgagttaggcgtggggaacggattcgtagattggtaatttttttttttttttagcgaaagtggaggttgggttttttttttgcgtcgcgtttcgtttagcgatgatttaatttgtatttcggggttttttaagtgtattatttatcggtatttgaatattttttattgcgttcgagaggtatcggttgttaagtaggttcgttatttgaatttttttatttatttgtaggggcggttgggagtcggggatgggtgtattgattcgtaatttttttcgtaatttttttttagatttttagttttaaatttggttaatttttcgtgtaaatttttcggttttcgtcgcggggttaagttattttttttttttgtttgtagcggtagtaacggcggttcggggttgcgcggaggttggaattttataaggtgaaaagttttttttacgcgtttcgtcggttttcgtttttttagtttatttcgtagtttatttgtatttagtagttgaggttgtgtttcggtaggcgcgttttagtcggtgtattaggtagttaaattattacgttataaatttttacgtatttttgttttcgttggcgatttacggttttacgaggcgtttttttcgtggttttttttattcggtgttcggcgtttttgtttcgggcgagtcggtttttcggttgttgtcgtcgtagcgtttatcgcgcgttagtcgggattgaggtcgcgagtagaagcgttttgcgttcgggacgtcgtcgtcgtcgtcgtcgggggttcgtaagcggaggaggggagtcgagatgaagagaatagtagcgggaggagagggacgggaggcgcgagattttaattcgtaggttagtttatagcgtagtttgcggggaggagcgtcggtttttttgtttgtttcgagttgtagtcgtcgtcgttattgttcgtcgtttggttgtttcgggttttttattatagtcgacgtcgacgtacggttaagtttttttttagtttttttttcgcgtttgtttttcgtagttttttttttttaaatcgcgagcgaaaagggcgagggggagaggagtttcggcggcggggatgattagcgatttaggagcgtggcgtaggggagagggggcgcgcgggagggggcggcggaggaggcgcggcgaattggagggtattttcggcgtcgggtttggaagcggttaattttagagttcgagtttttttttagttttttggggttttaggatgatattaacgtatttttttgtcgcggggagagcgt

SEQ ID NO: 7398 - DNA, 623 bp, Artificial Sequence
  Description of Artificial Sequence: Synthetic polynucleotide
cgatattacgcgagtgtgtacgcgttggggattgagttttcgaagcgaagttttgtcggaggagttttaggcgggagtgggaacggttgggcgtggggttagtaacggcgttattcggtagggtggggggagttaggtttgttagagttagagcgcgttatcgtcgtcgcgagagacgtcgcgttgtttaataggtagaggcgttttttagtagtttggtgggagtagagatataaaagtgttttaataaattcggagttggcgtgtcgatcgcgggttggtggcgggcggcgcggtgtttcgcgcgttcgggttttttggtttttcgggacggttttgtatgttgtgcgtttcgtatttcggttgcgcgtttcgattttagcgggaggggacgttcggttcgtaggtttttaggggaggggtggtttttgtaaaatggttttttattttttgttgttttgttttttttttttggtgcgagttatcgagttttacgagggtcgggtcgacgagtagagcgcggaggcggttttggtcgtgtttaatgtttcgtatttttttttttggaataattatatttttttcgattggtagaattttgtgggtaggaggcgttacggcgt

SEQ ID NO: 7399 - DNA, 1967 bp, Artificial Sequence
  Description of Artificial Sequence: Synthetic polynucleotide
cgatgatggaaaggatcgttaggcgattttttaaaaggtttattaaatattcgggttttattgttacgtttttattcgggggcgaggatgttttaaaaatattttttttttttcgttttatgtggataggtcgcgtcgcggtatttacgggtatcgcggaaaggggtataatcggggtggttttcgtttaggtggtagcggagatttagggttaggcggattaggtttggtttttatttttttttttcgggttttgttacggtttcgtttcgtcgttagtagagttttcggttcgcggtcggtcggttagcgtacgcgcgtaggtgtgtttgttaggatgtttttttcggcgacgcgtttaggttcggatttcgcggcgcgagagtgagcgttggcgggggcggtgggatgttttaagtcggcgtgaaagaggcgagagtgggcgagtacgggcggtcggattaggagtattttcggtgattatttagtttttattttattttttcggaaattgtcgggtaggcgggggatcggtcgtagggcggggttttttttggcggtgagtgagcgagatcgttaggttgaagtatcgggagattgttttggtagtttttggtcgttattcgcgtcgtaataaaagtttttcgcggtttttcgtttagttagtttcgtattgattggtcgtcgtgggagggattcgagttggttggaggcggcggtcgagcgttgtttttgtgtcgttcgcggagggggcgtattgggtgttttttggttcgtttcgtgcgttttttaatcgggggtcggtcgtttagggtaggtataacggtatttggagttgcgatcgcgatatatagttttttcgttcggtttttttcgatcgttttttagtatacgtttttcgtttagaatgttcgtttaatttatttagttttttgcggtttttgttttttttttttttttttcgtttattagagttaaagcgtaaatttttgggtggaggtggggggatgatagttggaggggagggtgggtacgtatagaagaattttttagggaggtcgggatggaaatagttaaaatgaaatgtatttttttgtatattgtcgaggttttttgggcggcggcgtaattttcgttattcgcggtagtattattattgttttttttttagttttttattgtttatattttgttaggatcgggaatttcgtttaaagaaaggagatagggcgaggtgtttcgggcggttatttgttatttttttttcgtttcgtgtaatattgggtacgcggcgcgtgtaaagatatacgcgcgtatacgcgcgcgtatatattaggtagttttaattacgtttttttcgtttttcgttttttcgtatttttttttgttaaaacgcggcgttcgatttttttattttttagtgttcgcggtcgagggtaggttttgtaattaattagtaatttggtaaatgaaaaattaacgttatgtcgattggggtgtaataacggttatattaataataacggtcgtgcgattttgtttattttgttttattttgtaaatcgttatttttttggggcgggggaagtaaagtagcgattttgattttattagatttaggaatataacgatttggggcggttgttttagttttattgtttatttttttcggagtcggggttgataagttatttttttttcggaattcgagttcgtgcggcggtattattcgagtcgcgatttttttcgtttcgtcgttcgtttttggggaaggagcgttgtttattattagcgcggtcgttgagtttttaggagtcggtcggttttgtttttatcgtcgcgggcgtataaagtgggaagggcggacgcgtcggaggggcgtcgggcgttggcggttcggggaggtagtttcgtgtagcgtagttttggagggagcggggttcggttgggtagtaagggcgacgcgt

SEQ ID NO: 7400 - DNA, 2558 bp, Artificial Sequence
  Description of Artificial Sequence: Synthetic polynucleotide
cgtttcggggtggggacggaggtcgttaaggttgggatgagtatttagtcgagtcgagttatcgcgtgttttttcgtagatatcggggtttttgagaattaggagggaatagttaaaagaatggaagtttggcgttttgaaataagttttttgggttttgagggaaatttgggcgtttacgggtagtcgttttttttattcgtcgttcggcgttcgcgattcggttggcgttggttgtagcgtttagttaggcggcgcggggaagagtcggcgataattcgttcgagtttcggggatcgatcgcgtttttatatttttttagtttttagcgatttttatcgagatttggagacgattttagtaaatttggggaagtaatttttttcgaggagttagatttttgaaagaaggagagttgagttagggacgagggaaagcgaaagagacggggaggaacggcgatagttcgggcgggttggatttcgcggcgagagcggtaggggaggcggattcgtttcgcggcgaaggggaagtataaaagtttcgtagcgagttgtgggaggaaaggcgagaaggggtttgttcgtttttttttttcgatttagggtcgtgattttttgggagcgatcggttgggttttaggtttttggttagcggcgttagcggttagcgcgttcggtttaagtacggtgcgagcgtttcggggaggcggcgagcgagtcggtgcggagcgtttcgtgcgttcgggtggtttcgcgggtcggcgggatcgtgcgtattttaagcgcgtgcgggagtgtgcgaggcgttgtgcgagttagcggcgggcgcgttagggtgggaaaggtatttcgaacgtattaggtgtagagatcggtatttatcgagagcggtcgggagcgtacggcgagtttcggtgttatcgtcggtttcgtcgagagtcgaggagggttcgtagcgttgtagattttttggagttttttttttttttttgtaaaaggggggtggggattaagtttaattaagaaaaagtttattacgtttttttaaagagaaataaaacgtaagtagttttagttttgttttttttcgtttttagatttattcgttagttttttcgattttagttttttagtcggtcggcgaataaatatataaataaataaattataattttattttgcgttcgcgtatcggttcgtatatataagagtatttacgggttttgttgtttcgttagtttttggcggtataaagttttcggattttcgatttttttgtttacgtttttagttttcgtatatcgttacgttttttattttttatttcgatcgtgttttgaagaggaagggttggggaggtagttgcgtttaggttgatagtcggggtttttttttttagtcgatttttaatcggtggcggcgacggttgtagcggtaggaagggaatacgttaaataaaaaaggtataagtttagcggtcgagtggtcgaagcgagcgcgcgttttttagatttttttagtttcgggaagtttcggcgcgcggcgttcgttgggcggtgcgttttttttcggttttttatttatcgtagtcgagtcgggtattgtggggtgggtgtgcgtgtttgtcggggggtgtgtgtttgtgtcggggaggggtgttgttggggaattgttgtttttcgtattacggcggtagcgatagtatcgttcggtagttcgtagtattcgtttttatcgtttttaatttttttttgttgcgaggttagtaaattattatcggttgttgcgttttcgtcgcgttttacgttaacgtcgagtttttttttttgtaaggtttcggcgtttttttatttttagtgttggcggtcgagttcggttttttgtttatagttgtttttttttttttttttttttcgcgtcgttttcgggtttagttcgtttattatttcgtattggtcgagttcgcgcgcgtttttcgttttatttttttttttttttttttttttttttttttttttttttgcgtttcgcgtttcgggtttcgtttgatatttagttgttgttggggcgtcggcggtcgttttttatcggtcgagcggagaggaaggaaggagttagaggataggagtgtatggggatttagaatttttaataggggaattgagggtgaagggcgcgtagtagtttttatttatttttaagattttaatttgtattggatacgggttttgttttttttttttcgtatttcggtgtttaagtacgtagttttgtttttttttttaatgtttgttttaatttagtgcgtgttatttcgtttttaattttttttttatggttcggggttgtagtttttttgatatttgttttaaaaggtcgtttttttagtttaaattcggtttttttatttttttggttattgcgcgtttttcggtttgagtattcggattttaataagtttttcgaggtagagttcgcgggcgttagtgaattaggtgttagaaggttcgcggggatttattgtcgaagcgagatattcgtttttagttgtcgcga

SEQ ID NO: 7401 - DNA, 2558 bp, Artificial Sequence; identical to SEQ ID NO: 7400
  Description of Artificial Sequence: Synthetic polynucleotide

SEQ ID NO: 7402 - DNA, 1508 bp, Artificial Sequence
  Description of Artificial Sequence: Synthetic polynucleotide
cgttttttagatagcggagtcgggtcggggcggtttggttcgggtcgtcgtttttgtttttgggtttgtggggttggggttcgtttgggtttcgggttcgcgcggcgtttattattcggggtgtcgcgggggggcggggagagcggtcgtttagtttagtttcgcggatgataggagtcggggagtcgaggagggaggagtcgtcgtcgtagtcgagcgttgggttgaggagtagagagagcggggcgtcgagtgcgggcggttgggagcgcgttgagcgggggagaggcgttgtcgtacggtcggttataggattattttttcggagaatagggtttttttatggtatgtggttggtaattttttttttgtttttggattttttatataaaggtgagatttgcgcgggcggttgggcggcggaggcggcggggttagggtggcgcggttggcggcgaggcggggtgttcggcgggttttaggtgcgtgggggaatcgatcggggtgtaaggtttcgggtggggcgtagcggggaggggtaggtattttgataggggtcgagtgagagttagttttcgatcgtttcgttagttattcgcgtttgtcgttttggggcgcgttcgtaggggtggtggtaaaggagttttttatttttttgttttttgtacggcggtagttttgttttggattttttttttagttttttgttttttttttgcggtttggtggtattgggatttcggagtgtttttcgagtcgaggggtttttaggtcgtgatttttgatttaggagtttttgtttatttaggtttcggattcggcggttgattttttcgttatgttcgtgcgtttttttttcgtcgcggattttagttttggcgcgaatgttggcgtatcgtatggcgtttattcgcgtattggttggaggtagggtggggatagtgagagtttcgagagttggaggtttttcggatagtaagtttgttttttaaatttagaggttattttttttcggttttattttatttttttgtttcggttttagtttcggtttggtgcgttatcgtggttatttcgggtagcgcgttttaagatgcgagatttttcgttttcgcgtttggttagttggatttggggataagtttttaggttggggggcgtgttttttttttcggagagagggggttgttaggggtgggtttaggtgttcggtatgtttagatttgcggttggggcgttgcgtatttgattcgcgaggtagtcgggatcgggaggttggaagagggtagatattttcgattgaagttatttgggtattgagtcgggattaggtaggcgtaggtagtttgggttttaggttatcgtagaggacgtgttttcgggcgcgtagatggcgggagatgaggcggtcgaatttcgcgtttttgcgtggtggagtatatacgttttaataagtttagcgttatttgtttagttttttaatttttttttttttcgtttcggggcgg

SEQ ID NO: 7403 - DNA, 1119 bp, Artificial Sequence
  Description of Artificial Sequence: Synthetic polynucleotide
cggtggcgatatggtaggtagtttcgcgtggcggcggtcgggatagttgggcgcgttggtaggagagtaggtatagcgttttttataggtaggatgacgcgggtttcgtagttcgtttttttacgttgtttcgtattattgtttcggttttgacgtgcgtgcgatagatttatcgtaaatagtttttagcgggagtacgaggtcgggataggaggtgggcggttatataggatattttattttttttattttttcgtagtcggcggagtcgatcgtcggaaaagggaggcggtgggcgaaaggaaagcggggagttgggagaggagttgtaaataaagagttgtttttgtgcgaagttttgagtcgggtttagttagttcgttttttgtggtttacgtattgttcgtcggtttacgcgggagtttcgaggggcgaggcggaggttgggcgtagtttttgtagttagtagttattttcgcgcgtttcgtcgcggtttagttaattatttgttgcggcggcggtcgtgttttttagggtgtattagtattttcgtcgcgggcgttgttttcgcggcgtcggtatcgatgttcggttatttttaggttcgaacgattgcggttgcgggaaggcgggtcgaggggggttacggtattttagggagaggtcgggagtcgttcggatttcggaggggatggggttttttttgggaggtattcgttttttttttgggttttaagattttttttagttttgcgtttcgattttatttttttcgaaacgtcggggaatcgggaaaggagggttacgggtaaagcgggggcgggcgttttttgattagtatgcggcgtcggttgttcgggttcggattttcgagtttttttttcgcgagcgtatattaataagtttataaatggaattcggtggcgtcgtttgtaataaaaggtagaagttgcgtttcggcgttttaatgagagtattttttttcgtaataaggggttggatttagttgtttggtgtcgtttgagcggggcgagttgttagagtaattaaggtttagcgcgtacgtggggagagggagttggttggggttttagcgttagtcgtcgtttgcgcgttcgg

SEQ ID NO: 7404 - DNA, 1119 bp, Artificial Sequence; identical to SEQ ID NO: 7403
  Description of Artificial Sequence: Synthetic polynucleotide

SEQ ID NO: 7405 - DNA, 653 bp, Artificial Sequence
  Description of Artificial Sequence: Synthetic polynucleotide
cggaagtaaggcgggttagttatcgtttcgagttaaagtttttgtagttttggtaatttttcgcgcgtttttgtttaggagttttatattttagagaaatttttcggcgtttttagtttcgttgttttttttaggttttgggatatagttttaagggattgagcggttcggacgggatttgaaatttttggaggattagttacgttcgtatagttcgtttatgcgcgttggtattaggattcgtaggttgttagcggcgagttttcgtcgcggttttttagggtattttcggagaagggggcggttttgaggaattttttgtatttcggatgttttatttttttcgtttttagcgttttagggttttgttcgggttttggtcgcgcgtggtgttttttttagtcgcggagttttgttttttagtgtcgttgaaaggaaagagaaagaaaacgttttcggttttggaggttttgtttttttttgaagcgatgttattttttttttttatttttttttttttagattttttttggggtttcggtagaggcggggcggttgcgtttcgagttttttttcggcggtagcgcgggagcggggttggaaaagagggcgtcgggagtcgtttcgttttttatcgtttttggttttttcgt

SEQ ID NO: 7406 - DNA, 1768 bp, Artificial Sequence; identical to SEQ ID NO: 7396
  Description of Artificial Sequence: Synthetic polynucleotide

SEQ ID NO: 7407 - DNA, 1101 bp, Artificial Sequence
  Description of Artificial Sequence: Synthetic polynucleotide
cgttgcgaggattaagggagatggaatgtagcgtaaagttttacgtaaacgtgtcgtgtaatatgaagttttttattttgagttggggagcgggtggtacgcgtggaagttgaatgttattatttttgggattaggcgtagcgttttttagaagcgtttttggtgacgggtttttgtttttttttaggacgttttttttagaatgtttcggggttttggacggttttggagaggacgggagggaagggaaggagacgggcggaacggggacgtatttgtttttattgtatttttttcgtttttttatttttagttatttgcggaggaggaagcgttttcggcgcggggacgcgttgggtgtggagtagttggattacggggtgttttcgtcgttggagggcgtgatttcgatggacggtagttgtaggaattttttgtcgggggttaagacggcgggtaggtttcgggttagttcggtttttaggttttgtttttgtacgttttttatgcggcgtattttgaagcgtcggcggcgaagcgtgggggtcgacgaattggattagatcgggttgttttcgggcgtattttgcggttcgggtatttgtagggcgggtagcggtcggttttttattatgttggtcgtcggtatgggggtcgtcgtttttgcgttttttttgagtttttcgttagcggtttggttcgcgtttttttttggttgttttttattttcggtttcgcggtatattttttaattttggggtcgaaggaataagtttttttttcggagcgtagcgaggaagggacgcgaggggacgcggcgtagcgcgtcgtcgttcggagtttaatttttcggagcgcgcgtttttcgggtcgttagtcgtcggcgaggttattcgggaggggcgggagtcgtttgttagttattcggtagtttttttggggtttttttcgcgcgttcgtttgtttttttttcgttgcgttttttcgtttgttggcgtttttgttttagcgggattcggtagttaggggttttagggggcggtgtagtaaatttttagcggtttgcgtttagtagattaggttggggagtcggtttggcgt

SEQ ID NO: 7408 - DNA, 1101 bp, Artificial Sequence; identical to SEQ ID NO: 7407
  Description of Artificial Sequence: Synthetic polynucleotide

SEQ ID NO: 7409 - DNA, 2341 bp, Artificial Sequence
  Description of Artificial Sequence: Synthetic polynucleotide
cggtttttgtaacggaggcggtttcgaaggacgtaggattttttcggaggcgatagttttaggagttttggttttggagtcggcgtacgtttaggcgcgaagggcgggggttcggggcgttagggatttgtgcggacgggggttggggaaggtttttcgtcggagaggcggcgaggtcggtttaggagtttcgcggagtcggcggttttttagcgtttagagtcgggcgattgagtgtcgagaggaagggaaagcgttgatatgtaaataggggtttttatttggaggagttcgtttagatagatttttcgatatatttatttgtatttttattttcgtgtaacgaggttatttatttattttagggtttattaggtagggattcgagttcgggcgattgtagttttcgttttcgtcgtgtttcgtttttgcggagaggaagtttagtgtttagcgttggggttacgggagtttcgggtgtcggtgggagtggtggatttcgaggtttttcgtttttgatttcgtttcgtattttggggtttttcggtttttcgtcgtttttttttgtagtttcggcgggtagcgaggtgggaggggggtcggggttttattttgggggttgggatttcgggggagggtcgtttttaatgcgggcgtttggtcggttggttcgcgagtaggattcgttattcgagcgtcggaggagtcggcgcgaagtcggggcgcggagggaagggagagaggttacgtttttcgggacgcgggtttcgtatttattcgttcgtcgtttcgttttttcggtcggttttcgtcgttcgcgttcgttgtttcgtcgtttattttaatagtttcgtttatttggttaagtttgtagtcgagttttttaatattttatatattgattcggttatagtttgatttcgtagttttttcggattagttcggcgcggtttttttggcgttttgggttttttttgcgtgttttttgcgagcgttttgtttttatttttttgtgtacgtttgttgttgtagcggagcgaaagagatagttaatcggatgaaattttttttttagttaattttgggaagtgattttattttgcgaatcggggaggaagttttatttttttttttttttttttttttttttttttttttttttttttttttttttcgtttcgagtttttttttttttttttttttttttgtttttttttgttttttttttttttttatatttttttttttttttttgttggttttgtttttcgtattatatattatataaatatacgcggagatgtttagatatatttatgcgttgcgtatataggatatttgtttttgggagataagagttagtcgggaataatgacggggtttacgtttagcgttcgcgttttgattttcgaagtttgaatttttttttattatttttttttaaaatttaaagttaaagatttttggtttttttgttttttttgaggcggttggtcgaaggtggtttttttgatttatttatttttcgtttttttttatagatacgtttattaatgttttttttagtcggagataaattttttgggggtggggtagggggggtatggagggagagttggttagggttgcgggtaatttagcgtttattgtcggggaagattcggacgaaaatcgaggtaaattaattattaaaaagtgtatttaataagaatttttttatttaggtttttcgttgtcgagacgcggtagatttttagagcggtttatttatttatcgaagcggattttgggcggtttcgggttgattcgcgttgttagggcgcggattttatttcgggcgtattgttaggagaaggggtttttcggggcggcgcgtttcgattttgggttttcggtgttcgtagagggcggagattcgcggcgttttaggttatttattcgtattttttcgagttaaatttttagcgtttattcggattcgacggtttaagtattgatttttaggtaagagtcgttttttttggtttttagggaattgatattatcgcgggacgttttttttaggatagttagtaggttttaggagcgtagtacgtaatagcgtagagtagatttagatttttttcggggtgagattcggaggttcgcgttttggatcgttttttttatttagtttggaggtcggcgtttttcggtttaattcggagattttttcgttttttttttgggtcgtcgcgcgttttagttggagtagtttcgaggggttgggttttttcggtcggatttttttttttcggatatttaaaataggttattttgtttacgtttttcggattacgt

SEQ ID NO: 7410 - DNA, 3857 bp, Artificial Sequence
  Description of Artificial Sequence: Synthetic polynucleotide
cgagtagaaattatcgtgtttttgggggtttttcgggcgtcgtggggcgacgcggtgtagcgtttagggtcgtcgtaggtcgggggtagggtttttagcggttttttcgcggttagcggttacgtaggaaaaattcgttttttcgtttttgtatttgttgataagtcgttcgaggtgtttgcgttgagcgtggttatatcgatgtagttttttaggaaatggttcgggagggggagggggcgagtgagggattaggttcggttttttttcgttttttttgcgtaaatattattattttttttttttttcggaggtatgaggtttttacgttcggtttttcgttcgtattttcgtcgattttttcggtttcgcgttttattcgttaggttttttttttgggagtcgattgcggtgaagtcgtcgttagtacggtcggttttgatacgtgttttaacgtatgtttgagttaaggttgtttttataggagatacgatttggtggcgtttttttattttttttttttcgttattttttatttttatcgcgttttttggtgtattttattttaggaggaaggggagagattagcgttttgatgtgttggttaagttggtacgtgtagcgggtatggcgtggttcgagttttttgggtatatcgaggtcgattgagtgttttttttatcgagagagggggttcgggtaggggcgcggagagttagtaaggcggggtggggcgcgggttgggtgagtcgtatattaggttttttgtaaggcggaggaggggagcgaataaattagaggtgtaagcgattaatttaggtttcggagttagtttttttaaacgagggtggggcggaaggggtggtgggggggaaaggaggggatatcgttttaaaagggtgaggaagagtttggggcgtcgttttttttttttttatttgtatagttaatagttttggggtttttgttattgcgcgttgattgttatcgggtagattattttttttttttttttttttttttttttttagtaggacgcgttttttattatattaaaaggaagttaagggagggcggagggagagcgggcgttggggcgggcgaaagttggggagaggttcggtcgttttcgattttattaatagtagcgggaatgagtattttattttttatatgtaaagaaaggggagggaaggggcgggcgaggaaaatgtttaattgttgtggaagttattagtttttaggaagaaaaaaagttcgttgaaaaatttaagttgtaaatttaaaatgaaatagtttagcgtcgcggatgatattcgggtcgaatatcgtgtatattcgtatatagtcggtttcgaataattatttattggttttagttacgttgggtttttcgatttaagtttttgagttatttcggataaggatatttatttatattttaagatttttataagggaattattttaattttatttaagttatttttgagcggattaaagaaagttgtagcggggagaggcgagagaaggagggagggcgggaggtatttttaaagtataaatttaattcgataggtaagggatagaggtcgtcggggtttttagtttttggatattatttgatatagttttgcgagtaaggttttttttatttcgatttcgtatattttttttttttcggggaaaggtatttagagttttgggtttttcgaagtgggggtagcgggggcgaggaagaagcgggtggtcgtttcggggtttagtttatttcgaggagaatgtttgggtggcgagtttttacgtttcgggagtgagtcgagggttttttcgttttttttttttttttttttttttatttcgttttgttttatagagaaattttagcggggaggggggtagcgaatgggaggggtagagagggtcgcggtcggatgtttttttttttcggcgttttttgtatttatggagattcgtaagttcgggcgtttttcgcgtggtaggttcgttttttgaagtttttttgtttattttttttttcgattattgattgttttcgagcgtgaagttcgttatcgaatttaattttcggtggttttgtagatttttatacgtggggtggggcgtgagagggtgcggaggttggtaggaatgtttttaggaggtttggattggaaattgagtttttttttttggtcgttattttagttatgtgttaaaattttaatgttttgttaaaatgtattttatttagtacgcgggaaaacgtatgttgttttttaggtaaaagtgtatatttttttttagtgtagatttcggttttaagaaaaagcgtaagagtttgtgttttggttttgaagtttaaattgattatcgtggcgcgggggtggggggcggcgggagggggtagattgttggtttttttttattttttttttattttttacggaaaaaaaaatatatatatatatattttatgtaggattggtgataaattttagcgaacgttagttttattggatttttatttttttttcggtcggttttttattttttacgttagcgttttggagtttcggttggaaagtgtataaagtttggaggtggagggtgtagtagggtgttgggtgtttataggtatttttttgtaggagtttgtagtattaagtatatatatttttaagtttatttggaggatgttttttagttaggtgatttcgcggtcggtttaaggttcgggagtagcgcgagttcgagtttcgtttttttcgcgtaggggcgtttaggttaggtggggagcgggtagtgattgagtttaggtttagaaatgggagttattgtttttttttcggtttttttaaagagtggagttgtgtttgtgttttttcgtggagggatggacggttaattaaaatcgaaaattcgattggtaaaatgcgaggggatatataaattcgaggggatatataggaggtatattaagaggaaggagggagtgtaggtaaagtagaaaaatgcggataaggagaagaggaaaacgtcgggaagcggagagtacgggggagtagggtgggtggggacgggtagtgcgattgtaggtgtttattcgttttcgggattttttggtcgtagtcgcgttcgtcggggcgttgggtcgttgcgttttggaggggggtagagttcgttaggtttgtgtattcgtatttttttcggcgaatttcggtttggacggggttggattattgaggcggtagatgcgataggcgtgagttaagaaggcgagcgtttgtcgtttgttatttatttagtattttattttttttttttcggaaaaaaaaaaaattaaaagattcgaatttttttttttttttgtttgatttagtttaggatacgttttacgcggtcgaaaatagttttggaaatatatttgttttataaaagtgaattttttaataagttttggggcggggggcgttcggcggtcggcgtcggggggttttgtttttcgggaggagaaggaatcggtcgttttcgtttttttttttttttaggcgttttcgggagggggtcgttgggcggcggaatcgcgttttcgttcggggagttattacgcggttttttcgcggaattttgacgttatttatacgtgggggaaggggttgggagagtaagaggaagcggcgggggagggggtcgcggttgggagagcgcggcggcggcgcggcgggtttggtattttcgcggtgggcgtagcgtcgggtagggttcgggttttgggtagcgcggtagaggaggtcgtgtcgcggatttcggagttagcgtcgcgattcgttttttttttcgtttttcgtttttcgt

SEQ ID NO: 7411 - DNA, 1439 bp, Artificial Sequence
  Description of Artificial Sequence: Synthetic polynucleotide
cgcgggttttttcgttaagcgggacgtcgcgtcgggcgggtgagagaaagttcgggtaggagagtatagagtcggcgattggacgcgagcgcggggcgggtggagagcgttttttcgggcgtcgttgttgttgtttcgggtgttgaaaagtcgggaatttttcgggaagtagcggtatttttttttttggaaggtgggtgtgggggttttagattgcgtatttgttaaatttttttgggtttttcgggaggggttcgttagatgtgtttttttttagttttattcgggggagaaggatgggggcgggggcgtgggggtgagtatagtcggatatcgtaagtgggaatttggggtgttttttttcgtagttttcgggtagtcgcgcgtcgcgaatttcggtttatttgtaagtaaggcgggtcgggggtagagggcgtcgggttgtgcgggggaatcggttcgcgtttcgggattggggggcggtggaagagagagcgagcgggtatgcgtagtggggcggaggaggtggcgatggtcgggggaggcggggggattgttgtttatttgtagttgggttaatttcgcggcgtaggcggcggcggagcgcggggagttcgcggcgggtttagttgtcgtagtattatgttcgagttttttttcgggtagacgtcgcgcgtcgtcggggtttcggtaggggaggatgttagacgttcgggagaggttagggtagtagcggcggcggcggcgcgatggtggtgattatttttgttcgaggcggcggcggggatcgtatattttttcggcggcggggttgcgggttagcgtcggtcggggtcgcggcgttgttggtcggggtaagttgtttgtgttacggtcgttttttgtagggcgagttcgtgtacgacgacgtgtgggcgatcgtgaataatttcgacgtgcggttcggcgtttcgtttcgttggggtatttttattaacgatttttggggtaagggtatggtcgagaatattagttataagttttatcggtcgttttgcgtttttatttttaagtgagttttttatttcgcgttagtcgtcgttgttttttttatttttcgttcgtttttcggatcgggagaagttgcgggattgatttgggggtattttatttttgtcgttttttttttttacgttttttttttttttaggatgtgtatggtattttgtttcgggatttattgttcggttaatttgggttttcggggcggttcgggaggcgtcggttggggagttgggatcgagttttttaattgtttgtttttttagcgggtttttttttcgaggtagggttgggagcgggttggtgaaatcgttttcgtattttttcgtttgtcggatcgtgattaagtgggattagcgcggatttagagggtttcggaggggtggcggtggtggcga

SEQ ID NO: 7412 - DNA, 1288 bp, Artificial Sequence
  Description of Artificial Sequence: Synthetic polynucleotide
cggagagggtttttcgggttaattttgggtaacgatgagtattttcggtttcggtaggggcgtcgggtcgttcgtttttttttttttttttttttgcgagttttttttttagaggacgcggggagtcgggtttgcgcgtttcgtcgtttgttatttagcgttcgcgtcgggttgcgattggacgcgtcgtcgttaggtattcgttagaaatattagtgcgttggggagaggaggggggcgtgtttgcgagtcgagggtttgttttggtttttttacggtttttttttttttttagtattttatgtcgggtttttagttttagcgcgtttcggttcgttcgcgcggcgggagagttggcgtaaatttcgcggtagtcgtagttttttcgcgcgttttttttttttttacgtttttcgttttcgttatggggttaacgtggggtttttaagagttgtcggtttttagcggcgtaatttttagttaaagttatcgcgggcggattatggtttagggcgttagaggggttagaggtacgggaagaggaaaagacggttaattgggaaaaaaagagaaaacgaaagaaaagttaaacgatgagtttttataaggaggacggagtgaatagtttgtgttagaaggttttgtatatcgttatcgagttgtgtttcgtcggttaggtggagtgggagaagtgttcgggtattttttttcgggataggggtagttagggcggaagtagtataggtaatcgggagggtttcgttcgcgttttcgcgtttcgttgggatttcgcgcgttaggttgtaagtttcggggttttgcgtttttcgcgtcgttttcgcggtatatttggggcgttacgtttttttatttcgttttttttttcgtttagtttttgacgatttcgagggtggggcgtttgggttttgtttttttttgtttatttgtcgggttttttttattttttggttcgtttttcgtttttcggcgtcgtttttcgtttttagtttcgtcgcgttttttcgcgtttttttacgttttttatttttttttcggagtggagaagtgagtgcgggcggtgacggcgtcgggacggttcgcggtttggttgtttgtgggggcggtttatttgtgggattagggttgttttcgttcgttttatcggtcgttggtttcggttttgttgatgggggttaggcgggacggataagttatgtttggacgtagaatttttttgtagaggtggttgttttggttttcgaggtaattcgcggttgtaatttgtcgg

SEQ ID NO: 7413 - DNA, 1006 bp, Artificial Sequence
  Description of Artificial Sequence: Synthetic polynucleotide
cgagttcgggtttttacgttttatttggtagggggcgcgcgggtttcggagttgtttagtattttttggttaagttttttgcgtttttcgcgttcgggaagtttttcgcgtcggggaagttttttagcgtttcgttttcggtagggaatttttttattaggatattcggggttttttaggttcgttattcgtttttattagtttttatttattttgtttagttttatttcggtagtgtagcgtgttttggtggttttttttcgtacgttttggagggggagtgttttgtatttcggggttgtttcggagtttagtgtacgagtgtatatgggttttttttttttgtttaaagggtaggcgagcgttattcgttttagttttgttttttgtagttgggtggtttttttttttttttgttttttaagatacgcgttcgaaatcgaggggtgagagtaaagatcgtttattaatttagtattttggatttagagtttttaatttcgaaaggaggttggtattgttcgggttatcgagagagggagggagaagagttgaggttgtaacggtttttgggttttttagatcgggtttggtatttaggagatcgtgcgggagatcgacgttgagcgtcggtttcgttttcggcggttttttttttttttttatttcgtttttttcggttcgtttttttttttttggaggagtagttttttcgcgcgtttttcggagttttttttattgtttttgtttttataataggttcgggcggcggggaagacgggggggtgcggggtcgttttagttcgggtttttttggggtcgttttttttttatcgggtgtgcgagtttttggttgtttttattcggttcgggagttaatttttcgacggagtcgcgtcggggcgagttcgattttttttttcgggtttttttcgggtcgcgttgtcgtttcggttttgcgtgtgggaatgatgtgcgtattggagggtttaagttttttacgcgt

SEQ ID NO: 7414 - DNA, 1185 bp, Artificial Sequence
  Description of Artificial Sequence: Synthetic polynucleotide
cggagagttagggttcgtttaataggagtacgcggagatattttagacgatagcgcgttttttttatttttatttcgtttttcgggcgttttaggttagcgtttattagattttacgtttgggggattgtttgggttttagcgagagtgttacggttttgtacggtagcggggaggtggcgagcgcgttcgatttacgtcgtttttacgtttatttttttttattacgagttttttttttttgttatagtattatttttattgttggtcgcgtttgttattttgtggggttggtgatatgaatggatgggttggatatatttttcgttcgtttagaaaaaaataaaaaataaaaaaaaaattcgtttagatttgtatagagagggggaaagatttttttttgcgtttttagagtttacgttgtcggttagagaaatttatagttttttttttttatatttattttttttattttttaaaaaaacgtttaacgtaaataaataatatcgttttaagttcgtcgtcgtttcgggtggttttttttttttgtttggtttcgcgcgttttagttttgcgggaggcggcggcgagaagttgcggttttgggtgcggtgcggggcgttcgggcgataggcgggcgtaaggcgggcgcgtagtagatcggttggcgtcgtattatgttttttagcgcggtcgtagtttacgtcggtgcgtattgggacgttgtggtttttttcgcgttttttaattttttcgttgcgttcggttttggtaatttgggtaagagttttttgatcgagaatttgttgcgggtcgggggcgttttaacgtttaggttgtagtcgttcgcgttttacgattcggcgatcgttttggttatcgcgggcgcgtagtttcggtttttgtttgttagtttagtttttttaaagttgtgtttcgtagtcgaataagttagtttcgtcggggcgttttacggaacgcggtgggttttttaagtgtttagtttttttgcggatagtgcgaggttgtcgggtcgggtttcgggggatcgagattgtattttttagtttttagcgttaggtgagttagtttttttttttttttttagtcgcgttcgcgtttttaggtcgggtggtttagggatttgggagcgtcggcggtgcgtattgcgtttagggagagtcgg

SEQ ID NO: 7415 - DNA, 409 bp, Artificial Sequence
  Description of Artificial Sequence: Synthetic polynucleotide
cggttttggttttacgcgggtagcgttagttggtcggtgttacggagttttcgcgtttttcgttcgtttagttttcgcggatttatttattggggttgtttcgtagcgcgatttttttttatttcgggggagggttaagggcggcggtggggggcggggtgggggggaagcggcgggagggggcggtgcgtcgtcgttttatttcgggttcgcgaattcgtagcgtttttcgtagtatttttttaggttcggttttttttttttttcgcgtcgatggtacgcgtcggttcgtttggttcggttgtagtggatgttgttagaatttacgcggaggaaggaagagacgtaggtaggttgcggttatttaagcggttattcgggttttagggatttttttttcgagagacgg

SEQ ID NO: 7416 - DNA, 1813 bp, Artificial Sequence
  Description of Artificial Sequence: Synthetic polynucleotide
cggggtcgttgcgtttttttgattattgacggttaggacggttttagtttcgttttatttgtaagttttattttaggttcgagttttcgagggtagggatagtttttcgggtttcgaggtttgattagagtttgaaagtttttgtcgggggttgtttcgatttagcgaggcgttaggttgttcggcgcggttgggggcgtttagcgtcgggattttagttttgtttcggtcgttcgttggtttagtgcgtacgtttcggtagtttagtttttttttttacggcggtaggagagttttcggtatttgtttggggcgggggcgggggcggggcggggcgggcgtcgcgtttttttgtttgattggtaggaagatagattaatcggaggggtttttcggggggaggggcggtgtcgtgtttgagtcgggcgcgggcgatcgagggagttgtagttattcgcgtgcggtacgcgtcggtcgtttgttcggatcgcggttattagtgtcgcggtttttcgattttcgtttcgtcgagtcgcgcgcgcgattgttattttttttaattgttttttacgattttttttgtgtatgtatttattttttgtttcgttttgttttttttaaggcggtggcggcggcgatagcggcgtaagttcgtagcggggagggggcggtcggaggatgcggcgcggggttgcgttcgttacgttcgttgttgttgttcggttcgggtttgagcgtcgagtaggtgggtataggtgcgtcggggggcgggaggcgagcgttggttagagggaattcgtggattcggcgatcgaggggcggatttggcggtaagggacgcggcgatcggtgtcgtttcgttttatcgtttatttttttttttttcggttatcgcgttttttttgggttttttttttattttcgtattttattttagtggttttttatttttttatatttattttttatttttttttagatttttttgtaaaattttttagtcgttgcgtcgttttttttaatattttttttcggtttcgtttttagtttttagtttttttttacgttatttttatttttattttttttcggatttcgtttttaagttaaggagcgggagggggatttattcggtgtttgtcggagtggcgcggggggtgtggtcggttcgtttttttcgtgtttttcgtagggtaggttatagttttttagattttcgtttaggtggtaaagaagatggagttgggggtcgcgtttcggcggcgcggggttcgaaggcgaggtcgtttagttcgtattttattttacgtacggtatacgtcgtcgcggtttttgttacgtatattttcgcgttgtttcgtttacgtgggcgtcggggaggaggttcgagagatgggaagaaaggttggtatttatttttttgtcgggtcggcgcgttttgggcgtattggttttcggagatggcgcgtaaggattgattttcgtggtgttagatattttgtcgggcgttttgcgtcggggttagcggtttcgttggtttgcgttagtgcgttgcggtttcgttttttagtttttcggtttttcgttttattttttttgttgtgggtttttgagtattcggtttgggtagtttagatagaggtcgtttacgaggttggcgttttttttcgttttagaagtatttcgtttttatatattttagttcgtcggttttttgaaggttgggttagtttcggtttttcgttagtttttgttcggttttttgagttttagcgatattgtatttaatcgttagttttttttcgtcgttcgt

SEQ ID NO: 7417 - DNA, 1294 bp, Artificial Sequence
  Description of Artificial Sequence: Synthetic polynucleotide
cggttggagaagttttcgttagcgttgtttgtggttagattcgttttttgttttttttcgggcgtatatatacgtttatttagatatttcgcgcgttttttcgcgtttttgtttgttcgttcgtcgtcgtttgtttttttttttttgttttcgtcggtcgttttttttttttttttttttttttttttttttttttttttttttttttttttttggtattatagagttgttttgaaaatagaagatagagggagtttcggagttcgttatttttagcgatttttatattgggaaaaaatatggagttagtttcggtagttttcgatttcgtcgttagcgagttaggtagtagcggcgcggacgcggtcgtcggttttagggagatttcgttgaattaggaattcgttcgtaagagcgagtcgtttgtttcggtgcgtagatagagttattttagtattagtagaggtaggaggttggagaggggttggggagggggcggcgggagttcgggcgcggagcggggggcggtcgggagcgggcgttcggggcgcggggttcggcggtcgcgcgcgagtttgcggcggcgtttcgagttcggaggattttttttttttttttttttcgttttttagaaatgttgtaaatttttgtagttcgttttcggtttgcgggagtagagtggggcgggggaggcggcgggaaggttgatagtcggcgggtttatttttttggttttgatttttttgtaaatattggaggaaagttgcgttgttttaattaaatacgtttttttaaaatacggagatgcggggagtgggggttcgggaaagaaatttttaaagcggtagtgtttttttaagaaggggtaaaaaaatttgtttatggttatttttttttcgttttattttttttttttttgatagtttcggttttggttgttcgagtcgggggtgtgttttcggttttttttagatttgggcggggggcgggaggagtgagcgatttgggaagtttcgggggtggagagggggcgtttcggggtttgggggcgacgtggatattttttttggagtacggcggtgcgtttgggatttgaaggaagggtcgaaggaagcggggtgcgggcgggcgagttgttcgttaagttgtttggcgggcgcggcgaggggagatgcgtaagtttgtagatcgggggttcggagttcggcgtttaggttggcggggggcgtgtgcgcgttaacgcgtagagggcggcggttttgtggggcgttttacgcgtattcggagggagcgt

SEQ ID NO: 7418 - DNA, 939 bp, Artificial Sequence
  Description of Artificial Sequence: Synthetic polynucleotide
cgtcgtaaggttatgggtcgaagtggtgtaggggcggcgttcggggaagcgattggtagagttgtgcgtattgggggtgttgtaggcgttggggagagtgtggagaggttgcgtggagttgcgcgttcggggtgggggttgtatttttaatgaagcgcgtgaagggtaagcggtgatgggttttgcgttagtggggttgggagttcgttcggggttgtatatggggttgcgcgtaaggtgaggattgcgtatgtgggtttggggtttgcgcgtatcggaggttgtaggcgttggggagggtgtggggggttgtgcgtggggttgtttttatcggaagttgtacgttttgggaagcgtagaggcgggggtgttgttcgcgttggggagtacgtgaggggatatttagggattgttcgcgcgaatggtttttaacgtatgcgttttattttatattttatagtcgttatgacgatcgggaggttcgtaacggttgcggggataagttcgttgaggttgttaggcgagttaggtttttttggatttcgtttgattcggttgggttgtgtttgaaattgatttagttttattatattttttgattatgagaaaataaggagtaagtttaaagcggttgtaatttttcggtcgtagttagtttaaggggcggcgcggggtttttttcgttcgggagtcggaggtagaggaggagatggaaaagtcggttttaggcggcgggaaattgttaaggggtttttggaggtttttttcggggaggatttaaagtttgaaagagcgaaaaggtttggagttagaggtggtggttaagattttttttttcggttttttttagttcgttcgtaattttttggcgtagtttcgggaaaaggtgtaggaattgtaggcgcggcggttttttagtagaattattttcggtatcgg

SEQ ID NO: 7419 - DNA, 939 bp, Artificial Sequence; identical to SEQ ID NO: 7418
  Description of Artificial Sequence: Synthetic polynucleotide

SEQ ID NO: 7420 - DNA, 899 bp, Artificial Sequence
  Description of Artificial Sequence: Synthetic polynucleotide
cggtttttgagggttcgggtagttattcgtattttttcgttacgcggagaaagtcgagtatataggtcgtagggtgggggttcgcggggagagggtggaagtagcgggtttttcgcgtttggggtggtcgttgttttatttaggttttcgtttgttttttatttttttagattaatcgttttttgtaggtgttaacgcggtgtttcgtattaggtggtacgcggattttttttagagtttttcggtttagacggagttaggttaaggtagaagcgcgggtagtttcggcgttattttatagcgttttatttgtagttttggggtttttattcggttttagggtgtatagtagtcggggcgcggttcgggaaatgtagttgcgttttttgagtatattgtttaggatggtgtttacgtcgtcgttttgtcgttttaggtattttttttcgcgttttagagattcggttagtttgttttgtcgtattcgagagcgtttcgggttttggtacggttatcgttcgtttcggttttcgttattttattcgttgagcggttgagttcgcggagttgggtgagtgtttgcggttgatcggttcgtgggagtagggagcgtatagtcggttggtgttggagggttacggggatttacggggtatcgcgggagtcgtcgagcgtagggaagttagtaggtatttgtagtgcggagtttgtaaggttgaggtaggagatcgttcgaggcggggagggcgggagcgagcgagcgagcgagcgcgtgggagacggaggcggcgtgttcgtttttaatttcggtatcgtcgtgcgtaggcggggtcgttttagttttttcgtgtttagaagcgttagagatagggagttagtgggcgcgtaattgcgttcgg

SEQ ID NO: 7421 - DNA, 899 bp, Artificial Sequence; identical to SEQ ID NO: 7420
  Description of Artificial Sequence: Synthetic polynucleotide

SEQ ID NO: 7422 - DNA, 547 bp, Artificial Sequence
  Description of Artificial Sequence: Synthetic polynucleotide
cggcgttttggcgaattcggttattttagttttttacgtggtgagtatttagggtagcgggtcgatttttcgaggttttatatttgggtttgaggggcgcggttcgtagcggcgggtgtaggggcgattgttagtttttatttcgtttcggggtgcgttcggaggtcgatatttggaggacgtttttagttttcgcgggacgttacgtttgcgcgttagggattcgggataagaagtgcgcgtcgggtttcggttgcgcgtcgcggggttattagtttgcgcgtagggtttaggcgatcgtgcggttatggatacgttacggggtatcggtattttcgtggtgtgggattacgtggtgttcgcgggtatgttggttatttcggtcgttatcggtatttattacgttttcgttgggggcggttagtagatttttaaggattttttgatgggcggtcgtagaatgatcgtagtgttcgtggcgttgttttttatcgttagttttatgttagtcgttattgttttgggtatttttttcgaggtttatcgt

SEQ ID NO: 7423 - DNA, 2505 bp, Artificial Sequence
  Description of Artificial Sequence: Synthetic polynucleotide
cgtttcgtttcgtatcgggggcggaatttcgcgttttcggatttgggatagtattagtagcgtgaaatacgcgtattcgagtgtaggagtaaataggtaattttttgttttggttatttttagttcggtcgtttttttagcggtttgggatagtagcgcgtggttgggaagacgcgggagggggacgcgaggtaaatttgcgttaagagttggttaggttaggtgagagggagtggtattcgcgtagatatttatcgttggcgtttttttcgtagattaggtgttggtagggttgtaggagattttagattttcgagtcgttgttgatcgtgtgttttagggtttttacggtgaatttgggcgtttcgtggagcgtatggtggtggtgatggtggtggttggcggcggttgtcggcgggattgcggcggtcgcggcggtcggcggggcgtaatagttgttgttttcgttggcgttgttggttgcgttgtaggcgtcgtcgttcgtcgtttttttttcgggcgtttttcgttttttattcgtcgcgggggtcgtattagggttcgagttcgggtttgggtcggagttcgagtttgatttagggttattgtagtttcggggtatttcggaggttacgattcgcgagtagatgtttcggaagaggttttttatgtaggttgttaggtagatggcggcgtgttcgtggatgcgtagcgttacgcggttgtttattatttagcgatatacgcggtttacggagaaggtgaggtcgtagcgggtcgatttgtcgcggtttaggcggtcgtcgtcggcgttgtttatgttgtagagggatagtgcggttagcgtagtcgtcgtatagtgcgcggttaggttttaggatagtacgatttttatggcgttttggatttcgtatttggtgtatttggcgaagcgtaggtttaggcgttgcgtttttttggttatgcgtattagcgttcggtttattagcgtcgatagtttggttagcgcgtttttgggtaggtcgtcggggatcgtcgggtttgttcggggatttcgcgaacgtagtagtagcgtttttagtttttggagagtttaggggatttcgtttaggttcggtagtagtcgcgagtagtgttggtcggcgtagtttagtttttcggagttttttattagggtagtgttgatagtgttaaagttgttgtgtcggttgtgtatggagttagttagaggcggttagtagttttcgttatacggggacgtcgggtgcgagtcggaatagtataaagataagttggaggagcgtatcgagttcgtcgcgttattataattcgagtttagcgttagattttttagcgtttttattacgggttttttattttttttggttatcgttgcgttattttatgttgtagtcgtttgggagttaaagggaaggagcggcgaggagtagcgagtgtcgcggggcgcggggagagtcgagttcgcgtcgttttggtttatttttttattagtcgttgttattaattgttagtattttcggttgtttttcggaattgtcgtcgttggaatatatagagtagattttggagttattttttagagttcgggtcggagttgggcgtaatggggagcgagttaggtcgggaaggaagttttcgtcggggtttgttttttttttttaaaataaaaagtgtttagatcgtttttttttgagtttcgttgggcgtagtagttatcgggcgtcggttacggtgttcgtgggattgagattattttagatgtcgtcgtcgtcgtagtttcgcgggtagttggttttcggttttcggtttttagttttcggttttggttcgttcggcgttagtttgttttgtatcggagcgtagtagcggtcgtggcggttgtaaattttgtcgaattttagtaaatttcgggtagttagtgggacgggcgtatgtaaagtaggggcggcggagagttagtggaatcggagaatgttaattatttcgttttttttttttttttttaaattttttttttttatgcggtttcgttttttatatacgttttcggcggatatcgaggttgtaggaagtggggagtagtggttagggatttggggaatttttgtaagcgtagagacgtggatgttgttttttgttgttgtttttgttcgtattttttcggagggtggtgggttgggtcggtgatttttttatttaggtgtgttttttatcgcggtttataaggtgtttgtttgacggtcgtttttttttttgcggttcgtattttattttttttttttcgtaatatttgaaatatggtttttttttttttttatttttatttcgggtacgtaaattaattagtgcggtttttttttagtcggggtttgttttagtatggagggaaataagtttgtcgagcggaggttcgtggcggtggatattattgggaggtcggattttcggttattcgttatttgttattagggcgcgttaattcga

SEQ ID NO: 7424 - DNA, 1587 bp, Artificial Sequence
  Description of Artificial Sequence: Synthetic polynucleotide
cgaggagtggggcgttcggaaggacggggattgggaagcggttaggacggggagaaggcgcgggtgttggaattatttattagaagaaatttaacgagatttgtcggcggattaaaaaaaaaaaaaaaagtgggtttttttttatttttagattgatgatttcgcgtttttcgcgaatgttacggttaaggtaggatgttttaatcgttttgttattcgtattattttttcgtttttgattttcgtcgtattcgtcgagattttgcgagattttaaggttggggggttttgttaggcgcgttcggggtatttcgggaaagaatagaggtcggagtcgcgtttttacggtgcgttttttgagattttattttttagtttcggtttttacggggttcgtagagaatatttttaaatttaggggaggtatatagatttttataaagggaggatggggagaaagtgatggggtttcgaagagtcgttttagggaaggagagagaaagagtagggaagagaggaaagaaatagaagaaaagtagagacgggagagaggagacgaggggagtagcggggagaaacgtaggaggtagaataagtaaggaaattttttatttaaaagtttttttgggttcgagggttgggagttatttgttttgcgtcgttttcggttttttatcgttttggaggtaggagcgtaaatttgcgagcgttcgggtttatttttatcgttcgtttgtatttagatttgggaaggggatggaaggggcgggggggtaaaggtaagaagtaagacgaattttaagatttcggttcgaggagaagaggtttgtcggcgtttgcggttagttcggcggcggcggttttggcggcggcggcggcggttttcgggtggcggcgcgttcgggttgcgtagttaggcgggcggcgaaggttgaggtgtcggcgagcggcggggcgcggagtcgttttttcgttaatttcggtttttttttttttttttttttttttttttttttttttttttttttttttgttcgttagttttttttttttttcgtcggagttttagtcgggtgcggattggtaagcggcgcgtttcgcggttttttcgggcgtcgcgaagttgggaggcgcgtaaagtgcggtttaggggggatcgtcgggggttttcgttagtagttttttgttcgaggtcgtagtttttgtttttttcgtttttcgttcggtcgtttggtcgttcggtcgtttcgtcgatcgagggtttattagcgtttttttatggtcgcggtagttaatcgatgattgaatcgaataaagagtagcggcgagattaatttttaatatttatcgatgggtagcgggcggtcgagtttcggcgagtttcggtagtcgtcgttcgtcgttttagggcgttcgtttgttcgttcggggatttttttaatgcgtttagggcgcgttcgggggttttttacggtcgcgcggtcggcgttgttcgtattaatttggagtcgtcgtagattaaatcgtttttaatattgaaatatcgattttatattggcggttattttgggggttatcgagacgcgt

SEQ ID NO: 7425 - DNA, 5693 bp, Artificial Sequence
  Description of Artificial Sequence: Synthetic polynucleotide
cgcgcggagagggtttaagagcgtttttttaaaggtttagtttcgtttggagagagtgggcgggtatcgggtttttgggggaggggttgtcgtaggtttgggagggaatttagcggggttggtcgtagtttgggtaggtcgtagtttgggtcggcgggaattcgttattggattgaagaggcgtttggtcgtcgttgacgtcgttgtttttttttcgattcgttcgttcgtagtgttattttgtacggatcgtagtttgttttcggatttttaggacgtattgtaggacgattttaaagagacggataattcgatttcgtcggataaggagacggttaataacgagaacgaggagtagaattcgggtattaagcggcgcggttttcgtattattattaaggttaagtagttggagacgtttaaggttgttttcgtcgttacgtttaagtttacgcgttatattcgcgagtagttggcgtaggagatcggttttaatatgcgcgttatttaggtgcggttcggggcgggtatagttttttagtttcgttggtttgggagtcgggagtttcggaggagtttttcgttaagtttttttggttacgagcgcgtttggttttggtttgggagtagatcgtgcgttcgagtggggtatttgttcgaggtcggggattgtgaatcgaaagattttatttagttttgttgtttttttggtattgcgatttgggggcgggttattttatttttttgaatttcgtttttcgttttgtttatggaaggttgtaagtttttttggggttcgggatttttttttatttttatttttcgagtagagaaataggcgatgttttttttttttttgcgtcgaagcgcgggtagataaacggttagaggttggtttcggagtcgaggggtcgaggcgagagtcgtgtcgggagggaggtttttatagagtcgttaggtcgcgggcgagtcggggattaggaagtttaagtttttatgagtcgttttacgggttcgcgaaattttttatttttggttggttcgtcgaagtttttttttatttttttcggtttaattcggttcggtttcgtttcgggggagttttggtgcggaagaggcgtaaggatttagtaggggtagtttagttagggaagggagaagagggggggagaggatatttttgattttgggtttatagtttttttttttgttttaggtgtggttttagaatcgacggtttaaagaacgtcggatgaaatagttgagcgttttaggcgttcggaggtacgttttttttcggagttcgcggcgtatgcgttcgttgggcggtcgtttggacgagtttgagatgttggggtttatttcgtatatttattacggaggtaaggggcgtttcgggattcgttgtttcgtatttgttttatttcgggagttgagggcgaagggtttcggttagtacgtttttcgtcgttttagaatatcgtttattcgttggatatacgattatagatatatgtatatttatttatatgttttggatataaaattagatatatggttttatttatatagtgatgtatatagaagtatatacgagatatagtgatatatttatttacgtagggtataaggtgtatttatatttgcgtttagagattttagggatatacgtttagatacgatcgtacgattacgtataggtaaattttatttttttatatataggtatatttacggagatataattttatagacgcgtatatttttattagttatattgaggttagtattggtaaatttatatgtatgcggtttttacggatagacgtatagtttttttgtcgttttgtgtttggtgtatttggtatgaggtggatttcgagcgttggagggtagtgtgaggggaggggatgggggtttggatttattttaagtcgtttgtttattagtatcgaaggtagtaatttttgttttatgtggcggggtgtgtgcgtatagtatttggtagtgttagtttaaatgtcggtagttgttttgggtaggattgtagtttattttttagtttcgagatttttggggtttttatagattgggggtataagtgttgggttaattttagatttttatcgtttttggggttgtagagagcgaggagttttagtttataaagggttttagatggtggtattaggtttgggtttggggtgagttgtttttttgttattttagttttttttttttttattttttttatattggattggtgagttattttaattttttttattcgatttttttagttttttattttgagtcgtattgtttgagtttattaagtttattgttttgttttttttagggttgagggtttaagaaagtatttttttttttttattttgaagtttttgaatttggagagattttaggattgtttatgtttgagaggtatttgtatttttgagttgtaacgtaggttaggaagaggtaattttttttagaaagtgggtttagtggtagtgttagtaaggtaggagttaggtatttaggtagacgtagaagggaagggaagataattttattattaattttagtatattcggaagtttgaggggggattagattttgagatcggatcggggtttttagaaattgtgggtaaaatgttaggttgtgttttttagggtagagattttaggtagtggtagggtttaggttggagcgttttagtcgtttaattttggatagttttttaattttggatagatttttaatttcggatagatttttaattttggagagttcggatggtgggcgtgtttttcggagtttttatttatcgattttttttatttaaatttgtttttttttttataaaatttgggttcggagtagcgaggtagtgggggcggtatcggttcggaattttttttcgtttggataattaattaaggttttttcgaggattatttcgttttcgtttcgatttattttatcgttttttttttttgcgcgttggatgaggtggggagttggatattgggggtttttcgtttttcgtaatggtggggaagattttttagtttttagcgaggtagtttcgtttaattcgcgttgggagatttcggcggtggcgatcggtagcgggcgagaaaggggtcgggcggcggggtcggcggtttttcgtgggagcgcggataaagttttagttgcggtttttgtgttttttttagacggcgtttgttttaattattttcggttcggtcgttatatgggcggaggcggcgcgtacggcgcgggggtagcggttttcgttggtttttcggttcgtcgcgggtcgcggtcgttttttatttttgtttttttggggttttaaatttgtcgttttttatttttttttttattttcggggagaattaaattaatggttttaaaaagtaattggtaatcgttttagttgttgtttaaattgtttttaagttacgtttttagatattttttatttggatagattttagggtttggagagggaagagggtggtagggggtattaggaattcgttttttgattgagattttaggatttagtagggggagtggatttgtagaagagatttaggtttttggattcgttggttttttcgtcgtataaagcgggtgtttggtataaggtggttttttcgtgacgttttttacgttagttttttagggttttatttggtgggggaaggtaggatatttcgaaggttttggaaaaggggttatgtggggcggttagagagttgatatagatttgttgaggtagaatgggtttgtaattcggagtttttatattttttgaatttatgggtaaaatttttatttttgtattttttttgagagagagtttatagttattattagttttttaaaagattttaatgtttttagatgttttagaatttgggggtgttggtaaaattaattcggggtaaggttggaggatcgagtttttattttaaggagttcgcggagttttggttatgatttagagaattttcgtgttttttttttttttttttaagtcgttggagtttagtttttttttttttaggttaggttaggtcggtataaatggttttatcgggatcgacgcggcggtcgtatttggcgaggcgaaggatttggattgggttggtagggcgtagggatcgagtttagggcgttaaggtcgtttcgttcggtttaatttattagtcgtttttgtcgcggttcggatttagtttttttcggttaggtcgtttttcggttttaattatttcgcgttttgttttgttcgttggtttgtttttgttcggttttttttttcgggtttgttagttttcgtttttttggaggtttttgggatttatttttgatttatcgttttgcgttttttgggcgtatcgatttttttttattttcgggtttatttttgattttttcgttgtcgttttcgggggtttttacgcgtgtttttaatcgcggtcgttttttttttttttgcgttttttcgattttttcgcgatttttcgatgtttcgggttttcgggttttagtcgcggatttcgtgtttttgggtttttttttcgtttttttttttgtttttttgtcgattttttcgtttgtttttcgttgtttcgtatttttgtgttttttatcgattttaagatatttaggaattattgtttgtttttgcgtttttggtcgtttttgtttttttttatttttaggtgttagggaatttgtgattgaagttttcgagtttttgtcgcgtgtgttttttacggtttcggagtttttttcgtttttgtgtgtggtttttggtagtttgagttttttgttttttcgagattttttattgtttttttttttaatttttttcgtgagtttgcgacgtttatcgttttaaggggcgtcggttttcgtaggtttttttaattttgggtcggtgtcgcgcgtttttttttttcgttcgttcgggtttttttttcgggtttcgggtttttcgtttatttcgtttttttttatcgcgttttgtttttttttcgttttttttttgtagattattaaggcgattattacgcgtcgggaagtaattacgattttttcgcgtacggttcgttttcgtaggcgtagttttcggtcgattttagttttttggcggtttttggtttcggttcgacgtcgttgggagcgttggaatcgtcgttcgtcggttcgtacgtcgcggataattttaggtttatcgatatgatttcgtattcggatatatcgagtttcgagttaggtttgtcgggtacgttgtattttatgttcggcgaggtatttagcggcgggtttagttcgttttttttaatgagcggtattagcggttatagcggatttttgtcgtattttaatttcgagtttaacgaagtcgtcgtgtggtaaggtcgtcgggtcgtttttcgcgttcggttttcgggggtttcgtttcgaagtagttttttgaaattaaaacgttcgacgtagacgcggtgggagacgtgggtgtttttcgggggttttttttcgggttcgtatttaattggtagttgtttttcggttgggcgtcgagggggggtcgatttttatttttatttcgcgggttttttaggagttttagtttatcgttagtatttttttagtaatcgcga

SEQ ID NO: 7426 - DNA, 589 bp, Artificial Sequence
  Description of Artificial Sequence: Synthetic polynucleotide
cgtcgcggaggttttagcggtaggtgcgttttagtaggtagtagtagtcgttattttgggtaagtagtaaatttcgtataaatttcggagttattatgtttgttttttcgttttatcgtcggtttttttgttaggagtagtagaggatgtggtgaatgtatcggttttatcgaacgaggtaatcgtttcggtagatggttcgggaggtttaggagggagttcgtcggtcgagtcggttggggcggcgggaatggcggattttagttcggttttgtattttgtagagtatagtttgtagagattttgcgcggttcggagtttttcggtaaatggagtttgggaggtcgtcgcggttggcggagcggtattgaggtttgtagaagtacggtttggttttgttaaatcgtattttgttcgttttcgttagtttagagtttttcgggattttggcgagggcgcggggtaggatttttttcgcggtcggtagtgaatgggagcgcgtgtaggggcgttagttttgtttttttttgttgtgagtaggtagcggggttttagtcgtcgtttttttgaagtttcgagaacgaggcga

SEQ ID NO: 7427 - DNA, 1294 bp, Artificial Sequence; identical to SEQ ID NO: 7417
  Description of Artificial Sequence: Synthetic polynucleotide

SEQ ID NO: 7428 - DNA, 1373 bp, Artificial Sequence
  Description of Artificial Sequence: Synthetic polynucleotide
cgattttcgttgagtttacggtttagtttttatatatttatgtcgcgtttttagtcgttgggtgaggagttatttagcgtcgcggttttttcgaggggcggtcgggtagcgagtagcggtcgagcggacggggtgagttaggggcgcgcgcggggcgtttagtattgcgtcggggaagttcgtagttttcgtttcgaatttgggttcgttgaggttgagggaggggacgtaaggggagggaagaagagaagggaggagtgggggttaggggagagggggtggggagggattttggaggtataaagcggaggggaaggggagggacgcgcgcggtttttattaggaggcgagtgggtgtaatcggcgttttttagtcgcgcggggcggcggattcggaggatttagaattcggagcgcggcggtcgcgggcgttcgggaggaagaggaggagtacgaggcgggcgggcgggtgcgtagcgcgaagaggtagtttcggcgttgttcggttcggcgttaggtgagtttttgatttaggcgtttcgcgtttttttttcgtttttagggtttttcgttttcgttcgagtttttggtgtgcgcggaaggttcgggttttgttgcgcgttttaatttggttcgggcggttttattttttttttagcgggcggttttaggtcgggggtttcggttcgggggtttacgcgtttaggttttaattttgtaagattttagtcgttttttagtcgcgcgtttggtttcgagttgtgcgttggcggtaatggcggagtttttggtatagttcgttattttttcgcgggtagttcgggttgggggatgttagtttttggggatcgttgtatttgtttaagtttaattttacgtttttttcggtgttcgattttgcggtcgaatcgtaattgcgagtcgtaggtaatggcggagtttttggtattgttagttgttcgcggttgggggttcgaggttgggagggtttcgttttcggaatatcgtttcggtttggtttttaattttgcgaggagtttttttgcgtttttttttcgcggttatggcggggtcgttcgtattttttatttttttcgtttgggcgagattggggtgtaagagcgtcgtttttaaaatttgggaaagttgtgtttttttcgtaaaggaggttttagggaggtcgaggggcgcgtttcgttacggttcggggttgggtagtggaaggagcgttcgatgaggttgtttttaggtggttagggttcggagtagggttttcgggggatttaatttttagggttatttaggggttttgcgttcgaggtttcggaaggggttttttcgggattgcgttttagaggacgttagacgttcgt

SEQ ID NO: 7429 - DNA, 1524 bp, Artificial Sequence
  Description of Artificial Sequence: Synthetic polynucleotide
cggggaaaggcgtggaggggggttgagcgggttcggggttcgttcggaatttggggggttgaggggtcgggcgttgggcggtggagggaggaggtagggggatgcggggagtggtgggggagtttttttaggaagtgagtgtgcgcgcgcgtttgtggggagatgaggtagttgttggtgcgttttggggttttcgattcgagttttgtggcgggtcgtttgttttttttttttttaagtttcgatttttttttttttattttttttttttgtattggcgggcgggcggcgggggcggttggggttttagtttttttattttagttttttagttttttcggtagttcgggggcggttttagttttagaaatgtcgtcggttttcggtttcggtttttcggttttgtcgtcgcggtcgttggggttgttgttatcgtcgagtcgggcgtcgtagcggttttttttggggtttatatttgtttcgttagttcgtgttcggagtttttttcgcgggttatataattaggttttcggtcgagtgggcgaagtttagtatatttcgggggcggggggtaggggagggtttttagatgtttttttagtgttttcgaagatatcggaggggagtatttcgcgtagagcgtagttggattttcggggtgcgggtttttttttttgttttgttttttagtatttttggtaattgcgtaaagttgtttgggttgtaatggtggggtgtagggggcgttcggttgttgtatttgttagtgttgggtttaggttgagaggcgatttttagtttttataataatgtttcgggttttttggtttgggttttcgtagcgttcgattgatcgttagcgatacgacgagaacgaggatttgtcggacgtggaggagatcgttagcgttcgcggttttagtttggaggagaagtttcgtagttagttgtattagggggatttcgtgtacgttatggagggtaaaggtgaggcgtttttatttcgggtcgttttttgcgttgcgggtcgagcgtacgtggggagggagttgtcggtggttgggttcgtatttcgcgttcgcgttttttattttaggggattcggtgacgaaacgaggtcgagtattgggggggtggggtggggtggtgagggaggagggtaggtagtaaggggggtcgggtatgggtttaggttcggttcgcgtttattattagttttagggtgggtagagttagggggtcggcggatagagggatttggagatggataggcggatcgagggagggcgggagcgtcgcgtttttttttttttcgagtcggtcgcgttttttgcgttgtttgaggtgtcgtcgtttggttggaattgggtttagggcgtttttggggtatcggggtaaggttttttaggttcgaagtttttttaatttcgttttcgtttggggtttgttagtgaggaattggtgatgggggcgcgtcgggtgtttgggacgatgtttttttaggtttggggttcgtagagtcgt

SEQ ID NO: 7430 - DNA, 1009 bp, Artificial Sequence
  Description of Artificial Sequence: Synthetic polynucleotide
cgaagtggcgggtcgtggttattttttttatttgttgtattttttggagtttcggggcgtaaatagtcgttgtatttttttttattttcgacgggatgatattatagttttttttttagatagcgcgggtttttgtttcgtttttttttagcgatcgtagcgacgattttgttttagggcgggggagtagttttttaagtcgcgggcgtttattttttcgttcggatttcgggcggtgttggtcggggcgcgcggggaggcggggattagggattttttaggaattagtttgggttgttgtatcgttgttagggtcgttttgcgtttagtcgagtttagggcgtcgtcggttggacgttcgttaatttttattgcgttcggttttcgagcgcgttcggttggattcggcgcgttttttcgttttaggcgtcgttaagttttagtattatgcgtttttttagatgttcgaaagcgtttttttagggtagtttatgtttttttgtgtttttttcgcgacgggtcgggtttattattttatatttttcgggtttttttatgtttattatcgtgtgtttttttagtatttttttttttttttaagttttaatatagtatttttttatatatttttcgcgtcgttttagaggtttttttagttattgtttcgtttttttatttttttagtttttttagttttatcgaggcgcgtttttttagtacgtttttatttttttatttttttttcgcgtttttgtatttttttttcgtatttttgtatttttatttcgagtttttttgtgattaaatatcgcgtttttttaagcgtttttttttcgcgtcgttttaagatttttttttatattttgtatttttttcgtatttatttacgtatttttgcgcgtttttattcggcggtttttttatttttagattcgttttcgcgatttagcgcgcggggtattgggtagggatatttttcgtttttacgcgagtttttcgttgtagacgt

SEQ ID NO: 7431 - DNA, 961 bp, Artificial Sequence
  Description of Artificial Sequence: Synthetic polynucleotide
cgtcgtcgttgtgagcgcgcgaggattcggggttttaagtggtgagaattattcgagggatttttcggatgtttttttttttttttgtttttgagttttgtagtatagcggtgtcggtcgtcggtagggaaggttgtattttttttgcgtcgttaaatcgtgtttattatcgcggtgattgtcgtttaggtcgtatttttgagtcgtattcgcgcgtaggggcgtacgggtacgcgtatagggaggtcgtatatatatatatatatttgtatagggacgagtcgggggtttttgacgttcgtcgtttatttcgtttcggtttggagttttttggtttcgtaggtgtagcgacgtttagttttcgtgcggttagcgcgtcgcgtcggcggattttgtagtttagagagtttagggagtttagggaggggagcggggcgcgggcggggtagtgtcgtataatcgtaggcgcgtttcgcgtcgttttcgtttcgggtttattttttttcgtcgcgttttttttagtttatttacggacgagcggattttcgattttcgcggtagggatattttaagagttttgtttaggtttgcgtcgtttagtatttcgttcgtgtcgggggttcggcggtttcgggcgagagacggaggttacgcgtagggttgggcgtaggggtcgtcgttcgaggattatgggtgggttagcgtttcgtcgggttgttagttggcggggatcgtcggcgtttgtgtcgggtcgcgttcgaggttgcgtcgttcgtgtcgtagcggttaatgcggtagtattcgcgaacgttatcgcggcgggtttcgttggttcgggttgcggcgtgggggcgggggatcggttttgagcggagtttcgcgggaggaggagcggacgggaggttgggagggattcgtaatattacgtaggatcggggtttttaggtgtcggggaaggcga

SEQ ID NO: 7432 - DNA, 961 bp, Artificial Sequence; identical to SEQ ID NO: 7431
  Description of Artificial Sequence: Synthetic polynucleotide

SEQ ID NO: 7433 - DNA, 980 bp, Artificial Sequence
  Description of Artificial Sequence: Synthetic polynucleotide
cgtttttttgtttcgttcggtgtaagttcggggtcgtcggttggggtggggcgcgtagcgcggtaggtaggtagggttattatgtagtttttagttttttggttttttcgtttttcgtttcgcgtttttgggtcgttttcgtttgttcgtattttagagtagttttgattcgtgggggcgcgcggtttcgcggggattttgcgggcgggcgggcggtcgggcgcgcgcggggcgggggcggcgcgcgcgcggggagcgtgtgggtcgggcgggcgcggcggggaaagttgggcgcgcgagtcgaggttgttgtttatttgtagtcgcgtcgtttatttgtcgcggagtgcgcgtttcgcgttttttcggttcgtttcggagttcggtcgttttttttttgttatagcgggtaattgcgtcgatatgcgatacgagtagtttacgcgtttcggaagtatcggaggagttttttcggtttgggcgagttaaggtgattttttcgatgattttttcgttttcgcgggtcgtttgttttcgtattttgtttgtttttttcgcgttcgattttcgttttcgtcgttagggaatcggtagtagtgtatgggtatttgtttgtttgtttgtttcggtatttttattgtatatatttttttttcgtggttttttcgattgtttcgtgcgtacggggggagtttggagtttttttttgtttcggtcgggggtgcgtttgaggatgtgtacgcgcgcgggggatgcgtttggagggtgggagttcgatggaaataggcgatttaaatattttatcgaggatggcggtttttggttcgagatttgtcgttgtcgcgtggttttttcggtagtagtttagatgttaaatagttgttcgtttttagtatgtaagatgtgattttttaatgtgtatttttagcgttgttgtaaatagatcgtcgcgagttcgtgtgtgtttgtttcgtttacgt

SEQ ID NO: 7434 - DNA, 408 bp, Artificial Sequence
  Description of Artificial Sequence: Synthetic polynucleotide
cgcggcgtttttttcgaaatatttgagtataagtagtcgtaagggcgagcgtaggacgcggggcgtggacgtcgggttgggaagagtttcgattaaattcgcgggtggttttgattttttttttcgggaggagttttgcgtagaggtcgtggttcgcgcgggtaagttatttgtggtagtttggtagggtagtttttttcggtaaatagcgatatgttttcggtttttgtcggttttggtttggtagagtcgtttttcgttttttggtttttggtgcgttcgaggcgggagaggagtttcggtcgcgtggattttagtttgcgcggtaattatcgcgttttgattttaggttcggttgtttagggaaggatagtttagggcgcgtttagcgagttttagggggtacgg

SEQ ID NO: 7435 - DNA, 2190 bp, Artificial Sequence
  Description of Artificial Sequence: Synthetic polynucleotide
cgggtgtattaatgcggtcgaaaaagatacggatacgtttttttgggatttgagttggttcgtagtttttttaaaggtgttaagtaagcgttagttttttttaggcgttttaggtttagtgttttgtgtcgagggttttcggtgtttttttagatttttcgggatagtttgaaggggttaggagcggcgggatagcgcgggaagagtaggtaaggggagatagtcggattgcgttttagtttttcgtgttaagaatatcgtcgcggaggcgcggttagttttttttggatcggatttttcgtttttagggttaggcggcggagttttagttttgttttttttttagtttcgggcggtttttagagttgagtaagtcgggtggagggagtttgtaaggattttttgagcgcgatgggtaggaggaggggtaagggtaagagggcgcggagtaaagattttgaatttgtcggggtcgcgttttcgggttcgcgtcgttagtatttttttacgcgcgttcggtttcgggttattcgttttcgtcggttttcgttttttttcgtagtcgtagggaagcgagtttgggaggaagaagagggtaggtggggaggcggatgaggggtgggggattttttgacgttattagaaggaggtgtcggggtaggaagtgggttggggaaaggttataaatcgttttcgttttcggttgttttttatcgaggttcgcgggaggttcggagcgcgttaggcggatatttttttcggttttttttcggtagcggcggcggttcggagcgggtttcggggttcgggtgtagcggttagcgggcgtttggcggcgaggattattcggggaagtggttgttttttggttggagtcgcgagacgggcgtttagggcgcggggtcggcggcggcgaacgagaggacggattttggcggtcgggtcgttggtcgcggggagcgcgggtatcgggcgagtaggtcgcgtcgcgtttattatggttagttattgggatatcggggttttgttgtgcgcgttgtttagttgtttgttttttataggtgaggcgcggttgggggtcggggtttgaggcgggttgcgatggggcggtcggagggtagagttttcgaggttagggcggggtgtacgcggggagacgaggttgtagttcggagaagttggttacggcgagaatttgggatattagttgtagcgggtacgtttggggtcgttgcgtttttttttcgagggagcgtttcgaggagtggttggtttggattcgcgagtattagcgtttagatcgggttcgcgttggggttgttcgtttgcgataggatcgttgattttttatttagttgtcgggttggggttttattgtcgaggttttgggtattaggagtagtacgtatcgggatttgtttggtatttagagtttatttttagaggatttggggtaggtacgtagggtttttcggagtcgggagtagaggtttttgaaagtttgttaggttgttcggggttgggttgaggtcgggattttggtgatattgggtattggtcgcgatttcgcgttacgagagtgtaggaggggagtcgatttggaggggattcgtgtttgcgggggagtaggaggattttaggagagggttagcgtcggtattttatgattcgtttgagtttttaagtcggattgtttcggggaacgttcggcgagcgttcgttttttttcgtcgttttcggatcgcggggttttagtgcgttgcgtttagttattcgggtggggtttttgtcgggagtaggcgtggtgcgcggtttagttcgtgtcgcggatattagtgattttgatttataagggtagtttagggtttaaatatcgttaatttattgatttataagtttagtttttaaaattcgagcgaagagagggcgggcgattttgattaaacgatgtggtttgaggaatcgatgaggttcgttcgttatttaagttagttttcgttgggcgtttgggagacgggcggtggaatagttaggggtcgggggttttattagtagttagatcgtcgttattgaggggttaaagtttcgaggaatttgagggttcggattcgtagtttttgtttagtggggttgagtggcggagatttgtgtttcgtttttttgggcgtagagagttagatttcggagcgt

SEQ ID NO: 7436 - DNA, 2190 bp, Artificial Sequence; identical to SEQ ID NO: 7435
  Description of Artificial Sequence: Synthetic polynucleotide

SEQ ID NO: 7437 - DNA, 679 bp, Artificial Sequence
  Description of Artificial Sequence: Synthetic polynucleotide
cgtcggtttaggtttcgtgcggtaatttttcggttttgttgtttatttcgttttatcgttttttattttttagtttttgtttagttcggggaagtcgcgtcgtagcgttttagatgttatttatttttttttgcgaggggtttgtgatagtttagggtgttgtgtattttgtgcgattgtttatcgttcggtttatgcggtggtttgagtagtttcgcgtcggtattttacgtatcgaatttcgggattacgtgagtcggcggagggcggggaggtggcgttcgggcgtcggcgtgaattcgcgtttttcggagtttagcgtcgtgtttttaggtttcggttttgattttagggcgtttaggtggaatggtttcgtagttgcgcgttgttttcgcgttttcgttttgtttcgcggaaatcgttttcgatagttaattcgatcgggcgcgcggcgttttcggtcggttttcgttcgatttcgcgtagggtatagatcggggcgtacgcgttattcgtattcggttattcgcgggttaggtcggtcgagcggttgggtttagggggtatttttacgtgcgtagtcgttattcggtttggtcgtttagacgttttcgggggttcgcgtcggttagtttagttcgagtttggcgtcgcgttgcggtcgttgttttttattcgg

SEQ ID NO: 7438 - DNA, 2013 bp, Artificial Sequence
  Description of Artificial Sequence: Synthetic polynucleotide
cgttacgtagtttagggcgtttagtttatatcgtcgtatatttattgtcggtttagaggtttggtcgttgagcgttttttggatggcgtggtttgatcgtttttttttttgatttatttttagtttcgagggtcgggttttacggcggcggagagggcgtcgttcgtacggtttcggttgtgttatcgtttcggattgttttcgcgtagcgaggtttttttttcggggttttcgggtggggtcggtcgagtcgggtgcgttatttttttaagttcgggcgagatgagagttgttagcggtagtcgaggttagcgcgggacgtcgttattttagcgttaggtcggagttagtagtcgcggagtcgcggagagcggagggggcggcggggtcgggcgtggcgggttttttcgtcgtttattgcgcgttcgaattttgggtttcgcgagcggcgggcggtattcgttgtaatgcggagaatgtgagaggtagcgtagggcggtggggaggaaggggcgcgggagagggcggcggcgagatagacggagagtagcggggagaacgaggatcgggttgggtaggtgggataaggtagggaggcgtcggagaggtcggattggaagggggggagaagggcggcggcgtcgcggagggggtcggcgtttttcgcgggagtgcgagaagttcgagtcggtatttgggtttaggttcgggttgggagcgcggtcgcggttcggttaggtagggtgcgggagtcgggtcgttcgcggggtttttacggggagtagcggggtatttaaggtcggcgggtttcggaggggtttagggtcgcgtttcgtaggtttcggtcgtttcggtagggggtttttgtgagcgttttaggagggcgagtcgggagtgcggagtcgggtgtgcgcgtttgggtgtgcgcgtgtgtgcgcgagtgtgggcgtcgggtagtgggggcgcgcggtagagattttgtcggtatcgtatcgtggcgagtaggaggtaggagcgggacgcgtaggggagtcgggattttttcgcgtatacgtatatgtatacgttgcgcgtttttacgcgtatatatacgttttttttgtcgcgttcgtcgtcgcggttattatcgcggagtcgagttttgcggagcgggaatcgaggtcggagcggggatcggaggtagtcgagtcgggggatgtcggttcggagcggagtcgcgcgcggacggcgcgttcgggacggtgagtgtggtcgggtcgggacgttgtagcggggttagggtcgtaggggcgtaggtcggggagtcggtgtgtttgttcgtcggcggcgcggcgcgcgcggtttttgattgggcgggagtttcgggggtagcggcgggggtggggtgttgggtgcgcgttcgtggggggcgtgtacgtttggggttgggagggggcgtgttcggtagtttaggtcgcggtttcgttttatttttatttgtagttgtagtttcgacgatttgtagtaagtttgtggagtttttggggcgcggcgggtcgggaggggtggggacggaggcgttttgagggtgtaatttcggtttttttttttagagaagagaacgcgaggggagtggggcgggggcgcgggtcgggtcgtttggcgggcggaggggtgcgtttttagttttttagtcgcgtagtcgttcgttttttgggatatttatttaggttcgcggcgtcgcgttggagtcgtttcgggcgttagattattatgatttcgttagggttaggtaggatcgcgcggggatagtttttaggtttagggtttgggatgtttttgtaggtaggaggaagatattaaggtttagttgggggagtgcggcgacgtgttcgggcgtgtatgtgtgtgttttcgcgttttttgttttttaggacggtggttggaagaagggaatttgtcgtaaggcgcgttttattcgatttggatttttaggagtttttaagaggtcgggggcgtttttaggtttgtcgg

SEQ ID NO: 7439 - DNA, 1501 bp, Artificial Sequence
  Description of Artificial Sequence: Synthetic polynucleotide
cgtggtttttcgtttggtttttcgtatttattaggaggaggttgtgcgttattaggtattcgagtcgcgggttgtttcggatgtcgggggttaggcgttcggtggcgtagtcgtgttaggttattacgtaggggttgtcgatggtgatttagtatttgatttgatcgtcgaagtggcggaagtagagtttcgcgtaatttttgaagtggtcggttagggcgcggttggtttagtcgtcgtaggcgttttgtaggcgttggggtaggttttagtggtatagggtgattacgggttgtacgtttagttttcgtagtcgttttagtaggcgtcggtagtagcgtagtttttcgcggttggggacgttcgcgttgttattggggagtattcgcgtttacgagatggagaagcggtagtgagtgatttcgagttcgcgtagcgttttcgtgtcgcggaagacgttgttgtagttgtcgttggttacgttttcggtggcgggttgtagcggcgacggggcgtttaacggtagattggcgtttcgggagtttttcgggggtgttagggggtggtgggtgaacgtattttagatggacgtatttttgtcgtgttgttgttagtcgttttcggtttggtaggcggcgttgtttacggtttagaggaagtcgtcggggaaggtgttttggaagaggttcgcggtttcgggggtaggaggtcgcgagaaacgggtttaggtttgcgcgtcgtcgttcggtttcgtacgtaggcggcggtcgtttaggtttagtagtattagtagtagcgatagcgacggcggcggcggtcgcgggcggcgcggcggggcgttggcgggtatgttgcgcgggagttaggtttcggggtttcgcgtcgcgtttttttatgttcgcgtttcgtcgcgttcgttcgtttatcgtcggcgcgtttattttcgtttttcggcgggtttcgttggtaataattatttgcgagtcgggattgttttcgttttggtattgggggcgggggtaggggcgtcgagggcgaggggtgttcgggaggggcgcggtagcgggtaaggtgcggtaggcgtcgttcgcggacgtcggagaaaggtatttgttttttttagttttcgggagtcgtgtaggacgtttcgtggacgtttaggtttattttttttgtttgtcgcgcgttttttgagagtagttttggagcggtttcgtcggggagaaaaggcgtcgattaatttttttcgatttgggggcgggattttgtcgggttttagcggagcgcgtcgttggggaagtatttgtttttattttttttttattcggaggtttaaagaagtttcggttggatattgttggagttaattagggattggtcgaaattttagagggattgttaggtgggatagtcgagggggaatttcgtcgtgcgttgaaagggatttttttttaggtgagatgttcgcggggagacgcgtttattcgcgtttttttttcga

SEQ ID NO: 7440 - DNA, 668 bp, Artificial Sequence
  Description of Artificial Sequence: Synthetic polynucleotide
cgaggttgttgcggtgggaagagggcgttgggagggaggaggatttggggcgtagtcgtggtgggtgcgttttgttaagaagggcgggggcgacggggcgcgtacgtggaggaggaggaggaggagggagacgggagggcgtgtgagcgagtgagataagaaaagggagcgcgttcgtcgtcgtcgtcgtcgtcgtttttttttggagagagaggttggagtgaggttgtgcgaagcgtcgtattttaatgaggacgggtcgaggtatatttttgtattagtggtcgtaatcgaggcgtcgcgttttagtagttgttgtcgtttagttcggtttcgtcgtcgttttttagttttgtagtttcgtagtttcggtcgcgtttagttcggcgaggatagtattaggaggcggtttttagcgcggttataaagattttcggcggcgttttttcgcggatcggtgcgtggtttgttttttttggggacgggagttgcggggagggcggtcgggggatttcgtagagttcgtttcgttcgtagtcgcggggcgtcgagggtagggcgggcgtttagtttggtttcgtcgtttcgttcgtagtttttcgaaaggcggtcgttttgttttggttagtttggttcgattcgggggcgttgcgtgcgggcggtttcgg

SEQ ID NO: 7441 - DNA, 1006 bp, Artificial Sequence
  Description of Artificial Sequence: Synthetic polynucleotide
cgttatagtcgtagagtttttatttcgagttcgcgtttttttggtcgcgtcgtgttattttgtttatttattgggcgatttgggtacgagtatcgcgatttttcgtttcgcgtagttttttagtatcgtggttttagtatatttgtagagtagttaggcgtaggaatcgaaattcgtcgggtggtgggcgggaagggaaaggtagatgtttaagtgaaggcgtttatttttttttttacgtgaatagaagttgatttttaattttaagtgagaaatgatagggagaaaaagtatgtaattattattagaaaaggtgagaggttagtgttgttttttagcgaagggacggggtgagatttaaatttatcgttcggttaggggagttcgtttttagagtatcgagaagttggggtgcgtgggcggagagagagtagggtgcgttcgatagttttgcgttaggttgtttttaaatttaatatttttttttttttttttggagttattttttttttcggaatatgtaagttttgggtggtttagttttgtcgttagatttagtttttaagtgcgggggaaggagatgggcgtttttagtcgcgattttttgggaaggtggttatttatttgcgttttgaaatagaagaatagggcgacgttgtagataatttggtttagttttagttttaggagggttacgaatatggagcgggaggcggtagggggttggtgcggcgtaggcggcggcggggcgtgtagggggttttcgtgcggggtttcggggtcgtcgtttatttttttcgagttacgtaggtatttggtgtagtttttgttggcgcggcgtatggcgttcggttttttcgtttcggagtttttttttttttttcgtttttttttttttttgtttgcggttaatttcggaggttgcggcggagtttcgacgtggggcgtcgatttggagttcggttttgggttttggggcgcgcgggcgagcgggtagggcgttcgg

SEQ ID NO: 7442 - DNA, 867 bp, Artificial Sequence
  Description of Artificial Sequence: Synthetic polynucleotide
cggaagtaaagttcgtagtgaggtgggttggaagcgggttttgtagtagtcgcgagttcgggtttaggtttttaggcgcggttggagtagaagtgtagggatcgttacgatttatcgtcgcggtcggtttcgtttcgttagaggagatttcgtacgcgtagtcgattggttcgggttgatcgaggggatttagacgttgttattttttttttttaaggtagttttcgtggttttgtatgtaggaagtgtttcgattaatttttttttcggttttcgtagagattttaaattttgcggtttttatttttcgttgtatttttttttcgtttttttttttaatgtttttgttagtaaaagtttttatttgtagtatcgggtatgttgttcgtttaacgcgtttcggggatttgttggttcgtgtttttaatttaggggtggttatacgtttcgcgtttttgtttttgggtagatttttttatttgtgtattttggtttttttatttagtaaagagatgtgcgaagtgtgcgtttggagacgagtcgtttcggtgatttttattcgttcgtagcggtggttttggtttttcggattcgcgttcgcgttttgcgggtttttcgcgtcgtttttgttcgtcggattattcgggtttagagggtcgttcgtttttagcgtttgcgagcgtcgttttcgttcgggtttggggagcgttagcgcgttttttttacgtcggattttgtagagtatgtttagtgtattttatggaattcggtttttttggggttaggattagattttcgggttttcgttgttgtcgagggggcgcggaggaggggaggttgggagatagttagcgttttgtttcgcgt

SEQ ID NO: 7443 - DNA, 1072 bp, Artificial Sequence
  Description of Artificial Sequence: Synthetic polynucleotide
cgcggagaagattgtttggtttcgtcggtttcgttaacgtgacggttagtttcgtcgagcgttcgtattcgtttatatttatgattattcgtatattcgttttaatacgtgttaaggcgcgatcgcggggtttttggtagttttcgttgtatttttttttttataggggtatttatagttgttatttgtatagggggtaatttttttcgatttagttgtggtcgtcgttttttttagttttttttggtttttcgtatttttcggtttgggttcgcgtcggtcggttttttttttttttttcggttttttttttcgtcgtttttattatatttttttttggttagtggcgtacgtcgggggacgagttagagggagcgggtcgcgggggtgtgtatgtatttttcgttttttttttgtagcgtatattgtatatggtagtgagggggcgagtaaaggtggtatcggtttttcggttgttttagcgaaggcggcggttgtagtttttgcgttgtttttcgttttttagcgtagcggcgattatcgcgttgggatttcgtcgacgttgttttcgcgtcgagttcgtcgtcgtcgcggtttttaattagtatttgagaggtttttgtatttttttggtagttttatttttacggtgtttgtagggtttttttttgtattttttttttagatgcggcgtataatcgttattagttggaattttttattatcgatattttttggggtttttgggggaaggggggggcgggtagtaatcgcgtcgttttatgtttgtggtttgttttggtagttcggtggttttaaaaaaaatttcgagaaagttgcgtttttttttcgggcgtcgaggaggtggtaacgcggtaagtaatatcgggtttttgagatagttgtttcggagcgggtgtagggtttagtttagtgtatttgtttattgtcgcgtttttggtgcgagttaagttgtagtagatatgatgggttcggggcgaagcgggcgttcggtggtcgatagatggtagtcgagggcgaaggcgtttttgggttagggcggcgtaatcgg

SEQ ID NO: 7444 - DNA, 1633 bp, Artificial Sequence
  Description of Artificial Sequence: Synthetic polynucleotide
cgatacgttttatttatagagttttagagaagttcggattcggttggagttaagagtcggaaaataagtatttagattgtcgcgtaagttgtcggagattaagtgttatatatattggcgtcgagagaaagggtgggcgtttttaagtttttggtggagtaatgttagtggtcgggtatgcgggggatacggggttttcgaattcggattcgaatttttagttgagttattcgttaaagttggttgttcgttggtagacgaggtcggttttagatcgggtggtagggtgttttcgggttttgagtggttaatagtaattggggaagtattgaggaattttaacgggaaagttcgttttatatttgaaataggtagttcgtgaagtttttaaattagttttgaaacgtcggcgtttagaggttaggttttcggcgagggttttttttagttttgttcgttttcggttcgagcgtcgggcgttttgtcgttcgaaggacggataggggagagaggggttgggggagtttttcgcgtttttttatcgtttttgtcggcgtaagggcgggagtggagaaggcgttatttagattgtggcgttgggtaaattgcggtcgtagtttttttaagtttgttcgaattagaacgcggagtgagcgttcggttcggtttttcgtttgcgttttgtagtcgtttcggagtgattcgggttttttggttagtcgggtttgagttattaattaaggggtagaagggcgcgagagtagcgggaggcgggagttagggtgttttcgcgtgtgtatataatgaggcggcggagacgtatattttttttcgtcgaagaagtcgtaggagtattcgtcgtttaatacggagacgcggagttttatagcggtggtagaaagtgagtattaatttagtaatagggggaaggaaggggacgtcgggcggttagtgggacgtgcggtagtcgagggttgtagtttgtttttgtagcgcgttcgcgtttatttgcgattttttggtaggggatgttcgttaggttgaattttttggtatcgtacgtttggcggattttttcgtagtttcgagtttttatattcgtttcggcggggagggagagtagtagttttaagaggggaagaattatagtttcgatttaagaaggtatggtgtaatatataaatttagttcggtaaattttacggtcggtgcgttttttattttgttttttaagtcgaaagttcgttagaggtagcggcgcgtttttcgtcgttgtttagcgttatttttttttgttagtcgaggggacgagtagcgtagttttttggattgcgtttagtaaatttttataagttagatggacgatggtaagttaataagggttggttgggaaggttgttgttttgtttttttagtttttagatggaaacggtgtaattaaaacgaggaagagaaggaaaagaagtgtttaaaaaattattatgggggtttagagttgtaattcgagtttcgagtcgtagaattttggagcgttgcgggttcggttcgtcggagtgtgcggtaaaggtgggagcgcgcgtcggttttttcgggagggagatggataagcgagagcgagtgtgtatgcgcgcgt

SEQ ID NO: 7445 - DNA, 1143 bp, Artificial Sequence
  Description of Artificial Sequence: Synthetic polynucleotide
cggtatcgtgtatagtttgattttacgttcgtacgttgggttttcggttttttggtagtgtatttaagtgtatttcgcgtgtgttcggcggattttcgtgtatatcgtcgtcgtgttgttgagtacgaaagattttcgagaggagttcgtagatgagagtttagttgttgttgtgagattgattgcgggtggtagtcggtaagaaggaattgttagtatcgattttggcgttttttattaattgcggcgtagttttttttgcggtgttcgtttttcggtattattgtagtttttgtagtaaagttaattttaaaaatttaaataaaataataattttttaaaggttcgaaaatttcggtttttattttttttttagtttgttcggcggcggcggcgtttagtgagtgatacggcgagcgtgagtcgcggttttagtcgggtcgagcgcgttgtttgagttgagtcgtcgtaggtgaggggttcgcgttttcgttcgttttgggcgtcgcgtttggtattgattttgtcggtcgtttattgtcgtcgtcgtcgtcgttcgcgggtattatgatagttttgagcgttggggttataggttggttatcgtcgtcggtgttcgggaggttgcggcgcggtcggtttcgtgttttgcgttcgaggttcgcgatgcgcgttcgttagttttttggtcggttcgggttaggacggtttaggggcgttggggttgcgagaggggttgttagaggggttgcgggcgggggtttcgcgcgggggaggggtggggaggggcgtttttattcgagagcggggcggtggggtttttgtcggtttggtcggggcgcgggagtcgcgatgcgttttttttatttttgcgcgtgggtgtcgggggcgtttgtcgcgggatgtttttgggttggtttgggaagtttagggtcggcgatatttcgggtttgtttcgtttgggtatttagtaggtgttggggggtaggtggttgaggacgaggttattgggtattattatagcgttgtatttgttttttcggtattagggtcgttgtttgggtaaatttttgggttaacgcgcgggtggggaggtgggggtgggtagtttggttttagtaggttttcgcgggggtttcgcgg

SEQ ID NO: 7446 - DNA, 1143 bp, Artificial Sequence; identical to SEQ ID NO: 7445
  Description of Artificial Sequence: Synthetic polynucleotide

SEQ ID NO: 7447 - DNA, 1371 bp, Artificial Sequence
  Description of Artificial Sequence: Synthetic polynucleotide
cgttttttttacggcgttcgtttagttcggtggttttaattttttgcgggagttgtatacgtttcggaaatttgggatagaaattgagttttttttttttttggtggtggtgatagtatttgtttagatttggtcggacgtcgtcggtcggagtatttagttcggcggagaaggagttcgttcggcgttggggattgggatttggagtttttttttttatcgtacgtacgtttcgtttcgcgtacgttcgttcgttcgttcgtgtttggcgtagttttatttcggatggtttttgttttttcgcgggttcgagggcgttggaaatttagcggcggcgaagcggagaggagtttcgcgcgttttcgttcgtacggttttaggtttggggtttgcgttggagtcgcgcggggagaggtcgtttttgcgatcgtcgcgttcgttttcgatcgttcgggttcgcggttagttcggttattagttatgggttttggttcgttttcgttgtttttggtgttgtcgtcgtcgcggttgttgttgttgttgttgttgtttttgttgttaggtacgcgtataggcgttagggtttcggagggacgggcgttcgagaaggggcgcggggttcggaggggttgtcggcgagaatatcgcgcgggcgagcggagagggttggcgtcgtcgtcggggattcggaattcgcgtagattggttttagttcggcggcgatttgggtggggtggttttttttttttcggtttattttttatttttagttattattaaatttgggagttattgagcgggcgttggtacgcgtcgggtgatggggaggtcgagatcgggtttttcgttttgggcgtaggagttggggattcgcgttttcgcgttgttcgtcgttttgtttcgcgtattggtttttaaattggcgcgtttaagtttttcgttttatcgtttgtatttcgtttatttttttatttgacggagatggttgaagatttggttaaggttatttcgggaagaggggagtcgtttcgggattggggttggagttggagcgttagtttttttttcggttgtagttttttagcgtttttggttgcgtcgttgagggattttttatcgggagagcgttttttgtttttttttcgttttttagaggagtttgttgggggaagtcggttttggttcgtcgttgggaggtttttgggtgtttgggagggttggtgggtagcgagagtcggggatcgggtaaggttgtagggaatttttggagggtttaggtcggcggtttgtcgtgcggttgtgagtttagagcgtttttcgttttcggtgtcgaggtttgtattatttagaacgttatacgtttttaatcga

SEQ ID NO: 7448 - DNA, 1545 bp, Artificial Sequence
  Description of Artificial Sequence: Synthetic polynucleotide
cgcgttgtgagagttaggttatttaaatgttacgtttttcgtatcgtcggcgaggggataaatgattattttgatggattcggtagtttaaggaaattatcgttttcggagggatggcggtagagtaggtcgggtatgttgtatttgtttgagttggatcgcgtgtgagcgagtttacgtttttcgcgggttaggtttagttttcgtgttttttgataggtgaagttgagtatttttattaaattttcgggaagaataacgattttattttatattaacgtgattggaaattttaatttaagaattggatgtatcggtcggtttatttggggtttgtttagttttttattttatttcgcgtttttgatgtgttaggttttttgtatagatagtttatatatttaatttttaaaatatcgttttttgaagcgatgtttaattaggaaaatttgttttaaattgtatgattatttttcgtggttttttttttcgaatttttgttttgtttattaggtgcggtttcgtttcgtattcgtatatatttttttcgtcgttgttttgagcgtagcgataagggtttttatattttcgcggttcgtaatgtttcggggttaagtcgaggtagggaggcgttttcgtagtttttgattttataattcgcgcgcgtgtgtatcgagtcgcgggtatatcgcgaatatatatatatatatatatattcgtgcgttttcgtttttcgttcggttcgggtttttcgaatttattttcgaggcgtttcgggcgtagggttcgtttttttttgcgggtttttagcggttgttcggtagtggttcgtacggttttcgatgtcgcgttttcggtaggttttagagttagttggttattgttattcggtagttcggatttcgcgtttagggttgtatttcgcggatggagcgattttcgttttcgtcgttcgagtttaggtttgcgtttatacgcgcggcgtttatacgcgcggcgtttatttggttgtagtttcggttagggttagcgcgtcgcggttgaagggggcgttcggatttttttggggcggcgcgtagtcgggatagtttcgtatgacgttcgcgttttagcggtttcgggacgcggttttatttttaatttttggcggttttagtttcggtttttgtgtttcggtcggcgtcgttacgttatgggtttgtaggttgggagtagcgcgggtcgggaacgcggttggggagagttgggttgggtttttttatcgtcgttcgttcggggcgtttaagttggcggggcgtacgggtagtaattgagcgtattttgggggatcgagggggcggtttcggggaggggcgcggcgtcgcgttaagggggtgttttgttagaggttgcggcggaggaaagtgggagttagagcgtcgtcggagtttcgggaaggcggtgttcgttcggttttaggtcgcggttgtagcgtcgaggggaaagcgagcggaagttgcgcgttggagggagtttattattcggagttattcgcggggttcgcgt

SEQ ID NO: 7449 - DNA, 1545 bp, Artificial Sequence; identical to SEQ ID NO: 7448
  Description of Artificial Sequence: Synthetic polynucleotide

SEQ ID NO: 7450 - DNA, 1027 bp, Artificial Sequence
  Description of Artificial Sequence: Synthetic polynucleotide
cggtgcgtgtataggggcgtttcgggaggggtggtgatcggtagtcggttttttatttttcgcgtttattttttcgtttttgttttttttttagttggtggcgggtagtgtggtgatggtttttgaggaggtttgttcggagcgtatcgatttgatttataaaaattatcggaaattttgtaatttgttgatcgacgtggaggagtggggttaggtggttattattagtatgtttattcgttacgttcgtacgtagtttttgagttttatttagaacgtaagtgggtttagtttaggtagagcgggtcgaagtgtgtttcggggaggcgtttatagattcgtcggttttttcgtttaggaatttttattagaggagaacgcggaaaaagttttttacggtttagaggaggacgaggttaagggcgcggggtttgaggagacggtcgtcgcggtcgttttttttcgaaagttttatgttatggatttcgattatcggttgttgttgcgtaatattaaatttttgttgtagagtcgtagcgtcgcggtggtgatggcggtggcgtagttttatttttatttggcgtttaaggcggaagtgggcgttatcgttaaggcgttggtgcgtttgttgcgtagttataggtgcgtttcgtttttagtttcgttttttttttcgttttttgtttcgttttacgggttgttcggtttcgtttttttacgtttattagtcgtttttatttttgtttattcgttttatattgatcgtagttttgtttttcgtattggtttttttttcgtaacgatttgttttattttttttttttattcgttgatttttgttttaatcgaggggttcggggtgttttgattcgtttttttcgtagtgaggtgtagtacgttgtgttttagaacgtggttattatgtttattaagcgtcgggtgagtttgcgacggcgggttgttttcgttgttcgagggtcgtttttgcgggtattggaggcgttgtcggggttgggatcggggtcgg

SEQ ID NO: 7451 - DNA, 693 bp, Artificial Sequence
  Description of Artificial Sequence: Synthetic polynucleotide
cggattcgttttatttgaggatttcgggtttatataggcgatcgtttcggttttagattggaagcgatattttagggattaaagtttttagttcgcgttcggttttagtttttgttttcgttttagagtcgtagcgagtagggttttgcggtatcgtttagagattggtttaggaggttttagtttttagcgttagtatatatttatcggttgtagtagttttattagttttgttttttttttcgggtttcggttatattaagagtttcggaaacgtcgagaattttgcgggtttagaacgttcgcgcggacgttttttttacggcgtcggaagtcggcgtcgagtttgttatcgggtatttttttgttgttttgacgacggcgggcgttgtaagagtggagaagttgtaggtgttgaggcgcggtgaaagaaattttgggagttaagagtacgaggagttggtgtttgtgttatatttgtatttgcgggtaagaaatcgttggtgtagcggcgggttagggtttgggagtcgatttagggtttaggtgtacggagcgggtttttcgggaattttgagagtggtcgtttttcggagatgaagggacgagggcgtagcgattttcgtatttatttcgttttacgaatattcgtttcgtattcgtcggttattcggggataaaacgtttgttcgt

SEQ ID NO: 7452 - DNA, 1496 bp, Artificial Sequence
  Description of Artificial Sequence: Synthetic polynucleotide
cgttttcgaattcggagaaagtagttcgttcgtttttttattcggtagttagtttagtttattcgagagttgagttcgagaagtcggtttttgacggtgttggcgtggcgtttgttaaaatatgttttttgtattttaatttttttcggttattttttttgtacgtatagttcgttcggggttatttcggttttttagcgtagttttttcgatttttgtttttttttttttcgatttatgtttgtttaaggtcgaatgtaaaatttatttttaagaaagcgtagcgggtacggggggtatttagcgtgttatgtttcgtagtttttttttagttaagattagagttttagattttagattacggaaatgagtgttatttagattaaggattgcgcgtttgcggtttcggttttcggttttgggtgtttttttggggtgtttgtgcgtttcggtatttttcgtcgtcgttcgtgagtttgcgttttttatttatttaggtttgggagcgttttttatttaaggtttgggagtattttttaattattttcgttacgtttattttattttttatcgcggttcggattgtagtaaaatcgggtagcgcgagggttaaaaagtggaaaggagagcgttttttcgtgtcgtgtagttagttcgttaattttttttttttagtttcgattttcgtaattttaaatgtaatttttttttttcggtttcggtttttttcgggttgcggttagcgggcgtcgcgttgcgaggcgtggagcgggcgggttgtcgcgaggttgcgggtggcggtgtcggttatagtcgcgagttggcgagtgggtgggtgggtgggtggggaggagggagaggataggcggggagagagacgggtgtggggaggggagggagggggagatttcgtttttttgtcgtttttagttcgggcggggggcggggggaggaggtcgcgatgagggaggggaggagggagggaggaagggagggagggagtcgaggaagacgtttcgataattcgtgcgtttcgtaaggttcggagtatttgtatatttttgtagtcgcgcggcgagttattcgcggcggttgttgtagtttttattgtatttttttttttttttttttttcgggtttcgggtgtgtgtatgtgtgagagtgagtgtgtgtgttttgtaggtgcgtggtgtgttcgttttaattttgtttagtaggtgggatttggtgattttagtattattttttttttttttttttttttttttgtttttttatcgtttgttgtaattttgtaaagtttcggagtcggagagcgcgtttcgtttttagagttttcggattcggcgagttagcgatcgtcgagtcggttattatgttcggtagatcgcgttattaggcgtttttcgcggtttttattcggcggcggcggcggcggcggcggcgttcgcgatggttttagacgttgaaggattttgtatttgatcgttcggcgt

SEQ ID NO: 7453 - DNA, 5820 bp, Artificial Sequence; identical to SEQ ID NO: 7206
  Description of Artificial Sequence: Synthetic polynucleotide

SEQ ID NO: 7454 - DNA, 699 bp, Artificial Sequence
  Description of Artificial Sequence: Synthetic polynucleotide
cgtcgcggtttttaaaggtcgttgttgtgggtgcgtatattcgggttggagaaatttcggcggttttgtatcgcgcggtttcgtttgggttttggagggcgtattcgtttcgtttgggttgtttcgcggtttatggttaagcgttttttgtttagttcggaatcgggcgttcgagttagcgaataggtcggttcgttttagttggtcgagttcgattcgtcgcgcgttcgggttaggcgagcgcggcgcggcggattagttttgagttcgtagtttcgagggcgcggggcgggcgcgtttggggtatgagggcggggcgggcggcggtcgcgtttttaatttcggcgttgcgtgtgggagcggtcggattagggaattagcgttgtaatttcggattagtaacgttcgttaaatgagtgtttaatttcgattttttatgttttttagcgtcgcggttgagttttaggaggttttttggttaggtttttttcgcgttttggttttatttttcgggaggttcggtcgcggtcggtagagaatttttcggtttgtggagattcggttttaggtcgcgtcgtagttttttttcggtagcgtattttattggttcgggtagaggtttatgtagttttatagcgttcggagttgggagttcgtggattagagaaaaggaagtttcggatgtttcgtttattacgg

SEQ ID NO: 7455 - DNA, 1845 bp, Artificial Sequence
  Description of Artificial Sequence: Synthetic polynucleotide
cgtacgcggcgcgggattcgagaagagcgtttggtagagtataaattttatagaagaagagattttttgttttttttgagattttattttttttttgtttagggttaggaagtttttttcgggtttttttagaatttcggttgtttttttatttgtcgtttatcgttttttggaggtttcggagaggggttcggttcggcgagtcgaaggttgcggggcggggcgcgagttttagtttttgggatatatagtcggtgcgtttcgcgttttaagtgcgtattttaggaagttcggagtcgggaggattcgggttcgcggttttattttatttttggcgaggtcgggagaaaaaaagcgttagatcgttcgtttgagggtttagaagtttatcgggcggcggtatagattttttcgaaatgttttcgttttcgcgttgcgagcgtataggaatttagggtcgtcggggttgtcgtggtttggttgaacgtttaaagttaggcgagggcggggggttttagtttagttatgcgagtttttttttagtggtgttagtttttacgtcgggttttcgggtcggcgggaggcgcgtgtgtttgtttgtgtgtgtaggggatatttcgttttttagtagtttatgtagaatttcgtttttcgtttcggttttaggaattttttttttagtttagagatttttgcgcgttttttgtttattttgttaaggcgagaaagcggtcgtgttggagataaagaaatttttgtttttttttattttcggttttttcgttcgttcgagatatttttcggcgttttttttcgatttcggcgatattgcgtttggatacgttaggtaggggggtagggtgggcgagttcgtttttcgacgcgggttagttgggggtttttcgtgaatttcgttcggggatattttatagtagtcgcgtttttatttttttttttttaaatcgtttcgggtttttgtcgtcgttattttttgttaaatcgtttttatttttttagcggagttatagcggggcgcggcgtatataaagggggtcggagggtggagagtatagaaggagggagagatttcgttagggttcgtggtacgggtttgggagtagttatttattcgatttttttttcgatttttgagatgtttgcgaagatgaggaagattacgagtagcgtgagcgcggttagtatttagtttcggaattgtagttgtatggtgggttcgcgttcgtcgggatttacgcgggtcggcgcgaggagtaggggtcggagggcgtagcggcggacgtcggagttttcgcgcgtcgcgcgtagttgggtagatattttgcgtttcggacgagttcgggtcggcggcggtagcggtagcggtagcggtagcgataggtaggggttgtttaggcgcggcgagttcgttcgttttttttcggttttcgtttgtttttttttttttttttttttttttttcgttttgcgttcggtttcgcgcgtagtttgatagttttgtttcgcgtttttgttcgtttttttttattaattttagcgtttaggcgttagtttttgtttttttcgtttggttttatttagttttcgagggcgcggggatgtagtcggacgttatttttggtttagagagattgggttttggttatcgcgagcgatcgggtacggagttgagtttagggaagtgcgcgtatcgttcggcgtattttttaggttggtaaacgttttttttcgttcgttttttgtttagttttttcgttttttcgtaaagttttttcgatataaagattaatatttggggatagtttttagcgcgcggcgagaaggcgg

SEQ ID NO: 7456 - DNA, 1844 bp, Artificial Sequence
  Description of Artificial Sequence: Synthetic polynucleotide
cgattagagattcggcgtacggagcggagtttttggtttttatttgtattaatttagttcgcggtcgtagtttttgttaaagaagtggggtttcgtgtttaaggttcgtacgttcgggtgtattcggataaattttagtacggttcgggtgttttttttttttacgtttataatgagggtttggggtaatcgtttggtatttagtttgggtgagtcggagtggttggaatcggagaggcgaggggcgggtacggcggcggcgggcgcgttgggagcgttgggttcgttgggcgtcggttcggagggattataggggcgggatttttggagaagtttttggtcgttcgcgttggggtcgcggaggtagcgaggcgcgtcgaggaggcggtttcgatttaggtcgtcgtagtagtataggaagttgtaatataggtaagtgtaggagagcgagagcgtgaaggcgaagagtagtttgcgcgtttttcgcggttgaggtggtttcgcgcggtttaggattttataggttatggttttatgggttcgcgtcgggggttatggttttcgagggggtatcggcggttgagttgttgtggttttgcggtcgtttagagggttcgcgtggcgttgttacggttacgcgggtcgggcgttgggggcgtcgtttttttcgggggttgttgattagggtgcgtatagtgttagggggtttcgggggtagcggtttttcggggaataggcggttgtatttttagtatttttcggttttaggcgatggggtttcgggtagtcgggcggttcgggcgtttttaggtttttacgtgcgtcgggttcggagcgcgtttagcgttcgaagttttatttttgattttcggagcgtcgtttacgaaacgttcggcggcggcgcggttgtgcgggttggcgggtggatcggacggtggcgttggcgtcggtcgcgatttggtttttcgggaaatgtcgagcggagcgcgttgtcggttttatttaaggagtggtttgacgttagtcgcgcgggtttttcgagttcgcgtcgcgtttagggatttggttcgttttttgcgtttttatttttttattttttttagaaatatagtacgcgggttttttttatgtaggttattttttacggagttttaggttagttttggggcggtgaaacgaaggtgttaaggtatagtattttttcgggaggttggatatttttattacgttggtttttcgatatttagggatacgaatttaggtcgagatcgcgtcgatatgtagattagatagatttagacgtagacgtaggtattttgttttgatgcgcggttttattattttgattcgtatacgtacgtataggtatagaagtatacgcgttttagttcggatatatttttatatttacgcgggggtggggaggagaagttttttaatttgggtttagatatatcgataaggatatttttttcgttttcgatatttcgttaaatggatatatatagttcggaatcggatatcgagcgtacgtacgttttggattgggatacgcgttgtagacgggatgggtggaggagtcgagcgtgagtgagatttcgtgattatttatttagttttttagtttttagcgcgttgatttatatttcggcggttcgttttgtttcgtatttatgaggtacgcgcgtattttaatttattgttattttattttttttcgggtttgtcggagagcgagtttcggagcggtagatttcgcgttaggagggttttttttttagtagtcgtcgtttagcggtagattgtttttcggggagttgtttagggtattagagggtcgtcga

SEQ ID NO: 7457 - DNA, 1480 bp, Artificial Sequence
  Description of Artificial Sequence: Synthetic polynucleotide
cgttttcggcgggttttgttgttttacgttcgtcgtggggatttttttttaggagcgttttgtttgggattttttttgcgttttagatttttattttggttcggatttttttcgggggcgtttttttatttttaggttttcgttcgcgttcggcgtggcggtttttttttttcgtgcgggcgggtttcggaatagtgtcgtcggtcgtttgtaggtgtttttttacggaggggcgcgcgtttttgcgtcgtggtcgttgttaggcgttagcggtttttagtcgaggtgtattcgcgtttcgggtttcgggcgcgtcgtagtcgtttttttatcgtcgttcgtttcgttagttcgtttcgtacgtttttcgcgtcgcgtttttatttcggggttggggggggtatgggttcgcgtcgcgttcgtcgtcgtcgattttaggtattcgagtttcggggcgcggcgggtagcggtcgttgacgcggggcgttagttgttaatttcgcgcgcggagtttttcggcggtgtagtttcgtttcggcggcgcgggcggtatgaagattagtcgtcgcggtcgagcgtttttggtcgtggttttgaatttgttggcgttgttgttcgttattatcgttttttttattacgtattggtgttagggtacgtagcgggtttttaagtcgggttgcggttagggcgggcgcgttaattgttttaattcgggcgttaacgttacggttaacggtatcgtcgttttcgtcgtcgtcgtcgtcgtcgttatcgtttcggggaacggtttttttggcggcgcgttttatagttgggagatcggcgacgatcgttttttttttaggaatttttatatcggtatttggtattcgtgcgaggaggagtttagcgggtttggtgagtgcgcgcgggcggcggttagttcggtttcggttttttcggggcggcgcggttatcgaggttcgagtttcggattcgttcgtttttttttcgtcgtttgggtttagtttttagcgtttcgtttggttaggggcgacgtttcggggtagggggcgcgcgtcgtttcggggtcggggattagtatggggggacgtgcgggacgtttcgtcgtggagaggtgtaaggtagagtttttattcgttgcggacgtttcgcggttttggggacgttttcgcgtttcgggaaggcgtttattttcgttgtcggtcggaggggcgcgcgttgtttttcgtttttgaatttatttttacgttcgttttttttttttttttttttcgcggggtattagatgtttttatttatttcggaacgtttttgggggtgggggtgatgtagggatttttgttattagtcgttttttttgtcgtagatttatagattcgggagttttttatttttatcgttaatttacgtcgaattttttagacgggagtggggagtgggggagtttcgcgggttttcggaaagtcgtattcgt

SEQ ID NO: 7458 - DNA, 5065 bp, Artificial Sequence
  Description of Artificial Sequence: Synthetic polynucleotide
cgttaagcgtttttttcgggtgcggttttttttcgttagtgaggtcgcgatttcggcgtagttgtcgttttatttcgggttatttttattcgttattgcggattagtttttaagtattaggttttttggcggaatttgtaagtttaaatttcgttattcggattttttagtagttttttttttattttatttttatttagagttaggagggtgttatcgtacgtagagcgcgtaggtttttggggtgagtagggcgcgtggagggattttaggagtggtattttattttcgttcgtcgtttattttcgattcgtataaaaataaagaataatttttattttgtttttgtttttattgatgtatttttttgtatcgcggtacgcggagtttcgttagcgttttgatattgtagcgttcgtattagcgaattacggaatttgggatcgagataatggttcgtaattgatgtattgttattaataataaagattaattttttttttttcgttatttcgattatttttttttttttattttttttttttttattttttattttttttttcggggttatcgagggaaagaaaataaataagaaattagcgggggacgttaagcgtagatcgaaacgttcgtttttacgtcgtcgaggacgtaaaaaaacgaaaaaagttattaaagtttggattttttaatttattcgtttttgttcgtttatttttaattaagtatcgcgtagttgtttttcgtatgtttatttcgtttggttgtttgttgtggtgtttttttggggggggggaattttttttttttttatatttaattttaaattatacgtagattaagtaataaatacgtgtgaagttattttcgggagttttttgttgcgtacgcggcgcgtattaggagaaaagttttgcgggatcgttagtttcgttaggtttttggttgtatgcggtgttcgggaggttcggatttttaagaagttaagattgttagagaaggatgcgggcggttttaaatacgggtatatttcgggaaaggagtgtgtaagtgtatataaacgcgttcgtgtatttgggatagtgtggattggtgggtgtgcgaggatttttgtttgtgagatggaggcgggtgcgggatttatacgtgttttcgtatacgtttttcggggtttgggagatgcgagtcgtttatattttaggagtgcgtagatttatttttgtcgagggatttttttaaatatttagtgagaaataatggtatttgaagtattatttatggaaatattattatttttattttttaatattagttttattgatagtttcgtttgtttttttattaaaatttattgtatttattaggatttggcgagaacgggagagcgaggcggagagggtgtgaatgtgtgtgttagggagtgagcgagggtagaagataagtaagagaaaaggtggaaaacggacgagtagggagagagaagggagaagttatattaataaaaaaaaataaagttagtagatgaaaaatagaaatatttatcggtatatatatatatttatattttaaaagaaaagatttaagaagttaagagaaagggaagggttttttatcggagcgtagtataggttcggagtatacgaagtcggttcgggagatcggtgtttatttcgcgcgaatcgatcgtggtatcggttagatttaagggcgttcgcgaattggggcgtttttatgagttttttttttttttgatcgtgagatagggtagggattgtgtatttgtatttttttttttttttattatttagtcgaagtttagtttagtttagtttttcgggcgtaagatttcgagaattttggagcgaggagatttcgaggcgcgaggggaaagagttaggttgagtcgcgtatcgagttttaggttcgcgggcgtttgagttcggtagagggatcgggtttttggttttgggttttggggcgagggtagggaggttgtattttagtttgagggagatggtgatagagcgaaaagttcgggcgtcgcgttcggtaagtgtttaaaaagtggaggcgagtttcggcgtcgttaggtagtttcggatagaatatttttttatcgttttttttttatttcgtttttcggttttgcgtcgttatttcgtttcggaaggttggggcgcggttttttttttagggcggggtgtttaggggttttagggattggtttagtttagtgtcgggttcgttcgggttgtgtttttttaggtcggtgttcgttgttgcgtttagtgtgagtcgtagtttttttttttttttcggtcggagttgaattcggagtttaggtcggttttcgtttttcgttcgttcggggttttgcggcgttatcgttgtcgtcgttttttcgcggagtgacgcgttttgtagttaatcggggtagtcgggggggaggttcgggaggggttttgggcggagtcgggtcgtttttttattttacgggttcggggttgtttttttcgaaaattttagttttaattgttttgggaatgttcgaggtagagaaagggagcgagggagtaagtaagaagttggaggattagtgtttttggcggggaggggatggggtggcgggagaattgtttttttttttagttataaatttattaggtttttaaattttttttggattttttttttcgcgttttcgcgagttcgggatttaggggatggagaattcggggcggaggagcgtcgagttaggcgggagggaggtcgagtcgtgggcgggaggcggatcggcgtggggttggtttttttttattcgtttatttttttttttaatgggggtgggggtgggttgttttttggtagtttttaaagaaacgaagaaatatttacgaaacgggacgtttttttttttgatttcgtcgcgggatttttttttttcgcgggtcggcgcgtttcgttttcgagttgggaagttcgtagcgcgtcggtagttcgggtttttagttttcgtcgttcggttttattttttattcggggcggtttaatttcggggagggtatgttaatttgggtcggtttagttcgggattgtgggggggggcgaaggagggagggaagagggaggggagagggagagagcggggggcgtttgtcggggcgtcgggttcgtagtggagaggaggtcggttttcggcggtcgggtcgcggagtttcgggcggtcgtaaagagggttaatttagtgtcgggcggcgcggcgcgtagagttagtttcgcggtcggtttattgggttagcgcgcggagagataggggtttgtagtaaattacgaattaattgattaaggcgagcgggtttgaatagcgttggttcggtgttaatcgttttttaaagagtttttttatgattaatcgtaatgtattattgataattataattatagtaggatatatgcgcgttgcgttcggggtcggggagtcggggagggggcgggcgggtcggcgggcggggggagtcgtcgtcgtcgtcgtcgttcgattttcgtaattttgagaagatttttttttagtaattttttattttgttttagttgatgtttgagttagtatgtcgcggaggaagtaagcgaagttttaatatttttaattcgatttcgaagtggtttcgttttttcggcgagatggtgagtgtttcggttcgcgtcgtggatatatatatacgtatttatatttacgtatattcggatttatttatacgcggttggttttcgcgttttttattttatcgtcgtcgcggtttcgattgttttttttattcggcgtaattttttttttttttttaatttttaatgtgtttttgttgggttttttttcgttgtttcggggaaagcgagtatatttttcggtaggattttttcggagttgttgggttttttcgggggaaggagggcgggtatgtcggtttggttttttcgtttttgttttttcggggattttagtcgcggttaagattcgggagttttatgaggcgtgggtgcgggtggaggtcgtttcggtttgatcgtacggggtttttagcgttttcggcgtcggttttagggtattcggttcggttttcgtcgttcggttttgttgttagcggtaaggaagtttatttcgggcgttgggttgaatttcgagcgtgggggagttcgttgcgtttttttgtttttacgtatattttttttcggtttgcgaggtagaatcgggtgtttttggaggtttagagttgtaagaagatggggattggtgtcggggcgttagcgtttgattcgttggggttgcggtcggggtggagagtgttgttggtcgttagttgtttcggagacggtgtaaacggacggggaaagtgtcggggtttggttcgtaaaatttattttcgtatttttttttataatatttgtattttttgttttttaaaatttttttggtcggtatgcgttttttgcggatcgtggtgttttttatttttaggggggttagggaagaagttatagaatagttttttaggtttgcgggtggttagttagagtggaattttttttgaaataggggtatttgtttttttcgatggaggcgataattgtgggtttcgaaggggttgaataagtttagaataaagtttgtgtgtgggggttatggtagagagtggaagagattcgggtagggagttggggtataaagggaggatatttggaatttttttttgtttttaaaggtgttttacggtatcggttttaaagtttttaggtttagcgttcgaggcggtgtagcggcgttcggattcgggttttcgggtcgtttcggtacgatgttggtttttcggttgtgggaggacgtataaggagtaatttcggcggggttttagcggtttcggatgttattcgggatgtttacgttttaggcggtattttggggtgtgaaggagggagttgggtttcgatagagtttcgaagcgtgattttgatcggtattttagtttattaagttgcggtcgttcgggtttttaggttttcggttcgt

SEQ ID NO: 7459 - DNA, 2372 bp, Artificial Sequence
  Description of Artificial Sequence: Synthetic polynucleotide
cgagggacgtaggatgaaagaagttaagagtgtcgttagggtttgcgttagcgtcgttagattttcgggatgggggagttttagggtacggcgttagcggatttacggagaaggagaaaagttttattgtcgtgtagaagtttaggttcgggtgagacgtttgcgaaggttgttagtagcggaagagaaggggcgtttttcgtgttgcgtagtattcgttcgcggtaggtgggcgcggagtttagagttgggagttaaacgtaaacgttggcgagaagttttagtttttttcggtagtttattcgttgcggggaggggttttttacgtttttagtttttgggagattgtatcggaggtcggaagtaagtcgggcgaggatgaattatttcgtttaatttttttttttcggttttttagttttcgtacgtcggttttttttagagattttgtagtcgcgagcgaagattgttttatttttagattttatcgaattttttgtggtttgcggagacgaggagacggacgggtttggtggttaatgagagtttcgattttttgtttttcgtttaatgggtcgttgtttatgggtcggggcgggattaggagggtaggtaggggcggttcgggttggcgcgcggcgcggcggttacgcggttgcggtttatagagttagcgtttttttgggtgttcgtgttagtgttgcgcgggaaggtattattattatagtcgtcgtcgttggttagggtgttggataagacgggttcgtcggttatttcgttagtttaggtattcgttgtagtcgtcgttgtttttttttagatcggtttttatggaggagatggaagaggagttgaaatgtttcgtgtgcggttttttttatcgggagtttattattttgttttgtttttataatttgtgttaggcgtgcgttcgtaatattttggtgtagattttagagtttgaatttttttagagttatcgggtcgcgggtttcggggttttcgattatgattatttggatttggataagatgagtttatatagcgaggcggatagcggttatggtttttacggggggttcgttagcgtttttattatttcgtgttagaagttttttaacggcgttcgcgtgtttttttcggttatgtcgttatcggttatttatttgttatcggttttggtttcggtgtttcgtaatttttgtattatttgtttttagtgttatcgtagttttattttggatgatcgggggtttcgcggtttttttaagaatcgcgtattggaaggggtaattgatcgttattagtagagtaaagtcgcggtttttaagtgttagttttgcgagaaggcgtttaaggaagttatcgttatgtgcgaatagtgcgatgttttttattgcgattcgtgtcgtttgcgttgttattcgtttcgggggtttttagttaagtatcgtttggtgttttcggtttagggtcgtgtgagtcggaggttgagtttacgtaaggtttttatttgtatagattacgagttggagaattatagtatgtattgcgtgtaatgtaagatgttcgtgtgttattagtgtttggaggagggtaaatattttagttacgaagttaaggttttgggggttatgtggaaattatataaggtgagttttaagaaaatttatttttaattttttgcgttttcgattattcggttttgtagtagacggttttcgttttttgcgtatagcgtattttagtgggggcgtaatgtaggtgttttcgatgtttatttttttggtttggtgtattgtaggaggtatgggggaattttaatcggcgtacgggggagttgaatgtttttatagagttgttgcggggatgttttagagcgggtttttcggggcgcgttgtttgcgagcgggatttagggcgtttttttttcgcggcgggtttgtagttagtggtcgcggttagtgtgtgggaaagtattgtatagttgggtagagtcgcgttagtgtttagggtcgttaggtacgttcgagggtagggcgggttgcgaattttcggggagggattgggatgggggcggtggggtcgcgcggacggcgggagtttgtcgttgttggataggcggatttggtgaggtacggcggagggtcggggagacgtcgtaggcggaatattgatgagttcggttttgggttagatttggttttcgagttggagagaacgcggggttttggtgttacgtgtttaaaagatagagcggagagggtagttagcggtcgttatggtaacgcgacgtgtaggtttgggtttgaattttttcggagttgggatttgagattagagtgttaggatcggagtttgcgtagtcgcgg

SEQ ID NO: 7460 - DNA, 2372 bp, Artificial Sequence; identical to SEQ ID NO: 7459
  Description of Artificial Sequence: Synthetic polynucleotide

SEQ ID NO: 7461 - DNA, 2372 bp, Artificial Sequence; identical to SEQ ID NO: 7459
  Description of Artificial Sequence: Synthetic polynucleotide

SEQ ID NO: 7462 - DNA, 2142 bp, Artificial Sequence
  Description of Artificial Sequence: Synthetic polynucleotide
cgtagttggtttcgaggttgtgcggtttttagttttgcggagtagtttaggttatcgttttcgtggtcgcgggggagggtattttcgacggtcgtagtaatgggtaagagattagggtttttttattttcgcgattcgtttttttttgtttggtaattaagcgggatgttttattttattttttaaacggagcggattatatatagtagtattttatggttttttttgttgcggttttttcgggggaaggtatttttagagggtggttaagttttttttagcggtcggttttcgggagggggatagaatttaggagttagttttttgttttcgtataaaggttcgtttttttttagggcgtttttgggtggagcgaagcggtcgaggggattacgataatgtttttttgtttttcggatcgatggttaggtttttagagttaggagcgttcgggattttagggtagggagtaaagtttatatcgtaatttcgttattcgttcgcgttttgttagtttgttggggttatagcgcgtaggttagtagtcgtattcgtcgttgcggggttttttttgcgttgagtttattttttgtaacgtcgttgttttaaattttgcgggttatttggtttcgggggtggggttttttgggggtcgcggggtagttcggatgagaggatgattcgggagttttttgggggcggagtggaaggggtagttttaggtagttttggttaggagtttttatttcgttagtttcgttgttttagcggtcgttgttttagaaaagttaacgagaattagatgtggtggttattgtcgaatttttttagagtcggtgattggtttttagtcgagggttttagttaattagtttgttgggtgggtttggagtttcgtttcgtttaggcgttcgcggagatttaggttcgaggttggcgcggcgcggagagtgggttggaggtcggggcgggacgcgttgtgtagcgggtaagcgtacggtcgagcgagtatggagggggatcgggtggtcgggcggtcggtgttgtcgtcgttattagtgttattgttgttgtcgttgttaatgttgcgggtcgcggcgttgtatttagacgagttttttttatacggggagtcgtggggggattagtttttgtaggaaggcgacgacgaaagtttagtcgtggtgaagttggcgaattttttgtatttttacgaagttcgatttagtaatttttacgtaagtttagtttttttttggtatttttttcgtagttttttttttggggtcggttttacggaaattttgtttttagaggggaggaaatagattttatttttggagttttttagtatttttgcggtggtattcggttagagagcgatgtcgttgtttgtttcgttgttgtaggggagtaagaatgatttggaggggagagtaagaattgttcgtagttacgtacgcgttttaggtagaaaaggtggcgttgttagggcggttagcgggttttgtagttaggatcgcgagaaggttgtgttcgtttgcggagttggggtgttttttttttagatttggaggtttttttttcgaggatatggggtttcggggttgtgaggggagtgagaagataggtgaacgagttttagggtttttggatttattgtagcgcggagttgggatagtcgtaaaagttgcgtttgtttttttgaatttagattttttggttagtggggaaggagagagaggttttttgtttaagttagtttttttttttttttgcgcgaaagggtagcgtttttgggtttgagcgattgttatttttttgtttttttttttttttaggtgggtattaacggtattatttttatttaggatttttttagggaaacgtagtatgtggattatgatttttttatcgatttttcggttatcgttttttttttggcggatatcgatacgagttacggtagaggtcgagttttgtatcgagaggatatttttttcgtagtgttgggtttggtcgttcgttatgtgcgcgttggtttttcgcgttttgcgcgttttatttttatttacgtttttttggttatttgggagtaggtaggcgtttacgaggaggttaagcgcggggcgttgttttcgg

SEQ ID NO: 7463 - DNA, 544 bp, Artificial Sequence
  Description of Artificial Sequence: Synthetic polynucleotide
cggtttttagtcggttttgtgttgttcgttgcgaatatagttcgtgggttatcgggtagtcgagttatgtaagttattttgatttttaaaaggtagacgtataaattcgatttagaattcgaggcgaattttgaatttatagcgttaaaaacgcgtagtgttttcgtttgttcggttcgttgaaggttggttttgggtttgggggtagtgttcgcgaagggttgcgatggtaggtttcgttgttatacggtatcgagggttttttcgtttcggcgttaggcgtacgtttttttgttatatttttcgcggggcgcgtcgttagggttatttgtttttttaagtttcgttaggtagttaagggtgaggagcggagagggattcggtcgttgttgtcgcgagttagtataaaggtagcgtttgaaatcgaattttttattttgggtatcgcggtttttttttatttttggttttcgcggtcggagcgtatttattgttagtcgttatggtcggacgagggggttgttcgacggtcgtttaggttcgg

SEQ ID NO: 7464 - DNA, 2002 bp, Artificial Sequence
  Description of Artificial Sequence: Synthetic polynucleotide
cgttttcgtttcgtgttaagcgggtttaaggttcgaggttttttcgtttataatttcggtgttcggaatacgttttcgaggggtcgtgttgtcggggttattattcgcgattggatttcgcgtcgtgttgtttttttcgggtttcgagttcgtttagcggtttgtacggtttaggtttgagttgcgggttttttttgtggggcgcgttgggagtgagttttatttttaaagtttattttaacgttttaggtatgattacgacggtagaggtcggtcgtttattttcgttttttttttcggttagagcgtttttgtcgggagtcgacgatcgcggtttgatttcgggttttatcgtttattttcggttttcgttttttttttacggttaggggttatatatagcggacgtttcgtttttagtcgtttttttgatttttgaatttgggagttagcgtgttcgttggggtatgtattgttacgggtattgggatttttttgttgttgcggggaggagtttcgacggtaggtgggaagatttagtttgttcgcgttttcgttttttagtttttgcgattcgggtcgaggtttttagtttttgggttttttcgtttcgggtttgagggaggggtcgggttttcgggtttgtagattcgttatcgcgcgtgcgtatgcgtcggtcgcgagttttcgggtgtaggtttgggcggtttcggttcgcgtatttgtttaggcgttgcggtttagcgcgttttaatttttagttcgggcggagagcgggggcgggattgaagtatcgtgttttttaaagtattttttcgtcgtcggtagttttggtttcgtaaatgttttagcgcgtttaggcgtacgtagagattggcgcggtagttttcgggttaacggtacgcgagtaaagttggttggcgatttgggatacgtagtagaagttgaggttgtatcgattttcgtcgtttcgggggaggtatgggttcgggtaggtttaggaggaagttgtatagttcgaggttcgggcgggagtggcgggtcgcgggtaagggaacgtatatttggaaggggttaggatttcggttggagtttggttttttatggcgaggaagtcgattgggaagggttttttggcgaggtttttttgttgtgttattttttttcggtagcgtcgggcgcggggaacgcggggttgtatcggggcgggggagggggttttattcggcggtttcgaggattcgattttggggtcgggttcggcgggtaggtttgtttaggagttagttggtaaatgtagcggattgttacgttattttattgttattatttattgtaaattattgttttaagttttcgggagaattcgtcgaatttgagaggggggagggggatgggggtgggcgcgtaggaagttttataggtattagggattggtgatttaggatattagtttttcgagttttttttgggaatttttagtatttagattgtttttgattgtagggattacggtggggcgttttttttttaagtttttttcgggatatcgggcgcgtttttttcgtttttgggttagcgtatatttttttacgcgatgattagtatagttattgtgaggttcggttttggtcgcgtttgttttttgcgagtgataataataaaaattattggaattgtaaggaagtttttggtttcggttttttagtcgttgttgttttgggtgtttcggttgcggaaagatttcgtagtcgggttcgatttacgagtggaatatcgggttgcggatttagtcgggtttataggattggcgcggggtttcggggataggtttcgtagggtttttttgcgtatcgtttgggacgtcgattttgttaatttggaggataatttttgtttttattttattagtagatttttaaaaatttagtcgtcgttgaaacgtgttttttattcgttcggtttgtttgtagtttttgacgagtttcggtatagttttcgg

SEQ ID NO: 7465 - DNA, 983 bp, Artificial Sequence
  Description of Artificial Sequence: Synthetic polynucleotide
cggtgtcgcgcgttcgtttgttgtttggagtttttaattcggcggaatttaggttaggacgcgtcgtcgttttgacgtgttgtcggtcgggaggcgcgggcgttaggttttaacgattagggtgggtggtcgcggggtaggggttggatttgaattcgtttttcgggggttttggatgcgggatgcgggatgcgggatgcgggttcgattttttcgttgttggtcgaggagcgttttgagagtttttttttcgcgcgcgaggataaatatgcgcggtttgttagttagtgcggcgttgttttttagttgatagggtgacgtttcgtttggaggtttggagattggttttttgatttggtttttttcggtagtttaatgggtaaagtttttcgttcgtttagaaattagttttttcgcgcgttttttttgcgcgcggcgaggtcgagacgtttttcgcggtgatagcgtgtaaggcggagattcggcgcgtttttagtttagggaaagtttaggcgacgcgatcgtaagttcgagtttaggtttttcggagtcgttagggcgcgtcgggttgtttgtttttttgtttttttttgtaggaatttttcgtcgttcgcggtcgggatttcgggtttttttcgggcgtagattttagttatcgttttgggtcggggtttttttttttttgaaattcgtgcggaaggatttttttcggggtttttcgttttggttttagatatttttttttttagatttcgcgttttagatgcgttgtttcgtagttttttgatagttgcgagtttacgaatttcggcgggagggcggcggcggcggattgatatgtttcggacgcggttgcggtcggcgggtagttcgcgggggcgatgagtcgttgcgatcggtgaggcgtcgggcggcgggggtatcgcgtattttttttattttttttttttgtttatttcgttcgggaggtcgagaggaaacgg

SEQ ID NO: 7466 - DNA, 947 bp, Artificial Sequence
  Description of Artificial Sequence: Synthetic polynucleotide
cgttcggtgtttattttcgggattttgaatttcgttttttttttattttttgttagattcgcgagggttaggaagggttttgggaggaagcgggagcgtagcggcggggtatggaagaagagggttgggggcgcgcgttatttgtaaaggttttcgaggtttttttttagttttggtggtaatttcgtttagcgtcgcgtttttttttagatttaaatttttgttgggtttttcgggtggcggcggcggcgacggcggcggttgttggagttaagttttgtcgttcgtagcgtcggggcgcgggggtgcggaggtcggagttttagagcggcgcgcgttttttcgtagcgggtcggggtcggggcgtttagttcgtttcgtttgttttcgtttacgttttttacggagttgcggtatcgttttttttcgtttttcgttattatcgtttttagggttcgggtatgttatttttttttggtttcggtcgtcgcgattttcgtttttttttttttttcgttttttttttttcgtttcgttaagttaacgaattttaaaagaagtatagcgagcggggaaggcggtagaaagttgtttcgcggcgtcggagtttttcggatttggaggatttcgggattcggcgggagagttaggcgggttttttttcgacgcgtgtgtgcggatagttcggagtcgggcgtgcggcgttgcgcgggggcgggcgtagggttcgttttaagtgttgcgttcgttcggcgtgggtttggaggttgtttagattatattattgttttaattcgacgcggtcgggttaatgtaggcgtcgcggtttttatttttattttttttgatattttcggatatgtttatagtaatgaattcgcgggatcgttttcgtagttttcgcgtttttttttttttttcgtttttcgcgttttggcgcgtttcgt

SEQ ID NO: 7467 - DNA, 1362 bp, Artificial Sequence
  Description of Artificial Sequence: Synthetic polynucleotide
cggttttcgggttttgcgaagggagttttgttcgcgaggcggagggtttggtttatcgagaagcgtattcggaggcggttgaggggcgcgcggggtacgtagtagagtcgtagttcggttcggattcggagcgtcggagtcgtaggaaggcgaggagaaggaaaaaaaggaggttgtcgtcggtttttgttttattttttcgggtagcgttgattcgttggtcgtcgtcggatagggttggtcgtcgggcgcgggatttcgtgcgcgttgtttatgttttcgtttgtcgttggttaggtgtgcgcgtagtttgttggtttttgggcggtattcgggggttttttatgtttcgcgtcggggttcggcgggaggatttcggagaggtagcgcggagggaaagagagagagatagtatgagaacgcgtagagttgtatttcgcgggggtcgggcgttagtagtatcgcgttgttttatttacggcgcgtttgtttttcgcgttgcgcgtttagcggggcgtcgagttttagaaattttagtatatggtcggttcggcggttacggtggtcgtagttgttttgtttttcgagcgttttttattgttttttgttttaagttttagagcgtagtttattagcggcgatcgcgatcgtagcggcggggcgtttattcggtcgtaagtatagtagtgcgtatttgcgggaaaggaggaaggggttggcggcgtcggggtttttataggggaggggtatttcggcggtagtaatcggcgtaggttaaggtattttgggtcggggttgcgcgcgagttaggtggtggtaggtcgggattggggagggtttttgcgtttttcgtttcgcggcgtcgttgttgatgacgcgcgcgggttttttcggtttcgcgtttgcggagttagtttcgttatttagcgattcgtttcggggagttttcgttgacgcgcgttgcgagtcgggttgcggtagtcgaggggcggggagggaggggagggggagttttagtgcggggagggtcggcggttgcgggttaagttttttttttcgttttttttttcgcgttggggagggggttcgggaaagacgtggttttcgtttggttttggaggatgggaggttttcgcggggcgggggggacggagggaggtattgagtgtttttgttttcgtagtggggatgtagtagtaggtggcggttatgtggtttgtggaggttcggtatttagaggcgcgcggtgagttcgtttcggcgggagcgtggcgaatgtggttttgggcgcgcgggtgtgtgggatacgtttttatttacgtggcgtatatggggatttggggacgcgggtgaaagaggcgt

SEQ ID NO: 7468 - DNA, 1092 bp, Artificial Sequence
  Description of Artificial Sequence: Synthetic polynucleotide
cgatcgcggcgcgtcgacgtttggcgggttacggttataaagcgggttttagagttttttttaggcggcggtaaagggggcgttcgaggttatcggtaagagatagattattggcgtttcgggaaaatagagtggggaagggcgagattgtgtgtttatttacgttcgcgcgggtttgagttggttcggttttggagggtttcgggattttagaagggggatagtagtgggggatgggtagaagggggcgattcgggttgtttaggtttttcgtagtttttttgttaacgagaggggttcgggcgggaatagttcgagtcgcgggggtgcggggcgcgtagttcgttttatttcgggagagtcgcgatcgtcgttttcgacgcgtgtattaagtgggggtgttcggttcgggataaaggatcgggacgcggatcgcgggcgggcgttattgtttagttttagcgtggagggcgagatcgtggtttcgaatttttttaaatttggcggttcggggcgcgtgggggggacgtttcgttatttgcgcggttataaaggagagatttatggtgtcgttgtagttagcgttcgagttttcgttgttgtcgttgtcgttgcgggttagtcgtttgtatagttggcggggatcgggttgagtagcgagcgttcggagatcgtacggcgtattcggttgtttttgggtttttggttttagatttttattaggcggagggtttcgagtgcgggggcgggcggggcggggtggggcggggttcggcggacggggcgtttttttacgtgattatttttcgttttattttcggggcggggttcgttagaaattttaagcgttcgtaatcgttttttttcgtgggcgggatggggaaattgaggttcgaggtcgtttcgttggttggtgtaagaattagtttgtaatttaagttttgagttgttggcgtttcgtttcgtgtagttgaatttaatttattcggggttgtgggtagcgtttttttggggttgatacgttatttcgagtttgaggattaagatcggagtgatttggttttttacgttaacgttttttttagagttcgg

SEQ ID NO: 7469 - DNA, 1092 bp, Artificial Sequence; identical to SEQ ID NO: 7468
  Description of Artificial Sequence: Synthetic polynucleotide

SEQ ID NO: 7470 - DNA, 1092 bp, Artificial Sequence; identical to SEQ ID NO: 7468
  Description of Artificial Sequence: Synthetic polynucleotide

SEQ ID NO: 7471 - DNA, 580 bp, Artificial Sequence
  Description of Artificial Sequence: Synthetic polynucleotide
cgtgtttaggggagttcgatagagtacgcgggaaaagtcgggtgtttacgttttcgcgatttaggttgtagagataagagaaggttaggttttgggaggacgcgaggtcgtttaggaatggtagggaggttcgttggggtttgattttggttttaatggattaaagtttcgacggagtaaggtcgggtgttcgtggtggtattttttattagtggacgttggcgaatgattatggaaataatatttaatagtagtgttttttatgttaggtatataatcgttttggcgtgggttgataattatgtttattttatcgcgtggtattgagtcgatcgtatatttagggtttcggtttttagggttcgtttattcgtttattgcgtgaagtatttattttcgtaggagtcggagtaggaatagggttgggttttggggcgcgcgtatgcgtaggtcgtgttttaggaagggcggggtattgagtcgagggtcggcgcggggcggagggtagggggtggtcgtattttttagggtatttgtgcggtgattgagaatcgattcggtaattcgcgggttcgggcgg

SEQ ID NO: 7472 - DNA, 888 bp, Artificial Sequence
  Description of Artificial Sequence: Synthetic polynucleotide
cgattcgttttttggtcgtttttttcgcggttaggcgtattttgtagcgtttagatcgtcgcgtttttattcgcgtttttaatcgcgagcgttcgtttgggtcgggtcgggcgttcgagattcgggagagattaggggttcgtaaagtagaagagtagatttagaaagaaaaaaaaaaaagcgagaagtgcgagaaaaatatattgaatttagttaaatatacggtagatgaaaaaaatattttgtttagaagttaaaaacgagttttcgagtcgtgagatattgttgcgttttcgttaggcgtgtaggtcggatgttaggggggtaatttcgaggttcgatggtggtttcgattttagggcggatttgcgtttatttttagtttttgtaattgcgggttaggagaaagggatttgttatggcgaagaaaatcgaattttttttaattaggtttttttttaaagagagaaaaagtaggtagttgggtaatttaatttaatttgggattcgggacgtgtgtttgggcgtttttcgggtagttggtcggagcgtgtgggttcggagtttttagcgttggtttcgcgttgtttttcgatgttattagtaaattcgtagggcgttttggcgtaggttcgcgtttgtagagtcggtttgggaagcggaatttttttcggtttcgatgattaggtttttttagggttttggtttaggttgtttttgtgggatagagttttatgaagggatatagaaatagagatagtttttgggcggcgttttcgggatgtggcgtttttgtgtttcggggagggggtattatttttgtttatgcggagcgattcggacgttgtaggggtgacgtcgggtagcgttcgttttgattttttacgg

SEQ ID NO: 7473 - DNA, 1483 bp, Artificial Sequence
  Description of Artificial Sequence: Synthetic polynucleotide
cgcggttttgggcgttggtagggggaggtttcggtaacgtttgggggttttaggttagtttttttcgggttggaaggtatcgtataggggttttcgttaatttcggttttcgcgcggtcgggatacggttatatttgttcgcgggggtttgttttttaggtcgtcgtaggtttttcggagtttaagaggattttataagtagttaaagttagcgtcgtttgttttttgtagaatattgttttttataagttttgtagattttttcggttttttagacgtttttacggttttcgcgaagttattttcgcgttttgaatgttttcgaatttttgtagagttttcgcggttttttggaagttttcgcgttcgtggagtttttttttcgttttcgggggtatcgcgggtttttagtttagttttttcgacgttggtcgttgttattttttacgaggcgtcggtttcgatttattttattgtcgttgtcggggacgggcgcgtcgggttaggggcgattcggcggcggcggcggcggcggcggggcgcgggacgcgggcgttagcgggggagtcggtttcgggcgcggcggtttcgcgtttgattgggttgcggggggtagcgggggtttatttttttcgggtgggcgtcggggtcgttagttgcggggaagggtcgcggcggcggcgattgatagttgggtttcggtttttgttattttggcgggcgcgtgttcgggtcggcgtgtgcgcgggcgcgtgtttgggggtcgtcgtcgggggatgggggggcggggggcgagtcggttggggttcgggcggcgggaacgcgtgcgcgttcgtttgagattcggggcggcggtttttggcgagtgcgcgggcggtttcgagttttcgagggagaggcgcgcgggcgcgcgggttagttttagtatagtagttaagagttagggtacgcgcgttgttgttcgttttatcgtttttcgaggggattgcgcgcgcgtgcgttttttcgttcgcggtcgttgaggtgaatgagcgcgcgcggcggttaaagttcgatataaaaggcgcggggttttatcgttcgcgttttcgggagcgttgagtttgaggttgcgaggggcggggcggacgagagtggcggggttgaggggcggggttttgagggaagcgcgaggggcgtggtcggggtgggggcggggcgtcgggcgggtacgtggcgcggtgcgttttttttcggcgcggacgtttttttagttttcgtttgattttagagtttatagaggttatcgggggagttagggttcgtgttcgatggttttatgatttttattatttggttttgttgagtattttgttcgttcggattcggggtatttttgattcgagggtcgtcgaggttatcggcgattgattttttttttttgtatataaggagtcgtggcggggtcggagagttgtagttttggggcgatattagtattcga

SEQ ID NO: 7474 - DNA, 3714 bp, Artificial Sequence
  Description of Artificial Sequence: Synthetic polynucleotide
cggcgtggttttgttcggaggggtcggtttaaggaagtgttatttattcggagggtggtttcgggttcgttgattagtttttacgtttgtcgtttgagttttattagtttcgtgtggtagtggcggtattagtcgttttcgtcggtcgagtggttttgttttgggtcggtttcggcgttttcgggagtagggcggttgtcgtatgggttttggtcgggttcggcgggtagtttttttcggggggatatttttagtagcggcggcggttcgcgggtcgggtcgttttcggttatttgtagggtgtgggggcggaagcggatagtgagtttgggacgttcgtcggatttagatttttgcgcgttttgttttagcgtgacgtttttgttaaagttaggagttttgggtacgattttggcgtttatttattttttttattttcggaggtttcgtttgcgggttcgttatttttagtaggaggttcggtttttagggatttagcgtatatcgcgagtattttcgtcgtttcgggttttcgtcgttcgtttttttttttaggtcgggtcgcgcgtatcgcgggttgcgtagcgtatagagggacgtcgcggtcgattatggtcggggcgcgggaagagttcggtaggcgttttcggttacgttggtttttcgggggcgtcgcggttacgtgattcggtttcgaggcgtttttatggttcggtttagtcgttcggaagttcgtagagtttgcgagtgtcgcgaggagcgcggtggtttcggtgggcgcgttcgggaggcgagggcggggtcggggaagggcggggttcgggttttcggggcgggcggcgaggggcgggagtttagagagtgtttcgtttttgtttagtgttgggcggcgcgtggggggggtagggttttcgtttttttacgcggtttcgcgtattttaaggattttaatttgttaggtgagtttttgtttcggggaggggcgttgggggcggcggcgaggatttagttgcgcgcgcgtatgcgtttttcgtttttttttcgggatattagggttgcgcgttttttaggaggcgtcgacgtttttttttttataggcgggaaaattgaggttgcggaggggacgtttttgtttaaggtttacggcgaggtgggtcgaggaaggggcgggatttcggtttcgagatttttaggcgtttttttagtaagtttagcgtattttgtgtgtcgcgggttattttaggtttaattgtcgcgcgtgggttagtgtcgtcgcggtgtgcgtttcgagtcgggtagcgatcgcgtcggcgtatttgtgtttcggcgcgtttgcgaacggtacgtgtttttatagtcgcgcgtgtgttcgtaagtgggtgtgcgcgtcgtgtcgttcgggaagcgggaggttttgcgggcgtgcgtcggatttgttgttagtaggtttggtagatgggaatttagtttcggaattaattgtttgtttgttttcggttgggaggtcgttttttcgtttttttttggcgattagttgttttgtgtttagtcgggttttaaatgtcgtcggtattcgcggtcgtaggtagtttcgggttaggtttcgggttagttttaaagttcgggttaagttaggcgggcgcggcgggcgggtttttcgtgacgcgagtgttttttgtcggtcgttgcgtatacggtttcgagattggggagatagcgtcgcgcgttttaggtttgaggcgtattcggaaatttcgaaggtcgtgattcggcggagattaggatacgcggttgtcggtatatacggtgaggttttcgtagagatttagtacgttaaagtgatttttttcgttttgtttatttttttttatttggataagttttttcgtttacgtacgtattttttagaaagtggggtgggtgattttttttcggtttttcgggtcgttgatgattttaggggttcgaaaacgtaagggggtatggaataaagtggtaggggttttttattttttttgagattcgtaagtttgtagtcgttttttatttagtttggggggtcggaagcgttttttttattcgttttttcgtagtttggagaatgaaaacgggcgttagtttatatttggatttgggtattgaggataatatttaaattttatttcgtattgtcggtagatagtatcgtttttcgtcgttttattgtttcgggatatatattttttatatttcgtttttttatttatatacgtaatatagaagtacgtagcggtcgggagtatcggttttgcgtttttggttagttatattcgtaattttagcgtttttatcgtcgcggcgtttcgggaagtataagtttatattttatattcgtagaatacggggtgtataaggttggagttatttcgggggtttacgattagttaggggtttcgattttttatttcgtttattttagtaaggcgtaaggtgagttcgagaatttttgcgttgcgtttttcgttttagttatagttttcgggtgggttcggttgggatatagttttgaaggtagagggagatttggataacgttaatgggggaaagtgcggtagcgagttttagttcgggttgcgggacgcggtttcggatttgtcgtttttttttcggcgtagtattttcggtcgcgcgagtcgcgcggtaaagtaacgggacggcgtttacgtcgttcgtttttttttcgatagtttttattttgtttcgtcgtcgtaggaggtggttggtgaagtttaggatgattttcgagtttaggtagagcgtttttatttttagtaggttgggagttttgcggggcgcgtcgcggggcggttcgggcggttggggtagcgttatggaagagggaagcgcggggagcggtttttagtgtttttcgttatcgtcgtttcgttcgcgcgtttattggtcgcgcgttcgtcgtcgtcgcgtttcgtatcgcgtagggtcgttcgttaagttttcggtttttcgcgtttcgcgttttcgagttttgcgttcgtttcgcgtcgcgcgttttcgcgtttcggtttcgtttgtttgcgtcgatagcgtttttttcgtttcggcggcgagttagatattagttacgcggattggaggtgtggggcgacggtttcgcgcgttattgggcggaggttggaagttagaatcgggtcgcggttcgcgtttatttgtttcgttagtttttagacgtcggtgtttattgtcgggtattcggtagggagagggtagcgcggttgttgtaaaattttttcgattggggtataatcgtagttttttttttttttaatttgttttgaggatacggcgcgttggggttttggtttatggaaacgtttagagtttagtgatttgtgtattttatttcgtttacgttttagagttttcgtttaattttggtttatggatttttaaggtttattttaatcggattacggagcgtgcgtagcgggattcgtagtttgcgtttttattttaggatttcgattgtgtcgttattcgtggttttttttgtttcgatttcgattttttgagggttggaagattcgggttggttgtcgggtacgacgattttatttttagggttcgaagttaggggcgggggtgggcgttttgtttgggtgtaaatttaagttcgggtttcgcgttttttttgtgggttgttttagtttcgcgcgt

SEQ ID NO: 7475 - DNA, 1266 bp, Artificial Sequence
  Description of Artificial Sequence: Synthetic polynucleotide
cggttcgggcgttaggtagaattttagttcgatgttgtcgtcgtcgggggagagggaattcgttgggagggatagtcgggggttggggaaggaagagcgggtgttgggagggtttaatattggcggagttttaggtggcgacgcgggcggcgagagttgtttcgaggcgggggtttcgggtaggtcgttttttacgtagtatacggagtagaagatttgttttttggcgagggacgggcgtcgttgatttagtacgtttaggattagttcgtcggcggtttttacgcgggttttgggttttagtttttcgtcggggggcgttttttgttgtttatttttttttttttttcgatttttagttttttttttttttttttttagttttaattgtagtggtaaggtttggggattgagaggttcggtgagtgttagtttcgtaggttgcgtcggtgttcggtttttattttagttcgggggttttaggtttttcgcgggttttggggcgttggtgttcgcgtagttttagtcgttttcgtagttatcgtcgttcggtttcgcggaggcggcgcgtagcgggggcgttcgggcgttgtttttttgaggtttcgggggtttagggtggttcgtagtgttattggttagggtttgcgatttttggggttcgtcgtcgtcgtttatcgtgttttgtttttcgtttatcgtcgttcgcggttcgcgtcgtcgttgtttatttagtcgtcgggatttttattcggcgttcgcgggtagcgggggtagtggttcggttcgattcgcggtttcgtttttgttttcgggtttttttttttgggttgggacgttttaagtttttttcggggagttcgtgtttcgaggttgcggcgcgtggggagtttggttcggttcgtcgttttttttcgtattttggcgcggcggggtatcgtttcgggggcgtcgagggtcgttcgttttgggttcgggcgcgttcgttttatatgtagttcggggcggcgtcgtagttttagcgagttttaggcgggatagaggggtttgggaggagacggtcgttagtttcgcgttattatcggtttcggttgtcggacgcgcggttcgagggcggtggttaaagggtcgaggggtttgtggcgtcgtcgcggcgcgtattaggaggtgtagtcggagcgttggttagtcgtagggtttttgggggagaggtcggagcgggcgattttttttttttcgcgttttatttatagtttttttcgtcgt

SEQ ID NO: 7476 - DNA, 1316 bp, Artificial Sequence; identical to SEQ ID NO: 7353
  Description of Artificial Sequence: Synthetic polynucleotide

SEQ ID NO: 7477 - DNA, 10783 bp, Artificial Sequence
  Description of Artificial Sequence: Synthetic polynucleotide
cgagtcgggataaaggtttttaacgggagcgggatatttgtttatatttcgtttattgttcgtagtttagtaatcggtttgtatttgtgtttgttcgggttcgattatttaggacgcgtcgacgaggggtttgttttaatttgggttattgttatttacgttatatattgggggcgaggtagttagggttgtagaaagtcgtcgagcggttcggggagaggtgtttttatttagcgttggtaattcgggggtagttggggcgcggcggcgttcgttgtagttgcgcgcgaggaggattcggtgttcgcgcgtttagtttggttcgcgcggaggagtttaggttgtgggaagattagatttggatttcgtaggggtggttttttgtgttttttttcgtttttagataaagtttttttttgatatttttttggggcgaacgagtattaggtagttaatttatatttttgtattttttttttaaaaaagttttaattagaagaaggggtggtaaatgcggcgtggttttttttaattttagcgtcgaggaggaagtgtaagtttcgggaaagtttagtttttagagtcgagagtggttggaaattttatattaatttgatttaatttggaaacgtggagcgcgtatttcgaacgtatttaaggcgtttaaaaagagattatattaaagaattcgcgtgggagaagaaaattggggagaaaacgaggtatcgtcgggttatttagcgatttttttttttcgtagttttttgggtttttatttaggttggagatataatttttatttttattttcgtaatttcgtttcgtcgttttttcgttgttttatttttagttagaggttggagagggagggggtcggagagggagggataatagagggtaggaaagagtagggtcgtttgtttttttttttattcggggaaagaggttcgtagagtttagaggtagtagggttagggttcgattttagacgaagttggagttttttatttttatttcgtttttttcgggatcgttcgtaaagtagaaagtgaattgcgcgttttttttggtcgtagagaggtggaggcggggggttgggggtgggaggtggggggaggcggagtgaaggaaataaatgagtttttagtaaataaagggcggttggaagggggcgggtcgtttggtggtggttttggtcggttcggagcggagtttttttttgggttttgggttttttcgcggttaattggaattaattatttgttttgttatttttagtatttatttttaagttttaattaaaatattgatttaggaggtttatagaagttgggtttttgttatttgaatcggattttgtttaggtaattattaacgatggaaaggagagattttcgtagttcggttttcgtttttttttttttttttaaaggcgttataaatcgttaatttttcggtttgtcgggggtgggcgcgcgggggcggggaggtaggaatcggtgaatgttaaagaggattttttttttttttttggtttttgttttgtttttttttttttttttttttatttttattttttttaagatgtaatttgttaaaacggtttttttaagtgtgtggattcgcgagcgacgcggtggttttttgtatgtaaatattgggtttaaaaaaaaaaaggttcgtttcgtttttgtaattaattgatacgttatattttttattttgttttagagggtcgttggttgggagcgcggagttttttaaaatttataattttatatttgtaaatattgtttttatttatttgatttttaagattcgtttatacgtggttaatttttgcgtttttaatgtttttttttttttttttttatttttttttcgttttttttttcgtttttttttttttttttttttttttttttttttttttttttttttttttttttttcgtttttttaggttcgtgagtggagtttagttttatatggattgatcgttcgggtaatggtttatttttttttcgttattagtcgttatcgcgcgtcgagcggtcgtcggagttcgagttgacgtcgttttggtattttttttggagttagaaattaaggtcggggttcgcggcgttcggcgcgtaggtcgttcggttttttgcgtttattttcgcgtgtttttaaagaagatagagagaggtattgggttgggttttattttttttttttttatttttagtttttttttttttttaaaaataataattattttaataattaaagttaatttttttttttttttttttagtttttttttttaatttttttttttttcgttcgttggggtaggggagcgttacgaattgattaagtgaagttataattttgcgatataaattttggggtttcgaattatgtcgttgattaatataaagacggggttttcggttaaggatattttagatttgtcggatattaacgatgaggagggttttgtggtcgaaggttcggaggaagagaacgaggggttcgagttagttaagagggtcgggtcgttggggtagggcgttttggacgcggtgtagagtttgtttttgaagaattttttttacgatagtagcgataattcgtatacgcgttggttggttagtatcgagggtttttagtattttcgtaagtagtaaaatttggttgtcgaggtcgtggttttttttatttttgtagtcgtagttcgggttggacgttgggagtgaaaggggaaggggttatgtaagttcggatttttttattcggattcgtagaaagatttttaatatttgtataggatgttttttgtttttttttttaagtttttttagtttcgggaaagaatttggtttttaaaattttttttaatgcgagaagttaaggagaaagagggagaagggttatattttttaggggttggtatatgatgttaattcggatcgatggttttagtcgtagttttcggatttcggtcgttgggagggattggtttggcgttttggaggtagttagcgagtttcgttcgggtacgggtggagggtggggaggtttcgggtggttcgggtataaatagtttattttgttttttgcgcgattatagaggacgttttgtgtagtgtagggggtgtttagaaggttcgaaagtagaaacgaaagtttttaaaaatttgttttaaatggtcgagtcgattaatgttgggattgtggggtattttttttaaaaatttgtttacgtttcgtcggagaggaaatcgtttaagggcgtcggagtttttaattcgcgatgatttttagtgttatttttttttttaaatttttatttatattatgtgagttttttgaaaggcgagtttttagtttttatttttacggatttttttttttattttgggaggtttcgacgttttcgttaggcgtagaggaaggtaggggttatggtaaaggtagcggggttgggttgttaggcgcggaggtttagggtcgtacggaggatttagggtgtttcgagtttggtgtaggttgcgcgcggtttttagacgtttgacgcgtttttttttttttttttttttagtgtacggtttggttgtcggggcgtttttttaggatttaagttttaagttttcggagttttcggtcgacgagttatcggataatgataaggagatttcgggcggcgggggggacgtcggtaagaagcgaaagcggcgagtgtttttttttaaggcgtagatttacgagttggagcggcgttttcggtagtagcggtatttgtcggcgttcgagcgcgaatatttggttagttttattcgttttacgtttacgtaggttaagatttggttttagaattatcgttataagatgaagcgcgttcgggtcgagaaaggtatggaggtgacgtttttgttttcgtcgcgtcgggtggtcgtgttcgttttggttagggacggtaaattatgttacgcgtttaaagtttaggatttggtagtcgttattttttaggcgggtatttttttttttgtttatagcgcgtagtcgttgtagtatatgtagtataacgtttagtatagttcggttagtattttttagtattcgatagtatattttttggtttaggtttagtagtggatttggtgagcgtcgttttaacgagattcgcggttttaggtttaggttttatttcggcggcggtggcggcgaggaggtttcggtttttatggtggttattattattattataattattattatggagtcgagttgattttcggttttattagggaggcgtcgggaggttgtttgcgtttttttggagtggtagattttatttatttagttttgtttatgtttttttttttgaattttgggagagggttgaattttacgtcgtgtttatagaatgtttgcgtagtttcgtttttttgttttttttcggggggattaaatcgttttagcgttaatgtcgttatttgaaaacgagaaaaagatcgattttttatttttgttttcgtgtattttgtaaaatatgtttgtgtgagtagcgatattgttagtcgttttttaaagtaagtggagaatattttaaaaatatagagaatttttttttttttttaaaaaaaaataagaaaatgttaaatatttatggttatgtaaacgttttgataattggtggtagatttcgtttttcgttgtaaatatcggtggtgattgttgttaaaatgatttttaggatcggtttgtttttcgtttgggtttaatttttttttttgtggtttgtttgggtttgttttttgttttgtttttgtttttgcgtttttttttgttttttttttttttttttttattttattgtgtaaatattttttaaatatggaaaagaaaattttgtaggtagggagttttttgttttgtttttcgggtttttagtttcgaatttggagtttagttattcggcgcggttttttaatagcgtcgggcgtagaaagttttcgattttttaaataagaattttaataaaaattttgtgtttaaaaaagaaaaaaagaaaaaatttttgttttttcgtttgttttattgcgtcgggtcggaggtttgggtttgggagtcgggttcggtcgttcgcggggtttttataggcggtttttttcgggcggggaggtcgggggtatcggggttttggggcgggcggggttttcggtgtaggttttttcgattataggttgtatttcgcgtttaggattggggcggggaggagaacgttcggttttcggtttgcgagcggtcggtcggaagtttagggtcgtttattttttttcgtattttttttggtttcgcgcgttgtttgaatttcgggcggtagcgttcggttacgggaggaaaagtgatttcgggagtcgtaaaggcgaggagagtaaatttttttcgttggtttaaatttatgagtggtttttttagtttgagaagttgttgaagttattatattcgatgatttttattttgttatatttgatttattttacgttaagaaagtgggtgggtgggggtttgaggttaagattggttgttttttttttattttttatttttttttaaaatttgcgggttggtgttgatttaggagatcgttaaggttgggggtgggaacggttagggcgcgcgaggttttggtttagggggtttgggggaagtacgcggggttttgggttcgggggagggaggggatattgtagttttttttaggatttttggttttaggaagttagggagcgagaatttttggtaattttagtaaattatgtttttttttttttttacgtttttatttttttcgggtttttaggttttttttcggggattggatttcgggtttttttttttttagcgttcggcggttcgaattagggtgtgcggtttttttaggttagtttttgagcgtggaattgggtggattgttaggaagtagaggtttgggggtggggtgagtttttcggatgggaagtgggtatatagtttcgggtacgttcgggaagggcgtatttattttttcggcggggaacggatttcgttttatttttgttgttggaggaagatttttttggtagatgttggcgtatatttggttacgcgggggagcgttttaggaagtttggttaattggaggatgagttttttttttttatttcgcgggtttttaaaaatatttgggattttagtttagagtttagcgggtgttgtagacgttgagggattgaacgtcggcgtatttggaaattgtatttttgtttttttcgaagttgtattattaaggttggggggttgggtggtagtgaggaggtcgggtaaaaggagcggttttagttgattttttcgttttttgtagttgatgattaggtttaatttaatatttaaagtaaatatgattattcgtgcgattaaatttgtgcgtcgatagtattttgcgtagtagtttagggacgcgatgatattttattttcgcgttttatatcgtttttggataattgagggttcggaagtttttttaatattttagtaaaggtttttttttattttcgggtttattttcggggaaagggtagtttttttaaatgttaaaaggtttttttttgttttttatattagtttggtaatgtttgggggtttatgttttattgtttttaaaggttaacgaattttttttaaatagtttgttgtgtaataattgaacgtttaatttgttttggtattaattatttaatatttatttgtaattttttttaattttaaaatttttttgggaggaaaggtgagggttttaagttttttggagcggagttgttagaaggtttgaggttattttgatttttttaggttttagggtttttagggtgagaatgattataagagatttttaggtttttagagaggaagggggaagcgtggaaggtttttattttggtaggtttttattatttgtttattgaggataaatttggagttgtggttaggatcgcgggtttgtaatttgggtgtgcgtttttgtggtcggtcgggagttcgggaggtggattcggcgttcgtttttttttgttttcgggtttttatggagttaataaaagcgtttgcggagttttgtgtggttttaattttagcgttttgggagcgtattcggcgcggggttcgttttagtagtttattttcgtttaatttatagcgggcggtataaaatcgtataatgggaaagttgggagtcggagatgttagaggcgtgtatattaaaaagggatagagaaaggatcgcggggatagagagaggggaagaaggagaaggggttcgttttttatttttcgttttatttcgtattatttagcgcgtttatcgtcggtagtgaatttcggagttaggtagaagtttttttggggttttgttgggtttgttattgggtttttttgttatttacgggttttatgttggattttatatggttagttgggtcgagggagcgcgaggagggattcgtataaaatttaaattgtgttcggtttttaaattttgtattgttgtttgtgaaaggaagacgtattaaaaattcgtgttatatttattggggaggaggttggaggaggggagaaaaagttatttttgtttttgatggtttcggagggcgtttgtttcgtttaggtttcgtgatattgaaagttggattttttttattttgttttttttttttaaaatttttttttttttttttttttataatttcgtttttataatttttttttttatttttataattttttttttttataattttttttttttttttatttttttttttttttttttttgtttttttgattttaacgttgggatgggagttcgcgaatttgcgtttttagggtttggtttatttgtgcgtattttgtttattgttgtgtgtgtattaggaaattaatttttgtttgggagttttgtattatcggatcgttttggggtttaggaggtaatttagggtatttagggtttgggtgatgttcggttttttacgggtttagcggtttttgggtagatgaaaatttattttttgatttcgtaatcgatcggtttcgaagcgttcgcgcgcggagtcgtttttttatttatcgcgagaaaggttttgagaggttaagggtgtcgtttagtttcgggtttagttagatttgggttgtagtcggttttaaggcgatttgcgttcggtcggattatttggttattaatttcgaagagttaaagacgcgcgcgtttttttgaattatgcgcggggatttattttattggttttttggtgcgatgggaaattattttagaaattttttttaatagcgtttttttttatgttggaggagggagatattttttttttaatttttaatgttttttgtatcgcgtgtttataaaatttagtattagggagatatagtagggtttttaaggaatttgtttattttttgttttttttaagcggtttaaattggcgcgaggtagtcggaaataatttgggttatgtttttttttttgtaattgttaggttaaaatttttataagtagtttttaaataaattatatgtattaaataaaaatagtttatgttgagttttgtggaaataaaaattggaatttagatatgttttttataaagttattcggtttttaatgagtagaattgagttggtggaaatttcgattaatgggaaatttggatgcgtttttttttttatttagtataacggttatatttagtagaattagataatttggtaagagtggaagtttttttttttaatattttttattttagatggggaaataatttatttttttatttattgattgttgggtttagttgagatttggtgtgtatttttcgagtttttttaagagtttggttattgaaaagttaatttaatatttatcgagtataaggatagtttttagacgtatttattaaggtttatcgttaagtgattatttggattgaagataaaggttaggggagggggcgtttaggtatattagattttttttatttgggttttttttatttagaattaggaaatcgggagcgcgtttgtgcgttgttgaagtttttttttcggtgttaagtggcgggcggattagatattgtgttgggcggtattttaggaaatatgtatttgtggttttttgagaggttaagcgtagtgatattttaaatcgtgtcgatatattattttttatttaggatttgtaaataaatttttgattttttcggcgtattatagtcgtcgttatttcgttaaggaagcgatttgagttttattgtttttattaacgtttcgagatatatatatatatatatatatatatatatatatatatttttttttcgtattttgatttttaaaggttttattttttttttttcgaggtatcgttattaataaagaggcgaataggttttagcgtcgttattcgagtaagcggggaaatgtgggttagtagtttaggttcgcgcgcggatttcgcgtacgttttacgcgttttttcgggtcggagaatcgagcgtgtgtcgcgtgttgtcgtcgttaggaggcgttcgagtttagcgttttcgagcgtttttgcgcgcgggttcgggtagagttcgggagtcgtcggaggtagttgcgtattagcggattcgcggttcgggtcggagttcggtgagtggtgttaagaggtggcggcgagtcggaattttggggagagtcgcgagttagacggcggcgggtgtttgggaggtgcgagtcgatttgtgttcggttgtggttttttcgttatgtttttttttttttacgtgcgtattatcgttcgttttagtttcggtttttatcgtgtttgggtatagattatagtcgattggtttaggagcgttttggttattgggagggttttattaggcgttagggcgcgttgttttcgcgattttagggtttttggcggcgtcggtcgcgcgggtggacgcggagagggcggtgttgcgagggttcggagagtgggtgttcgcgtggggaggcggttcgggagcgcgggagcgatgcggaggagggattcggtttggttgtaggttttcggggcgggggtttcgggaaggagagattttcgtttttcgttcgttttggattcgggtttcgtcggattttcggtttttgtcgttcgtcgtttggaagcggggtaggcgtatagtttagacgttagggagagacgtttcgtcgatttagatcgtggggttagggttcgggaggtaagaacgttttatatatagtagggtattttaggtaatttttatttcgtgttgaggtttcggttagggtgtaaaggtgttcgggaatggaagggatacgagggtgtggacgtttcgtattttatttacgtttggtgttttttgagaggttgggcgtggggtagagggtaggggataagggggtgatattttttaaggttttttttttaataaaagtagggtttgtagttttagtttgattcgttgattgttgggtggaatcgttttatattaaaggtatcgtggttttaaatattgttttttttatttttttaagttttcgttttaaaattagttgtcggtgggtcggtgagggcgtttgtagtatttaggtttttcgcggggcggcgcggttggataagaaaaggtttttcggttggggcgcgtagcgtagtttagatatttgcgggattcgagatgttttcgcga

SEQ ID NO: 7478 - DNA, 810 bp, Artificial Sequence
  Description of Artificial Sequence: Synthetic polynucleotide
cgagtgtcgattcgtttgggcgggattttttgagcgtatttttttcgagcgcgttagtgtttttgggagaggtttgtttgggtgagggattggacgtcggttttttcgtaagtcggtcggttgagggtgggggtcgaggcggggtcgggaatagttttcggattagggtttagataatttcgttcggcgtttgttttttcgcgcgtatttgtcgggttcgggggttgttagaagaggtcgtagttcgcgtttttcgggtttttacgtttcgtagcggcgttttttttttcggcggtacggattggttgcggcgtcgttttaagttcgtttcgcgttgtcggcggggggcgtcgcggattagagcgcgttgcgtcgttatcgtcgtcgttatcgtcgtcgtcgtcgtcgtcgttagtagtatagcgcgtttcgggtttcgcgcgtcgttagtttttggttcgttcgtcggtttcgtcgcgttcgttagtttcgtagcggagtttcggttcggtttcgggtcgtcgttattacgtcgcgcgtcgtatttcgcgttaagaatggggcggttaagttgtttaagtcgttcgtcgtcgtcgtcgtcgtcgcggtcgaggcgttcggcgtcggcgcgggtatggagcgttcgtagagtcgttttagtttgttcgtttttttcgaggcgttcgttatttatttttcgtgtatgaattttttcgacgacgaggacgtaggtaagcgcgcggttcgttttttagattttcggggtgtttcgggatttaggttcggtagtttttttttcgattcgtgcgt

SEQ ID NO: 7479 - DNA, 1142 bp, Artificial Sequence
  Description of Artificial Sequence: Synthetic polynucleotide
cgcgtggagcgcggtttcggggtagcggagagtggggttttaatatttagtatatgtagattttggggcggtgttgttaggggcgcggattcgggattatcggagtatttgtatcgcggggaaagttgatagggcgcgcgattttaggaggttgtcgcgtcgtttggtgcgtgaagttttagggtagcggagcgcggggattttgaaggttgtcgcgtgtaggcgaaggggtcgtagggtggtcgtttttgggagagtagacggggaagaaggtaacgggagggagggcgtagcgcgagtagtttcggacgcgggtttaggaattggtcgcgaggagcgtaatttagtaggcgcgttagggttttcggatttaaggtgcggggtttcgattgggcgtttggacgtttcgtgacggtggcgtcgttgttattgtttcgaagcgaggcgaggttaggcgttgcgttttcggttgttcgtttttttttttcgtttcgcgtttagtttttttttttcgtttcgttttttgtttcgttttttttttcggcggttgttgcgtcgcgttttcggcgtattcggagttcggcggggatcgggaggtagagacggggcggtcgtggtttcgagggcgggagttgagtcgggtttcgggatcgaagtttggcggcggtttcgggaggtagagcgggtttttcgggcgatttttaggtttttttcgcgttttcgtttcggattcgtgggtagtcggggggaacggaagtcgcggtcgggttaatttcgaggcggggacgtcgcgacgggaatttgaggtgggaattttgcgcgttgtagtttcgtcgggcgttattaaagcgcgaatcggatttcgagtttgtaaattcgggttcgggggcggttgtacgtggtcgtggttttgaattttttgcgggggtttcgaaattcgtttgcggggaggttagggcgatagaggattcgggagttatcgttggtgcgtggcggcgtggagcgcgtttgttacggttaaggtgcgggttcggtttcggtttattttaaggggttatcgggatgcgaagttcgggacgttcgtcgtcgcggtgatttcggcgggggcgtatttcggttgtgggtcgaggtttttttttcga

SEQ ID NO: 7480 - DNA, 2885 bp, Artificial Sequence
  Description of Artificial Sequence: Synthetic polynucleotide
cggaggtttcgggaaagtttattaagttttacgcgtttcgttgatagatgtttaggaagcggttggtagggaagaggcggttttgtagtttatagagttttttttttattttcggggagttttaggtcgcgttgttttttattttttcgtttttttcggtttgtaacgttcgtggcgttttttaataggttttagaaatttttttttattttgttttttaagtttggttatagggcgtttcgagtagggagtgtgcgggtttcgggtatacgttgcgtcgcggttgtattagagcgtttacgattttgatttcgattcgaagcggttttttagcgggatagggtgttggcgttggcgttgttgttattgcggcgcgttttttcgttttggtttttgcgtgtcgttagggatttttgcgttagggttagatttaaagacggatcgaggcgggtgtttatttgggacgcgtgcgtttggtggcggaattttcggggcggtcggaggcggcggtcggggagtcgagaagtaagtattagcgttttaggatcgcgcgcgtcgtttcgcgtcgtttcgcgtcgtttttcggtttagagtttttattttcggtttgtgagtttgcggcgttggtggagttcggttttaggaagaggagtttattcggttttttttgattggatagtagcgaggttttatcgggcgttttcgcggtttaaaatcgaagcgggggcgagggggaggtagagttcgttttttgcgcgtcgcggttgggagggagaggaggtgggagagaaggaagaggcggaggaggtagcgggcgtcgaggttttgggattcgtaggtaagttagatcgacgcgtagagtcgggagttttatcgtagcggtagcggtagcggcgggttcgggtcggtttcgggggttgtttatttatatgagtattcgtttattcggcgagttttcgagtttaggcggcgcggttatggtcgagtttaagtcgttgtcgggggacgcgtatttggtattaagttacggttacgcggcggcggttgcgggtttcgtttacggggcggcgcgagaattcgaagcggttcgcggttacggtatttcgggttcgggcggcgattttttcgcggcgtttgtatttcgcgttttagtttaggcggcggagagtagcggcgaatagagcggggacgaggacgacgttttcgagtagcggcggcggcggcgcgggttagggagcgcggcggacgggcggcggcggtcgcgagagtagcggtttttgcggtttagtattaacgcgcgcgagcggcggcgtatgtacgatttaaacgacgcgttggacgggttgcgagtcgttattttttacgcgtatagttcgtcggtgcgtaagttttttaagatcgttacgttgttgttcgttaagaattatatttttatgtaggcgtaggttttggacgagatgcggcgtttggtggttttttttaattagggttagggtttggtcgcgttcgtaaacgtcgcgtttttgacgtttttcggttaggttattgtgtgtttttttttcgtaggcgtcgttttggggttttgttttgataagtgcgtcgtttttttcgggacgtttttcgcgttttgtaaatattgttacgagaagtcgtgatcgcgcgggttttcggttttttcgtacgcgtttttcgatcgtttttgtgattgtttttttgttcggataggaaaggtttggagggattttgtagattaggaggagggggttcgatttcgtttttagtttgtgcgcggtggatagtttagcgtagcgggaagcgttaaggtcgtcggggcgcgggattgagttcgagagtcggacgttggattttgcgttcgggaattcgcggtatttattgggtattgtcgggatttagtaagtttaggaacgggggtgggtagagtatttttcgggtattgtcgttcgtttttaaaagaagattatcgcggggttttagggttacggcgaggacgggtattggttagatttcggataggcggttttggtttcgggcgtacgaaaggtggagacgaagaaaagtcggatttattggtttttgatttttttgtagtgggtttcgcgttttcgttttagtcggtttttcgtgttaaattgtagggtagtgttttgtttttgaggacgcgcgtggtcggtattttttatttcggtgatttcgagatttcgtagttttgcggagagtttacgatggtcgtttgtagaggagttggatcgcgggcgtaggaagatttcggggaaggttttttttaagtaggagtttgttttatttatttgggaattggacgtcgtcgtcggttgtttcgaagtttgaggaatttgttttttaaatgttttttggtttttttttttcgtcgttattcgttgtttgggacgttcgcggggtggagttggatggagatcgttttgcgggttttttgtttcggggggttgcgtggaggagggtttttatagttcgcgttttatttaattttgacggttaggggagggtttcgtttagttttggtgtttagtaaattttttttttatcgattttttttttttttcgagggaggaggtcgggttacgggtgagtaagttgttgcgggtttcgtgtttcgtcgggtgtgaacggagatgcgttgcgtagtgttcgttttgcgtagtttttagttttgttattattcgggatttagggagtcgggtagggtgttttcggggatttatttgttcgcgtcggtttgcgtttcgcggtttcgtcgtagtattcggttttattaatttaattttttcggttgtcggtaatgttaaggggagagggtcgtcgttttgtaacgcgtttgtttatagcgt

SEQ ID NO: 7481 - DNA, 1460 bp, Artificial Sequence
  Description of Artificial Sequence: Synthetic polynucleotide
cgcgtttagttggaatgtagagatcgtcgttcggttacggcgtataggacgattcgttcgttcgtcgcgattgtgtatgggtttcgggatacggggtcgtcgttgatacgcgcggtttcgtcgtcggtttcgtcgttttcgtcgcgttcgtcgcgttcgtttcgtcgtttagttcgtagcgtagtttttcgcgtagtttcgagtcggggcgttatggttttagttcggtcggtcgcggggaacgttaggcggtagacgagtcgcgtattcggcggtttatgaacgtttttatggtgtgggtaaaggacgagcgtaagcggttggtttagtagaattcggatttgtataacgcggtgtttagtaagatgttgggtgagcggcgggagggcggtagagaagggggagagggcggggggggttcgggtcggggtggggcggggggggtaggggtttcgggtcgcggggtgcgggggttgcgttaaattttcgcggggcgtttcgggcgtacggagggttcggcgtttattcgttcgacggcgttttatttattggcgtttacggttcgtaggtaaagcgtggaaggagttgaacgcggcggagaagcggtttttcgtggaggaagtcgaacggttgcgcgtgtagtatttgcgcgattattttaattataagtatcggtcgcgtcgtaagaagtaggcgcgtaaggttcggcggttggagttcggttttttgttttcgggattagcgttttcgtagttatcgttcgagttttttttcgcggcgtttggttcggttcgcgtttttcgcgagttgttttcgttgggcgtcgagttcgacggtttggggttgtttacgttcgagcgttcgtttttggacggtttggagttcggcgaggttgttttttttttatcgttcgcggcgttcgaggattgcgcgttgcggttttttcgcgcgttttacgcgtttatcgagttgtcgcgggatttcggcggttgttacggggtttttttggcggaggcgtttaggatcgcgtttttcgcggcgtcgttcgttggtttgtattacggtattttgggtacgttcggttcgtatttcggttcgttgtcgtcgtcgttcgaggtttcgtcgttggagagcgtcgagtcgttggggttcgtcgtcgatttgtgggtcgacgtggattttatcgagttcgattagtattttaattgtagtcggattcggttcgacgttttcgggttttcgtattacgtggtattggttaaattgggttcgcgcgttatgttttgtttagaggagagtagtttgattttcgcgttgtcggacgttagtagcgcggtttattatagcgcgtgtattttcggttaggtcgtcggcgtcgttcgggtttttgtagcgttttttttcgtagttttcgcgatcgattcgatcgcgtcgttgtcgttttgtttttttatacgcgt

SEQ ID NO: 7482 - DNA, 1560 bp, Artificial Sequence
  Description of Artificial Sequence: Synthetic polynucleotide
cgttttttaatcgaatttttttttttgggaatcgtagtttagcgcggtaattgagttatcgtaatcgggcggtggggaggaagggtggtttaggaaatcggcgagggagaaaagcggtggaagggagagttttttttttggagcggttttagtagtataaagtgttggttatagcgtttttttcgtttttagattgacgagtagtggcgtggagttagcgcggaggttgttttttttttttttcgagttcgtagcgcggagcgcggtttagtattaacggagtcgggggcggcgtttttgggatggaaaagggttaaaggggaggagtggggtgggggtgggggttttattggtttattataaaaggatcgttcggttgttcggtttttgtattcgttggaaagcggtttcgagttaggggttattgtaaagttagggtgcgttatcggacggagaggggagagttttgagtagagtgagtaatatcgtagttaaggcggaggtcgaagaggggcgttaggtattaattttcgcgttgttttagtttcggaggcgttttagagcgttttttgttttagtagagttattttgtttgcgtttgttttttagtgtttttaattttgcgttggaagaaaaatttttcgcgcgtcggtagaattgtagcgtttttttttagtgatttcgggagtttcggttgtagtcggttttgcgcgtttttttaacgaataatagaaattgttaattttaataatttagagtaggttaacgaggttttgttttttcgattcgaattaaaggtttttcgtttcgtgcgttgttacgagcggtgttttttggggttttaatgtagcgagttgtgttcgaggggttcggaaggcgtaagttgggtagcgatatggggaacgcggagcgggtttcggggtttcggagttttgggttagtatttacgttgttgttgttcgtcgcggcgttattggtcgtgtcggacgtattcgggcgttttttcgaggaggacgaggagttagtggtgtcggagttggagcgcgtttcgggatacgggattacgcgttttcgtttgtacgtttttgattagtagttggatttggagttgcggttcgatagtagttttttggcgttcggttttacgttttagaacgtggggcgtaaattcgggttcgagacgtcgttttcggaaatcgatttggcgtattgtttttatttcggtatcgtgaatggcgattttagttcggttgtcgtttttagtttttgcgagggcgtgcgcggcgttttttatttgttgggggaggcgtattttatttagtcgttgttcgtcgttagcgagcgtttcgttatcgtcgttttaggggagaagtcgtcggtattattatagttttattttttgcggcggaatcggtagggcgacgtcggcggtacgtgcggggtcgtggacgacgagtttcggtcgattgggaaagcggagatcgaagacgaggacgaagggattgagggcgaggacgaaggggtttagtggtcgtcgtaggattcggtattgtaaggcgt

SEQ ID NO: 7483 - DNA, 5118 bp, Artificial Sequence
  Description of Artificial Sequence: Synthetic polynucleotide
cgttttttttcgcgatagagttttcgagtttagcgtaggttagttttcgttttttcgcggtttttggtttttttgtcgttagaacgcgtcggcgttagtcggtttatttggcgtcggaggtgaggcgcggtaggttgtcggcgtttatagtcgatacgtggtggtgcggcggcggtatttggtatatgttgtaggggtagggtatgtcgttttagtgttggaagttttcgttcgttttattgtcgtcgttttcgttttttagcggggcggtcgcggtagtagacggagatttgagtaggtcgtgcggtggacggatggagtcgatcgacggtagttcggattcgggtagagaggcgttggatatagtcgcggttgtagcggcggtagtagtcgttgcggcggcgggcggtaggatggggtggtgtatcgcggggtgatgtgcggcgtgcgttgttgttgtcgggtgcgcggtggcggcgggtaggggcgcggagtgcgttaggtcgtcgtaggtcgacgggtggaagttagcgtggtggttttcgtagatttcgtttattagtcgttttattttttttagcgagttggtgagtatgaggatgtagttgcgcgttagtagtagcgtggcgattttggaaagtttgcgtatcgaagggtcgtgtgcgtacggtatgatttcgcggaggttatttatggcgatgttgaggtcgtgtatgcgtttgcgttcgcggttgttgattttgagacgtagttgttgtagtttcggttttgttatttgttttttgttttttttggtggacgacgtagtcgtcgacgacgtagacgacgaggtgttggacgaggatgatttgaagttattgttttttagtttgtttttaggatgcgcgttcgtagagtttatagcgtcgcgtagttcggcgtttagtttcggcgggtagttattcggggtggacgaggatacggtgtttttagtgaaggcgttgtcgttgttgtttttatttcgggtcggtagaaaaaggttatcgggttttggcgacgacgggcggttggatattaggttggcgttcgagtttatggttttaggggaagatagtcgtcgtagttttcgtagggttttttttttttcggattcgaaaatttttaggagaggaggagaaaagagagagaatgagagagagagagagggagagagagagagagtgagttagtgagagatagaaaagttgttttcgtttgtatcgtagtattatagcgcggggtttcggtataggtggttcgtggtttttcgtttttttcgttattatttttggttttttttttagttgtacgcgggtatttataattaagttttttttattttttttttgtttttatgtaataggttattttagggagcgttggtgattttcggggtgcgggtggtattttagaggtttcgggtttttagttaggtgtgggaaaattgagttttcgggttggaataaacgagtgggaagtgagggtttttttttggggagaatggagatttagatagagaattaatgatttggttttttaaacggatttattttatttttatcgatattacgtagtaaatatacgtatacgtatatgtatttagagtcggcgcggggtttagagtttatgtgttgtatttggagattacggggagtttattagttgattggggtttgggtagaaagagttgttgtcgtttcgatttttcgtttttggtgagggagatgtagcggtgagtgtggggaggatagaagagtaaagtcgttttggagaaatggttcgtagagtagggatttagattttttgtatcggagtattttgggttatagtcgagttgaggagagtttgtttttgggatttaggttgcggttgttgtggggcggggatatttattttggatgcgatttgaggagttcgtttcgaaaagttttaggggagaatttggtatcgggcgttggtgtcgcgtcgatttataataagtattcgtatttttaggggttcggtcggtttttatagttcggtggtagcggcgacggcggtagcggtggcgggggcgggggcggggaataatgtgcgtgttttggaggggttgtttcgttaatgagttgggttcgtcggggggttgggaagttgatgttattcgggttaatttcgtttaatgaaattcgttaggtcgggtatacgttttttttttgcgtataattaatgggcgttcgtggtcgggagatttttggggagggattggaggagggattcgaggaggcgagggggaggagaagggcggtttaagggggatggagggagggttgagcgcgtttgggattaagggagaaagggaacgtggttaaatttttgtaaaaaatacggttattatagagttaggttgggggatgggatggtttggagattttgtagagtttaataaattaatttgatgttttacgtagtcgtattttttgggatgcgcgcggaaaattttggcgatttaggattcggggttggggttttttttttagttttttttttgtttggtttttcgtcgtttgtttttattttattggttttattaatacgtgggtatttggcgttttaaatgtaaacgatgtttaggtataaagtttttattattttggtgttttattcgcgcgtttaggagatggtcgtggttgtagtttcgacggtagtcggtagcgtttttagttgggggtagggatttgaggggtagagggcgggtaaggagggaggggacggattttagaagagtgttttgaaagaatttataatttttttttaggttgaggatggtgtgggtatagggacgagttattttcgtacggtaatcgcgttagtataagggtagggtcgtgtttgtagttaaatatttttttatttattagtaggggagtcggatgatagtaagtatttttagtgtcgtttttgtgattattatacgttttggggtaggggtaacgttggtatttgtagtttaagtagggtttcgttgtaaaaggttagtaaagagtttttcgttttagtcgtttgttttttggaattgtaaagagaagttttaggtttgggtaaggtttttttacgttgtgggttagatagcgagatggaattattcgcgatcgcgttgggatatgttttatcgattgtaggttggttttgaaatttgaaaatttttgacgatgaggaattaagttcgaattggagaagtattttacggaggtagttgaggtacggatgtatttatttattttatagatgggaaaagttagagatcgtgtgtagtaagtttatagaaaaaattgttaagtttttatagagtagttttgtttggattatagatgttggcgttggcggttttttatagtataggtagttatttgttttttttagtttttaatttttttttcgagttgaattttttatatttatatatttcgaatttagatatttgtttttgtagatttcggatgttagtatttgatattgtgagcgtacgcgcgggtatatacgtatatagttttttagggagtgtgaggaacgtcgggttattttcgttgttggggaatttttattgtgtaagtacggttttaaaaataagtaaataaattagtatagtaaataattggtttttaagtagtaaagttataaaataaataaatataaagagaaatttacgttattgtttttagttttgagatatgtttttttttgcggttttcgttagaagtttagttcgttttcgttttcgttttagtttcgtgttttttggagtattattttttaattcgcgtgttttttagttggttttgtagttattcgttaaatatgtatttaaaatatgaagaattgaagcgtggtgttatgtcgtttaacggttataaggatgatttataatcgtttaattagtagaatttgttattcggacgacgtagggagcgggggggtggggattagaaagggttcgggtatttgtagatgtttttttcgggtttatttcgttaatagtagcgaggttatgtgtggtgcgcgttgtggggttattagtcggggcgcggagttgtgcgtttgttagtgtagttaataaatattagtaggcgtaacgtgcgcgttttttggttgtagtcgttgaggttagtttagtcgtcggtacgtgtttcggaattcggtttttttttttgttgttgtttattggtgtttgttttgcgatcgatttgcggcggtgagagtaagcggttttaggttttttgcgcgttcggtttagtggttggagttgggagttaggggtgaaagtcgaggggttcgttttggtatggcgcgagtttagagtttggaaggtaaagtcggaagttttgtgttgttgttggttttttttttatttggtaggttttttttaatattttttcgtcgtcggagtagtttgggaggtcggggaggtttgtgtcgtttttgggtttttttggttttggtgttaatcggatgttgagtatttttcggtgtgttttttatgtttttttatttcgttttaggaataattagaaattagatttcggtgtttaagtttgttttggtgcgttttggaggcgtttttaggatttgttcgggttttgcgttcggcgttcggggtgggcgatttgggcgggttttaggtattgcggtttttattagcgcgcgtagttggggtttttttttggggaatggagtgtttatttgtagaggttaatgggtttcggtttcgggagtttttggttggttttcgcgttttggtgttgttggtttttttcgtgttttttttttttttttgtgttttttttttataaaagatcgggtgcgtgtcggggtcggtttttgttggatcgtcgggcggttcgggaggagttcgtgttaaatcggcgggttttcgcggggttttagggcgtagattttttattgtttttcgggtttttttcgggttttttttttgatttttttttttttttttttcgagtttttgtttatatttaggttgcgtttcggtttggttgttaaatagaacgacgtttttgcgtagagttgattaggggtggcggcgggaggtaaggttttcggtatcgg

SEQ ID NO: 7484 - DNA, 1423 bp, Artificial Sequence
  Description of Artificial Sequence: Synthetic polynucleotide
cgttgcgggataggtttttagagatcgtttcgggacggtcgtgacggttttcgagggatatgagagaagaggagcggcgtttaggtaagttggattttgcggtcggaattcgcgtagaaacgaaaatttttggaaggggtttagtttcgagtttcggaggcggataagttgagttttttggttgtattttttggaggttgttggttgtagacgtcgtcgttttttaagggcggttgttatcgcgtgcgtcggttagattaggtcgcggtgttttcggtattttcgcgtttcggcggttgtattcggtttttttttacgatcgaggtttcgggtatcgcgttttttttttcggacgttttgcgcgacgtcgttttagtttttattagtatcgagggtagttcgcggttattttataaacgttttagtgtcgtaatcgtttttatttttattatttttaatgtttgtaacggtttttaatgaggttggaaaaatattatttttcgttaaaagcgatttcgagttaggaggagcgcgtattttcgcggtttttttttttatatttttttttttttgattttttttttttttttttggttttttttttgtttttcgtttttttagtagtcgcgtgttgggttttttttttgttggggtcggattttttttttcggtcgttttagtttttgttttttcgttttttttttttttttttttttttttcgtttttttttttttttttttttttttttttcggagtcgttagtcgcgttttaaattcgagtagggcgcgtagtgtttaaatttgttcgcgcggttcgcgtttttggtttcgagggcgcgcgtacggatacgcgagtatatttatatttacgcgtatacggatacgcgcgtattcgaagattttcgcgcgttcgtatttacgcgtatttggttacgcgcgtgtattttcgtttacgcgtttttgtttcgttttcggcgcgtatttcgggttcgtaagtcgcgcgtcggggcggtcgttttgtttcgcgattggcgggagtcggagtttttttgaattcggcgtttatattatgggttgagttcgtcggcgtcgagggagttagtgcgattcggttcggcgcgtacggttaaggtacgcgcgttggtatacgcgggcgcggatacgcgcggatatatacgtgcgggatacgttttttttcgacggcggcgttaatttttcggtaagtttagcgttttacgcgatttgttcggtttttacgttggttatagcggttgcggggacggggaggaaggtagcggggtggttttaggggtttattttgtagggttttttcgacggcgtcgggataggtggggcgtttagcgtcgggagggacggttcgttagtgcggggttttagggaggcgcgtgtagtcgggtgcgg

SEQ ID NO: 7485 - DNA, 1384 bp, Artificial Sequence
  Description of Artificial Sequence: Synthetic polynucleotide
cgagcgttttttgaagtgacggggtcgggacgcgtagggaggcggtttaagaagcgcgttttaggttagtttagaatgcgttcggtcgcgattaggataacggcgggtggggttgggggcggttgtcgggcggggagcggtttcgcgtttttagttattttttaagagtcgttgtttttttaattttagttgttagaggttttgtgattggttgcggtacgatgattcgcgtacggattggttgtttcgggtcggggggtcgggttcgggggatagaattcgttttcgaatttttaaagagggtatttttcggtaggagttggtagatttaggaggtgcgatagattcgcggggtaaacggattggggttaagagtcgggagcgcgggcgtaaaggtattagggttcgtttagggcgtcgcgtagtacggttttgggggttttgcgggttttcgggtgcgcgtttcgtttttagttatggggttcgtagcgttggagattttgggtttggtgttgtgtttggtgggttgggggggtttgattttggcgtgcgggttgtttatgtggtaggtgatcgtttttttggattataatatcgtgacggcgtagattatttggaaggggttgtggatgtcgtgcgtggtgtagagtatcgggtatatgtagtgtaaagtgtacgattcggtgttggttttgagtatcgaggtgtaggcggcgcgggcgtttatcgtgagcgtcgtgttgttggcgttcgttgcgtttttcgtgattttggcgggcgcgtagtgtattatttgcgtggtttcgggttcggttaaggcgcgtgtggtttttacgggaggcgtgttttatttgttttgcgggttgttggcgttcgtgttattttgttggttcgttaatattgtcgttcgcgagttttacgattcgtttgtgttcgtgtcgtagaagtacgagttgggcgtagcgttgtatatcggttgggcggttatcgcgttgtttatggtaggcggttgttttttgtgttgcggcgtttgggtttgtatcggtcgtttcgattttagttttttcgtgaagtatttagcgtcgcggcggtttacggttatcggcgattacgataagaagaattacgtttgagggcgttgggtacggtcgggttttttttgttagttacgtttgcgaggcgttggataagtttggggagtttcgtatggatcgcggttttcgtcgggtagcgcggcgcgtaggtttttcggaacgttcggttttgcgtttcgacgcggtttttggattcgtttttgtttgcgttcgtagttgatttttttttgttattagttcggttttgtttttaatagacggaatgaagtttttttttttgtgcgcggcgt

SEQ ID NO: 7486 - DNA, 1361 bp, Artificial Sequence
  Description of Artificial Sequence: Synthetic polynucleotide
cgtcgaggatgtggttttcgtttttcgtagtcgtcgtaggagtttttgtttttaaagcggtaggtaggggttttagcgggtttattttaatttgggaaggtcggtgcgtttttttatagatttcgtagggcgttttttttggggattattgaagttttggtatttttaattttagttttttcgcgttacgggaaacgaagacgatatttttttgaataatttcggatgtgttattatagaggggtattttatattggtttttattttaatttttatttagtatattgtttgtttattttttaaatttcgtgcggattgcggtatttagtttcgggggattttttagttttgttttttcgattcgcgtaggtgcgttcgtttatttaagggtagggaggtatgttttttcgggttttttcggtcgtatggtttgtttgtttttttggtttttttttttcgtattaggaggggcgtgagatagttaggtcgatttttatttcggtagtttgcggcgatcggtcgtttcgagcgtagcgttagatatttgggttggggggtgttagtttgacgcgtaggaagggcgtagcggcgggagggggttttattttagatttgggaggtttgtttggcgtcggttttcgttcgtttttcgtcggtggaggtcgcggttggcggagatcgttaagttagaggaggggattcgaggtttcggttgggcgaaggttttggagggggagaagacggtcgaggcgtggaggggtagtcgcggcggggcgatttttatttgtttattgcggggtttgttcgtggggtcggggtagatttcgtaaaggacgcgtagtttgtaagttcgcggttcgcgcggcgcggggatggggagcgtgtgcgtcgaggagcgcgcgtcgagtcgggttttcgcgtttgtgtggtcggttggcggtcggggttcgtgtgtttttgcgcggcggcgtgtgcgtgtgcgtacgcggggattacgttcgttcggagtcgtcgtcgtcgtcgttattttttgttcggggtcgagcgtagcgttttttttgttcgtttcgcgcggcgcggtagtttagtttggtttcgttttgcgggagaggcgtcgttttcgtcgcgaagttaggttgggcgttggagggaggcgatcgattatcgtttttttttgtttattttataggttggggagggggtgttgtaggttaatgagcgttcgggggcggggttagatcgagggcggtgcggtggggggcgcggtggggggcgtcgggttgtttaattcgattttattcgtagtatagattggagtaggagttgcggcgggaaattttagcggcgggggtcgggggcgt

SEQ ID NO: 7487 - DNA, 1175 bp, Artificial Sequence
  Description of Artificial Sequence: Synthetic polynucleotide
cggagagtcgggatttcgaagtttttattgtttttgtcgaggcgtcggcgtcgttttttgtgtttttgattacgttagttttcgtcgaggaggcgatattttttttcgcgtttttcgatagcgagcggtcggcgtttagcgtggaggggttcggaggggttttgtacgcgcgcgtggttcgacgcgaggttcggtcggttcgggttcggggcgagattgggggtttgtcgttgtcgttatcgttcgagcgtaggaaatcgtcgttatttgatttcgttattaagtttaaggtgttttggatttacggtaagtatagcgtcgttgtagttggtcgtgcgtttttattatcgtcgttaggtttcgaggtcgcgtttagttttagtaagaggaaacggacgtttagcgataaatcggcgtatacggtcgaatacggtagttttcggattcgcgatttaacgtcgcgtttttcggggttgttcgaggaggcgatagttttcgttgcgttttcgtcgtttagggttcgagcgcgcgtcgcgtttcggttttttggagtttacggacgtcggcggtttttcgcgaagcgcgtcgaggttgtttttatgttggtcgttgacgtgcgcggtaagattcgtagtttgggtcgcgtcgaggtggttttgggcgcgtagggttttagggaaaagtcggcgtttttatagaaagttaagcgtttcgtgtcgttagtttcgttcgttcgcgcgtttttagcgatcgaaatttcggggtttgagaaggcggcgatcgatttgttcgcgtttgagatttttcggaagaagatttttatttagaagtcgtcgcgtaagaagagtcgggaggcggcgggcgagttgggtagggcgggcgtatttattttgtagtaggttgtggttcgttcgcgcgtagtttttttagtttcgtagcgtcgttcgttattttatattttttacgttatcgggtacgggcggttttttattggtcgggtatcgcgcggttagcggaggttgcgttttattggtttaggttttgtagtcgtttttggattggagtagtgtgttttggcgggaagggtttatttcgttggtcgaggtttgataggcgtttagcgggcgattttttttttattggtcgagttatggagcgtttcgattagatagcgt

SEQ ID NO: 7488 - DNA, 1087 bp, Artificial Sequence
  Description of Artificial Sequence: Synthetic polynucleotide
cgtttgtagttcggtcgcgtggaggtgatcgggcggaatttcgagggggcgcggggagagttgggcgggtttatcgttttagcggttgttgttaggggtcgcgaggttttttttgaagatgtagcgtagtatattttgtatatgagtttagaggaagaggaagtgtagtcggcggacgcgcggcggcggcggcgggggcgcgtcggggttggagtcggagcgcgtcgggcgttgggcgtagcgagcgagagcgcggcggtcgcgggtttcggcgagggatagacgtatcgatcgtcggagggatagatatacgattacgcggcgttatcgtttacgtttttatttatcggcgtttaagtttttttcgcgtcgttttttttgtatggtataaatttttttttcgggacggaatacgttgttttagggagttcgcgatcgcgttttttttttcgtcggttttatacggtaggcggcggggggggcgcgatagggtttggggtgtcgatcggtataggttttttcgtttggttttatggatcgggtttttggcgggtagtgggaatcgcgcgtggcgtttttttgtaggttgttttttgtcggggtttcggagttgttagagtagtattttttggttcgcgtcggatggggatttgggttgatttttgggacgtttggattttgggttaatttttttttgcggggaacgggtgtaggggagttatttttggagcgatgtagggagaggtatttcggagtagtttgttgggggtcgtaggttttgtaggtttagaagcgtttaggaaggacgtagaggtgggggagtttggaggttataggtgggtttaggatatattgtcgttggggttttcggaaaagaataggagggagttggtcgcggagtttaggttttcggggtgcgcgcggtttgggtggggtagggtggaggcggtgtttgattgtttttttgcgtgtgttttgggaggtgggtttgttttggggatagaggtgttggacgtgtaggagtagatatgtcgcgcgtttcgaggaagcgtcggaattattagaagtatagggacgcgggtgtcga

SEQ ID NO: 7489 - DNA, 693 bp, Artificial Sequence
  Description of Artificial Sequence: Synthetic polynucleotide
cggtttaggtattcgggtagagggatgatttcgcgttttgcgaaaagtaataggcggttgtattttattttgcgttagtttcgggtcggggtggttgttttattttcgtggtttagggaggaggcgttgggtgcgtatgtttaggggtgtgttcgttgttagggttgtagcggtcgttatttttaattagttgtaagtcgagttgtttatttgggatcgggtcggttcggcgggtttggttttcggcgaaggcggcggcgttggtgcgcggcggttggggcgcgggacgtaggtagtgcgtggcgcggttggcgttttcgggcgtcgttatcgagcgagggtgcggtttcgggcggtcgtgcggggtacgatttggttcgcgttgttgcggcggtcgttgtagattttgttttaggcgtcgtagttttgtaggaagagtagataaagataggagagaggtaaagcgtcgtttgtttagagatgtagtcggtttagttaatagagggaaatcgtttttaaatttaggttgggaatgagggaggaggggcgaggcggttggggattagaaaaagtagtagggaattaacgtgatagttagagtttagttagtgtttcgtcggcgttgttttttcgtttcgcggttgcggggttcggaatggagagaggaggcgggggttgagcgttggttgtcgg

SEQ ID NO: 7490 - DNA, 5065 bp, Artificial Sequence; identical to SEQ ID NO: 7458
  Description of Artificial Sequence: Synthetic polynucleotide

SEQ ID NO: 7491 - DNA, 307 bp, Artificial Sequence
  Description of Artificial Sequence: Synthetic polynucleotide
cgttttgggggcgatatcgtcggggaatttgatgatgggcgacggcgcggcggcggcgtggtttagtaggtagtttaggagatagagcgtttttaggggattcgtgagcgcgtttcgggttattagcgtttttatcgtagcgttttttggtttcgcgcgtcgttcgggggtcgttggttcggtgcgtgtggtcgtttcgtcgtttggttggagtttgtttcgcggcgtagggttgcgtttcgagggttcgttggttcggtggtttggggtttgttcggtttagcggtttatggttcggttttcgcgt

SEQ ID NO: 7492 - DNA, 1563 bp, Artificial Sequence
  Description of Artificial Sequence: Synthetic polynucleotide
cggtgttttcgtagttcggacgttagcgttagggattcgttataattttaagttttttttcggggttgggtttcgtatataaataggtagtataaaattaggatttagttggggttcgtatttttttttgtttagattcgagtcgttttagttttcggtcgtcgcgttcggagttcgttttaattcggaaagtggcggtcggttgcggggtaggcgggcggtatttgtgagtagttttagtcggtgttttagtatttttatttcggcgttcggcgcggttcggttttgggtggcggcgtcggggtagcgcgttcggtcgagtcggggagaggagcgcgggagattcggagcggagcggtaggagagcgcggagcgaagcggtaggagtagtttatagttaggagcgttttttcgtttttaacgtcgcgtttttttttttaaaacggtttaaaaaaatttattaattgtatggtcgcgtatttttaaaaaggtattcgtcgttatttggtttcggtgaattttaggaggcggaggaagggcgcggggtgggtgcggtgatatcgtgggaggtggtttttcgtgttcgtcgttcgaataaagagatttcgtcgttttcgggcgtcgcggtggggggtcgcggacggcggttgggggtttttagcgcggtcgggaaggcgaggaaggagagcgggagtcgcggggaggagggggcgtcgttttcgcggaggcgaaatggggcgggagcgagtcggtgcgggattcgcggggttagggtcgtgcgtggggttggggtcgtgttcggggttgggttgggttgggcggggacgcgcgtagtagtcgcggcggcgagagaagttggttttgggtttaggggcgagggcgtcgtcgatttatcgcggagatgcggacgagatagacgcgtaggcggggagcggggtttcggcgtcgtcgacgcgcgggtgtaggtgcgggtagttaggagttttttcgcgtgttcgcggttgtaggggcggaggtcgggttgggggcggtgcgtcgcgggggcgtgttcgcgtgggtttggcgggtgtgggcgttcggttcgcggggcggtgtcgggtttggggttagtttcggacggatcgcggtttttcgcgcgtggttttcgttttttgcgcggttggggtgttcggtgggcgggcgggagggcgagcggggatcgcgacgcggagtttgggggatatttcggtcgattcgcgttttcgtcgattttttattcgtttcgtcgcgcggattgtgttgggtgcgttgcgaggttttgttcgtttttttaggttttttgtggtcgcgcggcgtcgggttttcgggggaggggacggcgttgtcgtagtttttgtttagatttttaaggggaattttagatttgtagagatatttttattttagcgtttttgcgtttgttgtttcgcgttattcgtcgtcgtcgtttgggaatcgagggagaaaagtttttagggtcgggaagaattaggggtttaggggtttttggggcgtcgttttttttttttcgttttcggagttcga

SEQ ID NO: 7493 - DNA, 512 bp, Artificial Sequence
  Description of Artificial Sequence: Synthetic polynucleotide
cgattcgaggttgtttattcggtttggtatgtttcggcgtttttggggtttttgtatttcgttggtttttcgttgtggtgtttcgtagttcgattatttttgtgtttttaggagtttattttgggcggtagggaggcgttgcgtggggtttacgagttttacgttgttatttttattagtttttattttttaggcgtttgttttttcgtattgttaggttttgttttcgtagtatttggtagatttgagttcggtttttgttattttttcgcgggagttttatagtgattttggaggagaagtagtaggagtttataggttatcgcgttcggtcgcgcgtgaagtttgtgtagtcgtatggtcggttcgttggtttcggttttttgtcgacggatacgttgttgtttatttagaggttgtttcgggtcggtttagtcgtggatttagtgttttgtttagtttcggagtttggattgggtagggagtcggcggggtgcgttgatttgggtcgg

SEQ ID NO: 7494 - DNA, 1070 bp, Artificial Sequence
  Description of Artificial Sequence: Synthetic polynucleotide
cggcgttcggggttcgattggtgggaggggttcggtagaggtttcgtttcgagattttagtacgtttcgtttcgttttacggtgtagtatagatttcgcggagaacgcgagtatggtcggaaattatcgtttttattttttggcgggtttcgagggaaggtcgggaacgggcgggttttgttggtttagagggcgttaggggtagttatcggcggttcgggatttttttcgtcgcgagcgcgggggagtttaggttcggtttgtcgggggttgggtgaggttgcggattaggtttttacgtttttcgcgttcgttcgcgtttgttttaggtttttatcgcggttttttttgttttcggggtcgttttgttttttatagattttattttcgggggtcgtttttaggattttcgttcgtttttttttgattcggtttttgttcgtttcgtttttttttttcgggttttttatttttttttcgtcggtttcgatttcgggggcgtttcggatttgtttttcgaatatttttagtttcgtttttagtttgcggagaaggggtcgaggagataggaggaagagagcgagagtttaggggacgaggaggaagttatcgagacgcggagattcgacgacgtcgagggaggtataggtcggggaagcggtagtcgggggcggagcgggggatttgggcgggttttttttcgttttgtttttgtttttttcgtttattttttttttttttttttattcgttatttatcgttatggcgttttcgattttaggcggcgagtgtagtcgtcgttttatttttcgtagtttggcgcgtattagtttttttgtcggtgggcgggcgttaggggtagggtcgaggttcgggtatattttttttttttcgtttatttggcgcgggaggtttatttttcgagagtagttgttttttgtttttttttagggtacggatttttcgggttagtcgttgttttagtatttgcgaggataaagaggaggttttttcgtttggtcgtttttttggttatacggttcgtttttttttttttgtgtttttcgcga

SEQ ID NO: 7495 - DNA, 766 bp, Artificial Sequence
  Description of Artificial Sequence: Synthetic polynucleotide
cgggaattttacgtttttgtattagttcgggggttcggacgagttcgggagtcgttggtcgttaattatcgcgcggtggagaggcgggcgttcggtttcggcgcgttgggggagttagttggcgttgttttttttatcgttttagacgtttatatcgatatagatagacgtatagacgggcgggtagatatcgatagttttttaatcgtttgcgttttagtttcggtttagggagtttttcgtattttttggggtgtcgtaaattgtagttcggtaggttcgcgtcgggagaagggagggcgcgtaggcggtcggaggaggggaggttttagcgcgttttcgttgcgatgtgaacggcggcggtttttatttggagtcgtatttggggcgtcgagtttcggggtcgcggaaagaatgcgcgtcgttcgtgcgtttcgtttgtcgcgtttggttattcgtagtcgtcgcgttcgtatttgattatggagtgcgtttttttgttcgcgtgtgttttttcggttgcgggttcgggttcgtcgaggggtttggcgggattggggcgcgtggttaaggtaggtgtcgtcgagcggagtttcgagagcgggtggtagggggcgttcgacgttagtttcgtcgcgttttttacgcgcgatgttatttttttttttgtaggcgttttagttgtgttgtttttgttgtgcgtcggtcgtcgcggttttagttagtgatagtagtagcggcgttagcggattaaatgatggttcgt

SEQ ID NO: 7496 - DNA, 363 bp, Artificial Sequence; identical to SEQ ID NO: 7269
  Description of Artificial Sequence: Synthetic polynucleotide

SEQ ID NO: 7497 - DNA, 2919 bp, Artificial Sequence
  Description of Artificial Sequence: Synthetic polynucleotide
cgagcgcgtaatatgagttttaaaggttaaatttcggttagttaggagtcggaaggttgagttcggttgatttgattttgagttttttcggagttatttcgtataggcgttcgttttgtttaagggtacgcgacgttagcgggtagtcggttttcgtgaagaatggtttttaaataatttattttatttcgttgtaaagagagggataaaatgggttttttttttttacggatgtttagttttttgggtaggcgtatggtcgggcggcgtttagttcgtagtttcgattcggatattttattgtattttttttttttcggtttttttttcgtacgggcgttcgagagacggataaagagttggggttaagtttgagcgtcgggtacggttaggtttagggaaggaaggttttcggtagatatttgggtattagagttggtgcgaggaggaaaagttgggaggcgaatttataattttgggggtggagggtaggtaggggaggggaattaggttaattttagtcgagtgagtttttagcgagttggggtttcggatgggaggtttgtttcgcgttttaaagaaaagtaaatcgtttttttaggttcgttcggattgtcgaagtttttttggaaaaattttttttttttttatattaaattttgcgtcgggtttcgttttttttcgggtaggtagcggcgtaggaagggttaagttagttcgttttagttgatagttagttgattgggttttgattgatagtttcgaaaagtttttttgtttttatattattatgttaatcgcggtcgttttcgtcgttttttattggttcggagtgttagttaattttttatttggatttgacgttacgagtgttataaaatttagtaattgttttaaattttttttgttggattagaggttttaaaatttttttttattttttagttgtagttcgggttgtttgtcggtttggttttttttttttttttttgttttttgtttcgtttttttttaggatttcgttattttgtttttttaaaaaaaggtaagaaagaattaaattttttttttttttttttttagtcgggttgtatttttgttttgtattttgtatagaggtagagagcgcgcgagggagagagaggaaagaaaaaaaataataaagagagttaagtagaagaggaggcgagaagtatgaagtgttaattttttcgtgttaaggttcgcgtcgttcggatagacgttcgtcgcgtttttagtttcgagcggacgtcgcgcgcgttttgtttgtagttcgggtcggcgaggcgagtttttttttatgtaaagcgcgtagcggagcggcgagcgggggacgtcgcgtatcgggtcgggtttttttagtttcgtcgtcgtagttattatcgtcgttatcgtagttcgcggaggattttttcgagtttgaagtcgtcggtttggcgcgtaaggaggcgagcgagtaaggaggggtcggggcgagcgagggagtatattggcgtgagtaggggggagggagggcgggcgcggggggcgcgggtagggcgggggggtgtgtgtgtgagcgcgttcggaggtttcgggttagttatcgtcgcgtaagttagaagcgttttagttcggtaagttggtttattcgttggttatttagtatagttcgttggttttttttttgtagtttatttggcggagcggcggcggcggcggcggcggcggtaggagaatggtattagaattggtaatgagtaatttcgatttgtttattagttttttggttatggaatatgttaatgatttcgatttgatgaagtttgaagtgaaaaaggaatcggtggagatcgatcgtattattagttagtgcggtcgttttatcgtcgggggttcgttgttttttatttttatgagtacgtcgtgtagttcggtgttttttttttttagtttttcggcgtttagttcgggttcgggtagcgagtagaaggcgtatttggaagattattattggatgatcggttattcgtagtagttgaatttcgaggcgttgggttttagtttcgaggacgcggtcgaggcgtttattagtaatagttattagttttagggcggtttcgatggttacgcgcgcggggcgtagtagttggtcgcggcggtcggggtcggtgtcggcgtttttttgggcggtagcggcgaggagatgggtttcgtcgtcgtcgtggtgttcgtcgtgatcgtcgcggtcgtcgcgtagagcggcgcgggttcgtattattattattattattattacgtcgtcggttattattattattcgacggtcggcgcgttcggcgtcgcgggtagcgcggtcgtttcggtcggtggcgttgggggcgcgggcggcggtggttcggttagcgttgggggcggcggcggcggcggcggcggcggaggcggcgggggcgcggcgggggcggggggcgttttgtattcgtattacgtcgtcggcggtttgtatttcgacgatcgttttttcgacgagtagttggtgattatgtttgtgcgcgagttgaatcggtagttgcgcggggttagtaaggaggaggtgattcggttgaagtagaagaggcggattttgaaaaatcgcggttatgtttagttttgtcgttttaagagggtgtagtagagatacgttttggagtcggagaagaattagttgttgtagtaagtcgattattttaagtaggagatttttaggttggtgcgcgagagggacgcgtataaggagaaatacgagaagttggtgagtagcggttttcgagaaaacggttcgagtagcgataattcgttttttttcgagttttttatgtgagtttgatacgcgattttagttagttattttgataagtgtttcgcgggggttcggttcgg

SEQ ID NO: 7498 - DNA, 2267 bp, Artificial Sequence
  Description of Artificial Sequence: Synthetic polynucleotide
cgggcgggggagggggtttgtcggtagagaaagtgcggagagggtagagtagcggttcggggcgtttttgtaggtggatatgaaacgtacgatatgtaaatgaatgtaaagtgtatgtaaatgatttggtttcgggattcgcgggaagcgagggtttcgtatcggattcgttcgggaggttgagcggggggagcgcgatttttgtcggttacgtacggaggtggttttgggtcgggttaggcgtcgcgttgggggcgagcgcggggtagggggcgggggcggcggtcgaaggagcgattttttttttaattttttatttttttattttttttatattttttaattttcgtttagtttttcgcgcggtcgttagaagtcgcggttttaaagttgcgaggttcgcggtcgtcgattgttgcgaggtgggtgtgcgcggtttgcggagggggagagggtgggcgtaggcgggggtcgttttttagagtcgcgttttttttacggcgttcgtattttttaattttttcgttcgttttcgtttgcgttttttcgcgtcgtttttcgtaggaggcggcgcgttcgtcgtttttttttcgcgttttttttttttttttttgttttcggcgtttcgtatagtttcggtttttatggttagtttttagggcgtcgtttcggtggcggaggcgttgggggcggttttcggcggcggggagtttttttttaggtcggcgtttcggggcggagttgagcgttatgggcgtcgggcgggaggtaggtggcgtagcggcggcggcggggggtaggaggcggaggcggagcgcgcggggcgggggtcgcggggtttcgtgagattttcgggcgagcgcgcggcgttggagttataggcgcggcggttggattcggcgcgggtcgcggaggtcggagatcgtttcgggcggggtgcgcgttttgttttcgcgcggggtggtcggagtcgagttttcggtatggtttaggcggtcgtttcgcgcgttttagtttcgtcgcgcgtttgagttcggtgcggcgttagaagatagcgcgtagtcgtttttgagtcgtggaggcggggattaagttggaaggagtagcgattttcggatcgagtcgcgagtgtgcgtcgttcgtcgttcgtcggatttttcggatttttcgatcgtaagtgtcgtgttcgtttcgcgcgtcgtcgtcgttttatttcgatttcgttcgcggttgtcgttttcggatttgcgtcgtagtcgcgtcgagcgtacgggtcgtttttaaagttggtgtttacggtagggtggagttaattcgtttagcgtttatttattcgggttgagcgtagtttttcgtgagtagagtttgatttgcgggggttgcggcgaaatttcgaggggaacgacgcgttcgggcgttgggagtttcgcgggtttttttggggtcgttcggtttttttaataaaggtttcgcggttcgcgtgacggagattcgggagtggggaggtcgagggcggttttgggagaggtagaggtggcggcggtcggtttggggaggggggtttagagtttttttttgttttttttttttttgttcgggttttcggcgttgtttcgtaggttaaaggtggttcgcgttgggggttttggattttgtttggtatgcggtttttggggttttgacggtcgcgggtttcggtatagtcgggtggtagcgatggcgcgtatagtttttgggaagcgtttatttgtgttgggtaggtttcgagttaggttgtgggaatagcggggagggaggtgtgagtttttgtggagggatagatggttggaaacgtagttttagacggttgattttatttacgtggagtagaaggcggttaggttggtggcggcgatttagagtcgttgggtttcgaatatattgcggggttggcgttttttcgtttttgcgttcgttcgtgtgtgttggggtcgcggtcgggttgtgtttattttttatttattttgtgggttgaggtcggttgattttaggtttattttagggtttaggaagaaaaattttttttttgaaaagagagtacgtcgcgtgtttttgtgggtgggggtttgtcggtagttgttaggtttgtggttttagttagggtgcggtttttgtgcgttcggttcgggtgtgcgtttttttttttggacgaggaataggaggtttttagggtagttatttcggcggacgggtcggtcggggataaggggcgggggtcggtttttcgg

SEQ ID NO: 7499 - DNA, 265 bp, Artificial Sequence
  Description of Artificial Sequence: Synthetic polynucleotide
cgtagtttgcgatcgatggagtaggaggcgcgggtgttgagagttgcgggcggttttggtcgggttcggcgtttgttggttttcgtttcgtgggtattttgtatagtgttggggttggtgttgagtttcgaggagttgtttatcgcgtagttcgcgttttattgtcgatcggattttacgttgttgtttttagcgttgcgcgttttgcgcggattcgcgttgttggacgtcgttatttcgcgtttggggtttacgcgagtcgcga

SEQ ID NO: 7500 - DNA, 374 bp, Artificial Sequence
  Description of Artificial Sequence: Synthetic polynucleotide
cgaatagcgttttgaaacgtagaaacgtgtttattcgaattgttaacgcgagcgtagagtttattgataaagtaaaataagataaatcgggagttagaaaatttagcgatttataggatttatcgtgatgttttttataaatgttatcgcgaaaatagtcggatttgaaaataaacgcgatttatttggttttcggaaggggagaaggattcgggcgaaaggcgttagttttttttcgttcgtttcgtagacgtagcgtaggtttcgagttttcgagcggcggttttagaattcgcgggttattcgggagtttttttcgtagtattagtcgaaagtttttagcgtcgaggagggcgggcggttgtttttttcga

SEQ ID NO: 7501 - DNA, 1133 bp, Artificial Sequence
  Description of Artificial Sequence: Synthetic polynucleotide
cgaatagcgtttttaaatttagaaacgtgtttattcgaattgttaacgcgagcgtagagtttattgataaagtaaaataagataaatcgggagttagaaaatttagcgatttataggatttatcgtgatgttttttataaatgttatcgcgaaaatagtcggatttgaaaataaacgcgatttatttggttttcggaaggggagaaggattcgagcgaaaggcgttagttttttttcgttcgtttcgtagacgtcgcgtaggtttcgagttttcgagcggcggttttagaattcgcgggttattcgggagtttttttcgtagtattagtcgaaagtttttagtgtcgaggagggcgggtagttgtttttttcgatttcgtttcgttcgcgcggacgttttcggttttacgcggggattatttcgggattttcgtcggatttcgcgcgttcgcggttaatttgcgtgtatttgcgtttcgcgttacgttttcggcgttttacgtttagtttttattgggtttcgttttttagtggttttaagtttcgttttttcgttggttatcgtaagtttcgtttttcgaggtttcgtttttgtaaggttcgtttttttacgatttaggtttcgtttattacggttagttcgggtttaggtttcgtttcgatacgatttaggtttcgttttcggttagtttcgtttttcgcgcgtttcgtttagtaattttcgttgaattcggcgcggtttttttagcgttgttttacgtcgtagtttagcgtttggagttcgcgcgtttcgagtttttgttcgtttatgcgtagttgggttatttaggtgtatttatttttttgttgtttcgtcgttttttttgtttttatttcgtttaggttttgggtgttttttttttattttttttggcgtttttgttttaggttatttggtcgtttttttgggtttttcgttcgggggcggtttttggttcgacggtgtcgtagacgcgcgcgtataggttagtttcgcggagaggttgtttttaggggttaggcggggggttgagttagaggttggggtttgttaggagcggggcggtttggggcgtagtagtattggagttgaaggcgagggcggttcgcgtcgg

SEQ ID NO: 7502 - DNA, 2358 bp, Artificial Sequence
  Description of Artificial Sequence: Synthetic polynucleotide
cgggattcgttttttaagcggcgttttttttatttttcgcgaatttttcggcggggtttgtgtggattaagggagattagagatttttcgtcgttattttatttaggcggagacggtttattcgaattcgtacgggtttttttttttttttggaatttgtagttggtttttttcgaatgtttgttttttttttttttttacgaaagaatagtgttttgggattcggggtgcggggtagtcgggttcgttggagttgtttagtgcggggaagagtcgtcgagattgggagaaggggcgttggttagggaggagacggggtagggagcggattcgcgattcgtattttgggcggcggttttcgcgttttagtcgcgtttttcgatgatttttagtcgcgaagggcgagcgggcgggggttgggttgcgggttcgggttttaggaggtttgcggggtcggggaggggcgtggagtggttcgaggatcggtttggggattgggggtaggtgtttggacggacgcgggtcgagtatttttttcgggggcgggcgtagtgaaaatattttgggaggcggcgtcgcgcggttgagcgttgttgttttgggaataggacggcgttcggtattgcgagttgagagtatttttataaattttgtatgggaggcgtttcgtgagcgggggcggggagcggagcgagagggagggagttagagagtaagggagggagggaggaggagaggagggggaagtcggggggaggaagggaggcgtttcgtttcgtcgatcgttcggttttgtaaacgcgcgtcgggcgtttttttcggagttcggcggtgcgtgcgagcgtttttttgttgtagtcgcggcggcggtggttcgagggggcggagaggagggggttgcggtcggtcggttagggggcggcgtttttttttaaaatcgtttgcgaagtgtttcgggtggtagaagtaggtcgtcggtttcgcggagtaagtcgttcgtttcggggttgagtaagcgcgcggggttgtcgggtagtattacggttgtttgcgggcgtcggtgttttcggcgcggggttggagtttattatgtttttgcggggtcgggttatcgggtacgagcggattttcggtttgttttcgtttcgacgcgttcggattagttgtagttggcgtttagggatttgaatttggatttcgggagggagtgcgtttaggtcgatttcggagcggcggtttcgtggttaatatgtttcgtaaaggtgagttggagtcgtaggggtaagttgaagttgaatgcgtttcggaaagagtcgcgagttcgggcgtcgttcggcgtcggggttttcggtttgggaagtagttttcggcgggttggtgggttttgtcgggcgtattcgtcgaggggttgttgttggggtttagttttcgttagcggttagttgtgagatacggggttttttttatggatcgagtggttaggtttagagattcggttcggaggggttagtcggagattagagtgagcggtcggtggtggaaggggagtcggttttttgggatttttgttttgttgggataaagttttgtatttgtagtttttattttttgcgcgggtatacgtttttgtttttgtcgttttgtggaggtcgagttcgtacggcgttttcgtgtagttagcggttagtgatcgcgcggttcgggcgtttttcgcgcgttttagttttttagacggggttcggacgcggacgttttttttgtagttttgttttgatcgttagggatgggttttgggtatttagcggttgagggtggggagcggttagcgtttgatgtttagttttttaaatttttattatgttgggagcggagggacgcgaaagtcgtgtcgttagtgtgcgcgatcggtgtatagtttaatttgaggatagttggtttcgcgattatcgtagttagacgttttagtagttcggttcggtacggagcgcggtaaagttggtgcgggtatcggggaagtttcgtcgcgtttttacgtggttgttacgcggggcgtcgtttttcgggttttgggagggtaggtgattacgtcgggagtttacgggtttcgttattagttgttttagtttttgcgtttgtttttttttttttaggttcgagtaggttgtggcgtttcgtcgggatttttttcgcgtttggttcggttaggaggttgagaagtcgcggcgtttgcggttggttgtttcggttttgcgggagcggttgaggcgggagtttaggtagtcgaggggtttgatttttgcgttttacgttttagttttaattcgtttttgtttttatggtaatagatcgaggtgtcgt

SEQ ID NO: 7503 - DNA, 1050 bp, Artificial Sequence
  Description of Artificial Sequence: Synthetic polynucleotide
cgggcgggtagttgcggttgttgaggttcggtggggtttttttaagacgcgtgttcgtatttgttcgtcgggcgtttgcggggtgtagcgtttattggagcgcgatagtttttgggatagaggaggatagtggtttcgtttttttgtgcgatcgtttaggagtttcgggtcggagagtgcgagcggggaaaaggggttttgtatttagagtggggcggacgtggcgaggaagttaggggggatcgggaagcgaggttcgcggtgcggagggcgcggggcgtggggggatatttttcggagagatatcggaggggcggaagtaaggagatggaaaggagagggagatcggggagatagatttgagagatttagaggtttgtagagagttttattcgggattttttagagtttaggaaagagtagatgcggacgcgggagggcgttttacgttaaagcgggtagtattagtgattaaaatacgtttcgtttggtagtttcgggacgtatttttgtttcggtagcgtaggagaggtttggatagcgcgagatgttagggtttaggttgtttttagagggttggttcgaagcgttggagtttaaagacgttttttatcgtcgtcgggtggtagaattgggggtaggcgcgttttatagatttcgaggggtggtttcgttttagggtcgcggggaggcgttttcgtgcggggcggagttgttatcgttttttttttaattttcggggattgtggtttttttttaagttcgcggcgtttttagttgttttttattcgtttcgttcgttagtttttttttcgcgcgatggtttcggcgttgagttatgtttttaagtttaagtttttcgtgattttgttcgttatttcgtttttgttgttgttattcgttattttgatgttcgttaaggttagttgtatttttaggtagtttttcggatattcggcgttttgtgtttattaacgggtatcgatttcgggagttttgagttggagcgtacggatttcgcggggagtatagttttttcggggcgcgcgt

SEQ ID NO: 7504 - DNA, 1731 bp, Artificial Sequence
  Description of Artificial Sequence: Synthetic polynucleotide
cggtcggttttagttgttatttaggtaatttcggagtcgtcgtagatatcggatttattggaagggggcgaagtcgcggggaggaatgggggatattggggaaggggcgtcgtttttgtcgttttcgttttttttagtgttattgggcggttgttgcggagttcgcgttattttttttttattttatttcgttcgtttggtttcgtttggtcgttggttcgcgtttcgttgcgttcgttcgggggttggttcggttcgggtttttgacgttattagtaagtttgttgttttcggcgttttacgtgtggcggcggttagcggcggtttaggaggtagtcggtgagcgtttgcgagtagagtggcgggggtcgttgataggtttcgcgtagtttagtttagtttagttacgcggtttataggtggggtttaagagtagtttggagtaattcggcgttacggagaggggtggacggttttgtacgggttttttgtttttcgttcgggtagagggattcggggggatttcgttttttggttgagagaatttgaattcgggcggagagaacgcgtttaggcgggtaaggggattagagaaagtcggggttggaagttattgtcgttcgttattgtttggagcgtacggagcgtagaggttcggtagtcgcgcgtgtttttacggggatcgagttagtgatgtaggatcgttgagcggagattcgcgtcgagaagtttttcggggtcggggttgagacgtacgttttcgatatcgttgttaagatttcgatttcggcgatttttgcggggaatcgaggggttaaggttgttttaagtttaggatttgggcgagtttaagacgatggttttttaagtacggattcgcgttttttttttcgttttttcgattggaggtagggattttgcgcggggttttcgggatttcgttttttcgcggagtttcggtcgttgtttttcgggatagttcgtacggttataggggcgtacggcgatgtggttttcgtttagcgcgttggttcgtcggggggatgttttggtatttgtcggggtttaggtttagtatggtcggcgcgttgttcgacgtcgttttcggttaggatggttttttcgggttcggttagtgttttttttatttcggtcgagtcgttgtttcgtagtatttttcggaagtttttgttgatgttttgttttttgtttacgtttttttacgttttttattgtttggtcgagcgttgttagattttgttcggtttcgtcgtggggttgttcggcggcggcgaggaggcgggggtttttggtggcggcgttttggtcggaggttcgagggagttggcggtgtggtcggcggcggtatagagaaagcgttttttgtaattgtcgtagtggcggaggcgtcggtcgttcgcgtttcgcgacgacggcgaggaggcggtttgggaagaagagttttttggtttgttagggggttcgggcggtttcggggtcggaagtatcgtggtcgaggtttcgtcggggattttggcgttgtttttggacgaaggtagtaagtagttgtcgtaggttattattatcggagtgaagaagggcggtacgcgggcgttgttggagtttttgcgcgtgtatttcgacgtgcgcgtcgtgggcgtcgagttttattttttcgatcgtagttacgataagggtttcgtttggtatcggtgagcggggcgggttcgg

SEQ ID NO: 7505 - DNA, 3535 bp, Artificial Sequence
  Description of Artificial Sequence: Synthetic polynucleotide
cggtcgcgttaggagttgttggtgtagtttaggaacgtagtgtttggggttagttgcggtatttatagtgggttttttcggtagttcgattcgtcgggttatcgtttcgggttttgtgttttttggattcgggagttttgtttgttagtttagggagatggttcgggaggacgaagaatttttcgtttttcgcggtttagttaagtttttgcggtcgttcgggtttagtcgttatgcgtggtcgttcgtagcgtagttttcgggcgtaagtcggtagtcgaatttttcgggttgcgttgttcgttgtaggcgcgcggcgagggtttttacgcgatttcgttttttatttagcgttttttagttaattaaaaagaacgtggtaggtggagggtagtcgtttaagagattgcgtgagtttttttgtggggatttttatagtttgttttaggtgttttaaaatcgtttgatattaagggtttagttttttttttgttagttttttttaattcggtttaagtgtgtttgattttagaaaattttaggttgtttcggggttttggcgggttttatttggaagggcgttagttatagtttgtcgtttggttttggaattattattttaggaggagggggagtggtggtggtagaagttataataatataatcggtgataatagttaacgattagagaggtttttacgtgtttgcgaggtattttatcgtattagcgtatttattttttttatttttgtttagaatttgtattatttttattgtatagatgagagtattaaggtttacgcgattagttaggacgtgaatttaggcgtcggattttagagattttatttttatttattagtgtttcgagaatgggttatagttcgggaacggtgggaaagatgattgttacggttggttaaatttcgagatttgggtaatttttgataataataaaaaattattaaggataaaggggaaggggtaggacgaggttgggaagggagtcgttttaattcgcggggttagtttttttttattttttaatttatttaggtttcgatagtggggtgggtatagggagaggggtttagttattttttttttttttgtttttttaagttttgagcgtttgtgaagttaattgggtttggaggggtgtttgaatgtcgtgttggttggggttacgggtggagattttaacgaaaatgtgggggtcgttatttgggtttttagtcgaagatagttatcggaggtcgaaatttagattttttgtttattcgcgttttattcgaagttcgggtaatttaatagtttattttaaagattagtagttgcggaaagtagtgggtagaggtagtgattgtgatttcggggttattgtttttttggaatttgattcgtaattcgattcgagaatagaattttcggaagtcgcgatttcgaagtaatttttattttttaattaatgggtttcgaatattttttgtttcggacgtgtaaaagtttcgcggagatacgcgtttttgttttttttattttagtatcgagggtagggaggcggaaacgggcggcggtgttcggaggttcggacgtttttaaagtttcgcgtcgttttagtcggttgtagtgcgcgtttttgttcgatagggattagtatagttttacgtttcgcgcgtcgttcgttcgttaggcggaggcgtcgggttattcgttcggtttattttttcgagtttaggcggttcgcgagcgaggcgggtttgatatttttggggtttcggtaattaggcggattgtaataaaaagttaatagattttgcggtttcgtcgggacgtcgcggtttttattttttttttttatttgggaagtagaagttgttttagaagttttttgagggcggagatcgattaaaggggtttagaatatttttagcgtttcgggtttcgggaggaaaaaatttaaaacgagttataaaatacgattcgagtcggatatttttatggttagagggtggttcgttttgttgagggcggttttagtcgttgttttttttttttgcggcgaggtcgtttgatgaatttaagggtattagtgtttcgcgagaattttttgtgggttgtgacgagaattaagcggagcgtaatttttatcgtattcggataggatgcgttgcgtaatttgtcgtagtttttttgttttatttcgggtggttcgaagttgtaattttgttaattttttattatacgttatgttttttttagtttagggtttgaatcgacgatggagattttgtttttggtagggaaatttatcggtattaagcgaggtttttgtcgtagttgcgatcgaagaaatggggttcggcgtttacggcgcgtacgtcggggtgtacgcgtagaaattttagtagcgttcgcgtgtcgtttttttttacgtcgatgatgatggtttgcggtagttgtttgtttttagatttattgaaaaagttggagatggggtttggggagttcggtatttcgggattttgttttttcgggttcgtagcgttttcggttatttttttgtttgaagttagtggggtggttggcggcgttcggaacggtagtttggggggcgtttcgttcggagttgtggttagggttggcgggtcgtgtgcggcgcgggatttagagtttaggagtagtagtttcggcgcggcggcgtaggagtcggcgtacgagtataggaatatatagagttagacgtagagtatggcgaagagtagcgcgagttttttttttatcggcggcgggggcggcggcggttgcggtaggagtcggtcggggatatcgaggtaagatttgtcgttatttaggcgttgttttatgcgttgttcgcgggcgcggttagggatatggtttagtatatggcgtgggtttcgtcgggtagtgagcgtagagagggtttttcggtacgttggacgttcgggtggttcggtttattgttttcgtgtgttcgcggtcgtcgttgttgttgttgtttttttttaggtggcggcggtagttgtagcggcggcggtttttgatatgttgttcggtaggagttgtaattggaacggaaagtcgggacggcggtaattgttgggcgagggtttgttttcggggcgcgacgacgcgttcggggttaggaggacgttgtattttcgcgttttggttattttagattgtgcgtatcgtcgtacgtcggggttgtttttttgtagttttaagaattgagtttcgagtagtttcggtattttttcgtagaggttgtagaggcgaattgcgtaggaagagagttgtggatcgaggtggagtgggcggtttcggttttttagagtgacgggttgttttatttattaaaaatttcgaacgttatgtaaatataggcgttttttcgagagtttagtagttaattcgtttttaggacgagggggtgtggaaaggtttttgggcggtgtagggcggttaggggttgttattggtttcggaataaggggcgggtttaaaggggcgg

SEQ ID NO: 7506 - DNA, 2896 bp, Artificial Sequence
  Description of Artificial Sequence: Synthetic polynucleotide
cgattttcggtcgcgaatttaagtttgtcgttttcgtcgcgtttattttttagttttttttttgtttcggcgttattttaggtcgacgtttttaattaaaataagttttttttttaggagttttttttttttgttcgaggtttagggttagtagttttaggagggattttttttttattttatttttttcggtagaggtgcgagattttattgttagtttggttattcgatcgcgcgtgagattggggcgtagggtaggggggttattgggtaggttttcgtgcggggagtggggaggggtttttaggggaagtgtttgaagttatttttgtagttttgtttagattcggaagtcgtcgaggaagggaggaaggcgggggtggggagagcgcgattttaagcgttggcgggcggcgaggaggggtcgtagcggttcgaggaagcgtttggaggcgttaggggcgtcgagtttttagggaggtcgcgttttcgggaagttttttatcggttgttcggagtaggatcggacgcgcggatcgtttttttcggttcgattagtttcggggcgtagattgcgaatttgaatagaattttttttttttttggtatttttcgtttttttattcgtggttattagtttcgttattttagttttatgtttttcgttaatattatattcgttaagatcgtttattaatgttttgtggaggaaaggggaggggggaatttttagtataattaaattgtggttaaaagcggttaaaaaaaaaaaaaaaaaaaggaaagaaagaaatttttttttttgagatcgatttttttaattagcgtggaaaatttttaaatatgtaaattcgtaattttagttaagattttggcgtcgcgggaggggtgttcgcggcgggcggcgattttagtttgtagtttcggatttcgggtaggtttgcgcgcggcggcgggtcgggggttcggggagttttggcgtttatagtagttcgtcgaaaatataaagtttcgtcgttaataatatttgcgggttttttttgggtttttcgggcgtcggcgttgcgcgtttcgtcgtttttttttttttcgtcgttttttttttttcgcgtacgttttttttttcgttttttttagaacgcggtggttagatgagatttttgggagaaataaatgtgagcgttcgtacgaattttttttttcgttagtcgtttgtaacggttttaggttcgtttttttttttcgcgttttcgcgcgcgtcgcgtttttcgcgtttcgcgttttttttttagtagtttttgcgagcgtttttagtagttattatttataggtcgtcgggggttaggaggtaattagagacggtttcgtggtcgtatttattcggtaagcgcgatgttggcgcggggcgcgcgcggggaggggcgcgcgatgagggggtttggttgcgcgtagttcgcgttttagatttgggggaagggaggaggaggagggggtagggaaggaggaggcgggcgggggggcgagagatgagttcgggaagggagcgggaggagggggcgtcggggagacgtttttttggtttttatcgcggggtttcggggttattcgttgcgaggtttcgacgcgtttagggacggggggtgtgagtgtaagagtgcgcgcgcgcgtaggcgtgtgtatgttaaagatagaggaggggagggagggaacgttttaatatttttttagtgatttacgagtttgcgggtgaggttttggttgtgcgtttaggttcgtgtgtgtattaatgtggttgtatatttttggtttgttttacgagtgaatgttacggggtttgggggggggggtttggatataagttagtgaatgtgtttttgggttttagtttgattgaatgatgtggcgttgcgtggggttgtgtttgtgcgattgtttataggggggttgtgtgatttcgtgaggtattgcgtgggtgggattgcgtttgtgtgcggttgtgtgtatatgggattgtgtttgcgtggggttgagtgtttagagggtagttgtgtggttatgtgggtttgtttgcgagtgggttggtgggtgtgtggggtcgtggggttgcgtatgtaggggtagtgcgtttgtacggggttttgggttaatttaaagggttgtggtgggtatttgtaggcggttgcgtgtgtggttggatttgcgtggggtttgaggtttggcgggtgggggttagtttttttggcgtcggggatcgtatcgcggtagaagagtcgtttaaggcgttaataggtagcgtcggggtcgcggcgtagcgcgacgtgtagtagcggtggggcgtagagagaaggcggagaagaggggggtttttatcgcgcgttttttttagtcgtattagagacgtagtttggagattttgtcgtttgtcggtttcgcggttttagaagtatagggtttgggggattttttttagttgggggagacgtttattggtcgggaaggtagcgagaattgagattcgatgattttggcgtagtatagaagtatgcggtaaggatcgttaggagaggtgggtcgcggttcggagatagtcgagaattaggtcgagataaagaagagcgggatcggggattttggggttaaatcgcgtttttaggtttttcggcggtcgaggggagcgtatttaaggtcggcgcgtggagtttggcggaggtggcgcgggttttttttcgttgtagttttagtagtcgttttagagttttgggggtacgtaattaggcgttatagggtagggttacggtgaggggggttttgagtgtagttggcgggcgtcgagtttcggggttgtgattgagcgtttagttggttcgtttttttttcggtcgtttatcgtttacgt

SEQ ID NO: 7507 - DNA, 1017 bp, Homo sapiens; identical to SEQ ID NO: 1

SEQ ID NO: 7508 - DNA, 166 bp, Homo sapiens; identical to SEQ ID NO: 2

SEQ ID NO: 7509 - DNA, 125 bp, Homo sapiens; identical to SEQ ID NO: 13

SEQ ID NO: 7510 - DNA, 508 bp, Homo sapiens; identical to SEQ ID NO: 24

SEQ ID NO: 7511 - DNA, 396 bp, Homo sapiens; identical to SEQ ID NO: 35

SEQ ID NO: 7512 - DNA, 173 bp, Homo sapiens; identical to SEQ ID NO: 46

SEQ ID NO: 7513 - DNA, 97 bp, Homo sapiens; identical to SEQ ID NO: 57

SEQ ID NO: 7514 - DNA, 208 bp, Homo sapiens; identical to SEQ ID NO: 68

SEQ ID NO: 7515 - DNA, 647 bp, Homo sapiens; identical to SEQ ID NO: 79

SEQ ID NO: 7516 - DNA, 282 bp, Homo sapiens; identical to SEQ ID NO: 90

SEQ ID NO: 7517 - DNA, 32 bp, Homo sapiens; identical to SEQ ID NO: 101

SEQ ID NO: 7518 - DNA, 56 bp, Homo sapiens; identical to SEQ ID NO: 112

SEQ ID NO: 7519 - DNA, 44 bp, Homo sapiens; identical to SEQ ID NO: 113

SEQ ID NO: 7520 - DNA, 211 bp, Homo sapiens; identical to SEQ ID NO: 124

SEQ ID NO: 7521 - DNA, 141 bp, Homo sapiens; identical to SEQ ID NO: 135

SEQ ID NO: 7522 - DNA, 25 bp, Homo sapiens
cgtgcaccctgaggtctggttggcg

SEQ ID NO: 7523 - DNA, 498 bp, Homo sapiens; identical to SEQ ID NO: 157

SEQ ID NO: 7524 - DNA, 186 bp, Homo sapiens; identical to SEQ ID NO: 168

SEQ ID NO: 7525 - DNA, 97 bp, Homo sapiens; identical to SEQ ID NO: 179

SEQ ID NO: 7526 - DNA, 82 bp, Homo sapiens; identical to SEQ ID NO: 223

SEQ ID NO: 7527 - DNA, 51 bp, Homo sapiens; identical to SEQ ID NO: 334

SEQ ID NO: 7528 - DNA, 431 bp, Homo sapiens; identical to SEQ ID NO: 374

SEQ ID NO: 7529 - DNA, 258 bp, Homo sapiens; identical to SEQ ID NO: 385

SEQ ID NO: 7530 - DNA, 84 bp, Homo sapiens; identical to SEQ ID NO: 396

SEQ ID NO: 7531 - DNA, 62 bp, Homo sapiens; identical to SEQ ID NO: 407

SEQ ID NO: 7532 - DNA, 50 bp, Homo sapiens; identical to SEQ ID NO: 418

SEQ ID NO: 7533 - DNA, 1017 bp, Homo sapiens; identical to SEQ ID NO: 429

SEQ ID NO: 7534 - DNA, 166 bp, Homo sapiens; identical to SEQ ID NO: 430

SEQ ID NO: 7535 - DNA, 125 bp, Homo sapiens; identical to SEQ ID NO: 441

SEQ ID NO: 7536 - DNA, 508 bp, Homo sapiens; identical to SEQ ID NO: 452

SEQ ID NO: 7537 - DNA, 396 bp, Homo sapiens; identical to SEQ ID NO: 463

SEQ ID NO: 7538 - DNA, 173 bp, Homo sapiens; identical to SEQ ID NO: 474

SEQ ID NO: 7539 - DNA, 97 bp, Homo sapiens; identical to SEQ ID NO: 485

SEQ ID NO: 7540 - DNA, 208 bp, Homo sapiens; identical to SEQ ID NO: 496

SEQ ID NO: 7541 - DNA, 647 bp, Homo sapiens; identical to SEQ ID NO: 507

SEQ ID NO: 7542 - DNA, 282 bp, Homo sapiens; identical to SEQ ID NO: 518

SEQ ID NO: 7543 - DNA, 32 bp, Homo sapiens; identical to SEQ ID NO: 529

SEQ ID NO: 7544 - DNA, 56 bp, Homo sapiens; identical to SEQ ID NO: 540

SEQ ID NO: 7545 - DNA, 44 bp, Homo sapiens; identical to SEQ ID NO: 541

SEQ ID NO: 7546 - DNA, 211 bp, Homo sapiens; identical to SEQ ID NO: 552

SEQ ID NO: 7547 - DNA, 141 bp, Homo sapiens; identical to SEQ ID NO: 563

SEQ ID NO: 7548 - DNA, 25 bp, Homo sapiens
cgccaaccagacctcagggtgcacg

SEQ ID NO: 7549 - DNA, 498 bp, Homo sapiens; identical to SEQ ID NO: 585

SEQ ID NO: 7550 - DNA, 186 bp, Homo sapiens; identical to SEQ ID NO: 596

SEQ ID NO: 7551 - DNA, 97 bp, Homo sapiens; identical to SEQ ID NO: 607

SEQ ID NO: 7552 - DNA, 82 bp, Homo sapiens; identical to SEQ ID NO: 651

SEQ ID NO: 7553 - DNA, 51 bp, Homo sapiens; identical to SEQ ID NO: 762

SEQ ID NO: 7554 - DNA, 431 bp, Homo sapiens; identical to SEQ ID NO: 802

SEQ ID NO: 7555 - DNA, 258 bp, Homo sapiens; identical to SEQ ID NO: 813

SEQ ID NO: 7556 - DNA, 84 bp, Homo sapiens; identical to SEQ ID NO: 824

SEQ ID NO: 7557 - DNA, 62 bp, Homo sapiens; identical to SEQ ID NO: 835

SEQ ID NO: 7558 - DNA, 50 bp, Homo sapiens; identical to SEQ ID NO: 846

SEQ ID NO: 7559 - DNA, 1017 bp, Artificial Sequence; identical to SEQ ID NO: 857
  Description of Artificial Sequence: Synthetic polynucleotide

SEQ ID NO: 7560 - DNA, 166 bp, Artificial Sequence; identical to SEQ ID NO: 858
  Description of Artificial Sequence: Synthetic polynucleotide

SEQ ID NO: 7561 - DNA, 125 bp, Artificial Sequence; identical to SEQ ID NO: 869
  Description of Artificial Sequence: Synthetic polynucleotide

SEQ ID NO: 7562 - DNA, 508 bp, Artificial Sequence; identical to SEQ ID NO: 880
  Description of Artificial Sequence: Synthetic polynucleotide

SEQ ID NO: 7563 - DNA, 396 bp, Artificial Sequence; identical to SEQ ID NO: 891
  Description of Artificial Sequence: Synthetic polynucleotide

SEQ ID NO: 7564 - DNA, 173 bp, Artificial Sequence; identical to SEQ ID NO: 902
  Description of Artificial Sequence: Synthetic polynucleotide

SEQ ID NO: 7565 - DNA, 97 bp, Artificial Sequence; identical to SEQ ID NO: 913
  Description of Artificial Sequence: Synthetic oligonucleotide

SEQ ID NO: 7566 - DNA, 208 bp, Artificial Sequence; identical to SEQ ID NO: 924
  Description of Artificial Sequence: Synthetic polynucleotide

SEQ ID NO: 7567 - DNA, 647 bp, Artificial Sequence; identical to SEQ ID NO: 935
  Description of Artificial Sequence: Synthetic polynucleotide

SEQ ID NO: 7568 - DNA, 282 bp, Artificial Sequence; identical to SEQ ID NO: 946
  Description of Artificial Sequence: Synthetic polynucleotide

SEQ ID NO: 7569 - DNA, 32 bp, Artificial Sequence; identical to SEQ ID NO: 957
  Description of Artificial Sequence: Synthetic oligonucleotide

SEQ ID NO: 7570 - DNA, 56 bp, Artificial Sequence; identical to SEQ ID NO: 968
  Description of Artificial Sequence: Synthetic oligonucleotide

SEQ ID NO: 7571 - DNA, 44 bp, Artificial Sequence; identical to SEQ ID NO: 969
  Description of Artificial Sequence: Synthetic oligonucleotide

SEQ ID NO: 7572 - DNA, 211 bp, Artificial Sequence; identical to SEQ ID NO: 980
  Description of Artificial Sequence: Synthetic polynucleotide

SEQ ID NO: 7573 - DNA, 141 bp, Artificial Sequence; identical to SEQ ID NO: 991
  Description of Artificial Sequence: Synthetic polynucleotide

SEQ ID NO: 7574 - DNA, 25 bp, Artificial Sequence
  Description of Artificial Sequence: Synthetic oligonucleotide
ygtgtattttgaggtttggttggyg

SEQ ID NO: 7575 - DNA, 498 bp, Artificial Sequence; identical to SEQ ID NO: 1013
  Description of Artificial Sequence: Synthetic polynucleotide

SEQ ID NO: 7576 - DNA, 186 bp, Artificial Sequence; identical to SEQ ID NO: 1024
  Description of Artificial Sequence: Synthetic polynucleotide

SEQ ID NO: 7577 - DNA, 97 bp, Artificial Sequence; identical to SEQ ID NO: 1035
  Description of Artificial Sequence: Synthetic oligonucleotide

SEQ ID NO: 7578 - DNA, 82 bp, Artificial Sequence; identical to SEQ ID NO: 1079
  Description of Artificial Sequence: Synthetic oligonucleotide

SEQ ID NO: 7579 - DNA, 51 bp, Artificial Sequence; identical to SEQ ID NO: 1190
  Description of Artificial Sequence: Synthetic oligonucleotide

SEQ ID NO: 7580 - DNA, 431 bp, Artificial Sequence; identical to SEQ ID NO: 1230
  Description of Artificial Sequence: Synthetic polynucleotide

SEQ ID NO: 7581 - DNA, 258 bp, Artificial Sequence; identical to SEQ ID NO: 1241
  Description of Artificial Sequence: Synthetic polynucleotide

SEQ ID NO: 7582 - DNA, 84 bp, Artificial Sequence; identical to SEQ ID NO: 1252
  Description of Artificial Sequence: Synthetic oligonucleotide

SEQ ID NO: 7583 - DNA, 62 bp, Artificial Sequence; identical to SEQ ID NO: 1263
  Description of Artificial Sequence: Synthetic oligonucleotide

SEQ ID NO: 7584 - DNA, 50 bp, Artificial Sequence; identical to SEQ ID NO: 1274
  Description of Artificial Sequence: Synthetic oligonucleotide

SEQ ID NO: 7585 - DNA, 1017 bp, Artificial Sequence; identical to SEQ ID NO: 1285
  Description of Artificial Sequence: Synthetic polynucleotide

SEQ ID NO: 7586 - DNA, 166 bp, Artificial Sequence; identical to SEQ ID NO: 1286
  Description of Artificial Sequence: Synthetic polynucleotide

SEQ ID NO: 7587 - DNA, 125 bp, Artificial Sequence; identical to SEQ ID NO: 1297
  Description of Artificial Sequence: Synthetic polynucleotide

SEQ ID NO: 7588 - DNA, 508 bp, Artificial Sequence; identical to SEQ ID NO: 1308
  Description of Artificial Sequence: Synthetic polynucleotide

SEQ ID NO: 7589 - DNA, 396 bp, Artificial Sequence; identical to SEQ ID NO: 1319
  Description of Artificial Sequence: Synthetic polynucleotide

SEQ ID NO: 7590 - DNA, 173 bp, Artificial Sequence; identical to SEQ ID NO: 1330
  Description of Artificial Sequence: Synthetic polynucleotide

SEQ ID NO: 7591 - DNA, 97 bp, Artificial Sequence; identical to SEQ ID NO: 1341
  Description of Artificial Sequence: Synthetic oligonucleotide

SEQ ID NO: 7592 - DNA, 208 bp, Artificial Sequence; identical to SEQ ID NO: 1352
  Description of Artificial Sequence: Synthetic polynucleotide

SEQ ID NO: 7593 - DNA, 647 bp, Artificial Sequence; identical to SEQ ID NO: 1363
  Description of Artificial Sequence: Synthetic polynucleotide

SEQ ID NO: 7594 - DNA, 282 bp, Artificial Sequence; identical to SEQ ID NO: 1374
  Description of Artificial Sequence: Synthetic polynucleotide

SEQ ID NO: 7595 - DNA, 32 bp, Artificial Sequence; identical to SEQ ID NO: 1385
  Description of Artificial Sequence: Synthetic oligonucleotide

SEQ ID NO: 7596 - DNA, 56 bp, Artificial Sequence; identical to SEQ ID NO: 1396
  Description of Artificial Sequence: Synthetic oligonucleotide

SEQ ID NO: 7597 - DNA, 44 bp, Artificial Sequence; identical to SEQ ID NO: 113
  Description of Artificial Sequence: Synthetic oligonucleotide

SEQ ID NO: 7598 - DNA, 211 bp, Artificial Sequence; identical to SEQ ID NO: 1408
  Description of Artificial Sequence: Synthetic polynucleotide

SEQ ID NO: 7599 - DNA, 141 bp, Artificial Sequence; identical to SEQ ID NO: 1419
  Description of Artificial Sequence: Synthetic polynucleotide

SEQ ID NO: 7600 - DNA, 25 bp, Artificial Sequence
  Description of Artificial Sequence: Synthetic oligonucleotide
cgtgtattttgaggtttggttggcg

SEQ ID NO: 7601 - DNA, 498 bp, Artificial Sequence; identical to SEQ ID NO: 1441
  Description of Artificial Sequence: Synthetic polynucleotide

SEQ ID NO: 7602 - DNA, 186 bp, Artificial Sequence; identical to SEQ ID NO: 1452
  Description of Artificial Sequence: Synthetic polynucleotide

SEQ ID NO: 7603 - DNA, 97 bp, Artificial Sequence; identical to SEQ ID NO: 1463
  Description of Artificial Sequence: Synthetic oligonucleotide

SEQ ID NO: 7604 - DNA, 82 bp, Artificial Sequence; identical to SEQ ID NO: 1507
  Description of Artificial Sequence: Synthetic oligonucleotide

SEQ ID NO: 7605 - DNA, 51 bp, Artificial Sequence; identical to SEQ ID NO: 1618
  Description of Artificial Sequence: Synthetic oligonucleotide

SEQ ID NO: 7606 - DNA, 431 bp, Artificial Sequence; identical to SEQ ID NO: 1658
  Description of Artificial Sequence: Synthetic polynucleotide

SEQ ID NO: 7607 - DNA, 258 bp, Artificial Sequence; identical to SEQ ID NO: 1669
  Description of Artificial Sequence: Synthetic polynucleotide

SEQ ID NO: 7608 - DNA, 84 bp, Artificial Sequence; identical to SEQ ID NO: 1680
  Description of Artificial Sequence: Synthetic oligonucleotide

SEQ ID NO: 7609 - DNA, 62 bp, Artificial Sequence; identical to SEQ ID NO: 1691
  Description of Artificial Sequence: Synthetic oligonucleotide

SEQ ID NO: 7610 - DNA, 50 bp, Artificial Sequence; identical to SEQ ID NO: 1702
  Description of Artificial Sequence: Synthetic oligonucleotide

SEQ ID NO: 7611 - DNA, 1017 bp, Artificial Sequence; identical to SEQ ID NO: 1713
  Description of Artificial Sequence: Synthetic polynucleotide

SEQ ID NO: 7612 - DNA, 166 bp, Artificial Sequence; identical to SEQ ID NO: 1714
  Description of Artificial Sequence: Synthetic polynucleotide

SEQ ID NO: 7613 - DNA, 125 bp, Artificial Sequence; identical to SEQ ID NO: 1725
  Description of Artificial Sequence: Synthetic polynucleotide

SEQ ID NO: 7614 - DNA, 508 bp, Artificial Sequence; identical to SEQ ID NO: 1736
  Description of Artificial Sequence: Synthetic polynucleotide

SEQ ID NO: 7615 - DNA, 396 bp, Artificial Sequence; identical to SEQ ID NO: 1747
  Description of Artificial Sequence: Synthetic polynucleotide

SEQ ID NO: 7616 - DNA, 173 bp, Artificial Sequence; identical to SEQ ID NO: 1758
  Description of Artificial Sequence: Synthetic polynucleotide

SEQ ID NO: 7617 - DNA, 97 bp, Artificial Sequence; identical to SEQ ID NO: 1769
  Description of Artificial Sequence: Synthetic oligonucleotide

SEQ ID NO: 7618 - DNA, 208 bp, Artificial Sequence; identical to SEQ ID NO: 1780
  Description of Artificial Sequence: Synthetic polynucleotide

SEQ ID NO: 7619 - DNA, 647 bp, Artificial Sequence; identical to SEQ ID NO: 1791
  Description of Artificial Sequence: Synthetic polynucleotide

SEQ ID NO: 7620 - DNA, 282 bp, Artificial Sequence; identical to SEQ ID NO: 1802
  Description of Artificial Sequence: Synthetic polynucleotide

SEQ ID NO: 7621 - DNA, 32 bp, Artificial Sequence; identical to SEQ ID NO: 1813
  Description of Artificial Sequence: Synthetic oligonucleotide

SEQ ID NO: 7622 - DNA, 56 bp, Artificial Sequence; identical to SEQ ID NO: 1824
  Description of Artificial Sequence: Synthetic oligonucleotide

SEQ ID NO: 7623 - DNA, 44 bp, Artificial Sequence; identical to SEQ ID NO: 1825
  Description of Artificial Sequence: Synthetic oligonucleotide

SEQ ID NO: 7624 - DNA, 211 bp, Artificial Sequence; identical to SEQ ID NO: 1836
  Description of Artificial Sequence: Synthetic polynucleotide

SEQ ID NO: 7625 - DNA, 141 bp, Artificial Sequence; identical to SEQ ID NO: 1847
  Description of Artificial Sequence: Synthetic polynucleotide

SEQ ID NO: 7626 - DNA, 25 bp, Artificial Sequence
  Description of Artificial Sequence: Synthetic oligonucleotide
ygttaattagattttagggtgtayg

SEQ ID NO: 7627 - DNA, 498 bp, Artificial Sequence; identical to SEQ ID NO: 1869
  Description of Artificial Sequence: Synthetic polynucleotide

SEQ ID NO: 7628 - DNA, 186 bp, Artificial Sequence; identical to SEQ ID NO: 1880
  Description of Artificial Sequence: Synthetic polynucleotide

SEQ ID NO: 7629 - DNA, 97 bp, Artificial Sequence; identical to SEQ ID NO: 1891
  Description of Artificial Sequence: Synthetic oligonucleotide

SEQ ID NO: 7630 - DNA, 82 bp, Artificial Sequence; identical to SEQ ID NO: 1935
  Description of Artificial Sequence: Synthetic oligonucleotide

SEQ ID NO: 7631 - DNA, 51 bp, Artificial Sequence; identical to SEQ ID NO: 2046
  Description of Artificial Sequence: Synthetic oligonucleotide

SEQ ID NO: 7632 - DNA, 431 bp, Artificial Sequence; identical to SEQ ID NO: 2086
  Description of Artificial Sequence: Synthetic polynucleotide

SEQ ID NO: 7633 - DNA, 258 bp, Artificial Sequence; identical to SEQ ID NO: 2097
  Description of Artificial Sequence: Synthetic polynucleotide

SEQ ID NO: 7634 - DNA, 84 bp, Artificial Sequence; identical to SEQ ID NO: 2108
  Description of Artificial Sequence: Synthetic oligonucleotide

SEQ ID NO: 7635 - DNA, 62 bp, Artificial Sequence; identical to SEQ ID NO: 2119
  Description of Artificial Sequence: Synthetic oligonucleotide

SEQ ID NO: 7636 - DNA, 50 bp, Artificial Sequence; identical to SEQ ID NO: 2130
  Description of Artificial Sequence: Synthetic oligonucleotide

SEQ ID NO: 7637 - DNA, 1017 bp, Artificial Sequence; identical to SEQ ID NO: 2141
  Description of Artificial Sequence: Synthetic polynucleotide

SEQ ID NO: 7638 - DNA, 166 bp, Artificial Sequence; identical to SEQ ID NO: 2142
  Description of Artificial Sequence: Synthetic polynucleotide

SEQ ID NO: 7639 - DNA, 125 bp, Artificial Sequence; identical to SEQ ID NO: 2153
  Description of Artificial Sequence: Synthetic polynucleotide

SEQ ID NO: 7640 - DNA, 508 bp, Artificial Sequence; identical to SEQ ID NO: 2164
  Description of Artificial Sequence: Synthetic polynucleotide

SEQ ID NO: 7641 - DNA, 396 bp, Artificial Sequence; identical to SEQ ID NO: 2175
  Description of Artificial Sequence: Synthetic polynucleotide

SEQ ID NO: 7642 - DNA, 173 bp, Artificial Sequence; identical to SEQ ID NO: 2186
  Description of Artificial Sequence: Synthetic polynucleotide

SEQ ID NO: 7643 - DNA, 97 bp, Artificial Sequence; identical to SEQ ID NO: 2197
  Description of Artificial Sequence: Synthetic oligonucleotide

SEQ ID NO: 7644 - DNA, 208 bp, Artificial Sequence; identical to SEQ ID NO: 2208
  Description of Artificial Sequence: Synthetic polynucleotide

SEQ ID NO: 7645 - DNA, 647 bp, Artificial Sequence; identical to SEQ ID NO: 2219
  Description of Artificial Sequence: Synthetic polynucleotide

SEQ ID NO: 7646 - DNA, 282 bp, Artificial Sequence; identical to SEQ ID NO: 2230
  Description of Artificial Sequence: Synthetic polynucleotide

SEQ ID NO: 7647 - DNA, 32 bp, Artificial Sequence; identical to SEQ ID NO: 2241
  Description of Artificial Sequence: Synthetic oligonucleotide

SEQ ID NO: 7648 - DNA, 56 bp, Artificial Sequence; identical to SEQ ID NO: 2252
  Description of Artificial Sequence: Synthetic oligonucleotide

SEQ ID NO: 7649 - DNA, 44 bp, Artificial Sequence; identical to SEQ ID NO: 2253
  Description of Artificial Sequence: Synthetic oligonucleotide

SEQ ID NO: 7650 - DNA, 211 bp, Artificial Sequence; identical to SEQ ID NO: 2264
  Description of Artificial Sequence: Synthetic polynucleotide

SEQ ID NO: 7651 - DNA, 141 bp, Artificial Sequence; identical to SEQ ID NO: 2275
  Description of Artificial Sequence: Synthetic polynucleotide

SEQ ID NO: 7652 - DNA, 25 bp, Artificial Sequence
  Description of Artificial Sequence: Synthetic oligonucleotide
cgttaattagattttagggtgtacg

SEQ ID NO: 7653 - DNA, 498 bp, Artificial Sequence; identical to SEQ ID NO: 2297
  Description of Artificial Sequence: Synthetic polynucleotide

SEQ ID NO: 7654 - DNA, 186 bp, Artificial Sequence; identical to SEQ ID NO: 2308
  Description of Artificial Sequence: Synthetic polynucleotide

SEQ ID NO: 7655 - DNA, 97 bp, Artificial Sequence; identical to SEQ ID NO: 2319
  Description of Artificial Sequence: Synthetic oligonucleotide

SEQ ID NO: 7656 - DNA, 82 bp, Artificial Sequence; identical to SEQ ID NO: 2363
  Description of Artificial Sequence: Synthetic oligonucleotide

SEQ ID NO: 7657 - DNA, 51 bp, Artificial Sequence; identical to SEQ ID NO: 2474
  Description of Artificial Sequence: Synthetic oligonucleotide

SEQ ID NO: 7658 - DNA, 431 bp, Artificial Sequence; identical to SEQ ID NO: 2514
  Description of Artificial Sequence: Synthetic polynucleotide

SEQ ID NO: 7659 - DNA, 258 bp, Artificial Sequence; identical to SEQ ID NO: 2525
  Description of Artificial Sequence: Synthetic polynucleotide

SEQ ID NO: 7660 - DNA, 84 bp, Artificial Sequence; identical to SEQ ID NO: 2536
  Description of Artificial Sequence: Synthetic oligonucleotide

SEQ ID NO: 7661 - DNA, 62 bp, Artificial Sequence; identical to SEQ ID NO: 2547
  Description of Artificial Sequence: Synthetic oligonucleotide

SEQ ID NO: 7662 - DNA, 50 bp, Artificial Sequence; identical to SEQ ID NO: 2558
  Description of Artificial Sequence: Synthetic oligonucleotide

SEQ ID NO: 7663 - DNA, 1216 bp, Homo sapiens; identical to SEQ ID NO: 2569

SEQ ID NO: 7664 - DNA, 365 bp, Homo sapiens; identical to SEQ ID NO: 2570

SEQ ID NO: 7665 - DNA, 324 bp, Homo sapiens; identical to SEQ ID NO: 2581

SEQ ID NO: 7666 - DNA, 707 bp, Homo sapiens; identical to SEQ ID NO: 2592

SEQ ID NO: 7667 - DNA, 595 bp, Homo sapiens; identical to SEQ ID NO: 2603

SEQ ID NO: 7668 - DNA, 372 bp, Homo sapiens; identical to SEQ ID NO: 2614

SEQ ID NO: 7669 - DNA, 296 bp, Homo sapiens; identical to SEQ ID NO: 2625

SEQ ID NO: 7670 - DNA, 407 bp, Homo sapiens; identical to SEQ ID NO: 2636

SEQ ID NO: 7671 - DNA, 846 bp, Homo sapiens; identical to SEQ ID NO: 2647

SEQ ID NO: 7672 - DNA, 481 bp, Homo sapiens; identical to SEQ ID NO: 2658

SEQ ID NO: 7673 - DNA, 231 bp, Homo sapiens; identical to SEQ ID NO: 2669

SEQ ID NO: 7674 - DNA, 255 bp, Homo sapiens; identical to SEQ ID NO: 2680

SEQ ID NO: 7675 - DNA, 243 bp, Homo sapiens; identical to SEQ ID NO: 2681

SEQ ID NO: 7676 - DNA, 410 bp, Homo sapiens; identical to SEQ ID NO: 2692

SEQ ID NO: 7677 - DNA, 340 bp, Homo sapiens; identical to SEQ ID NO: 2703

SEQ ID NO: 7678 - DNA, 224 bp, Homo sapiens; identical to SEQ ID NO: 2714

SEQ ID NO: 7679 - DNA, 697 bp, Homo sapiens; identical to SEQ ID NO: 2725

SEQ ID NO: 7680 - DNA, 385 bp, Homo sapiens; identical to SEQ ID NO: 2736

SEQ ID NO: 7681 - DNA, 296 bp, Homo sapiens; identical to SEQ ID NO: 2747

SEQ ID NO: 7682 - DNA, 281 bp, Homo sapiens; identical to SEQ ID NO: 2791

SEQ ID NO: 7683 - DNA, 250 bp, Homo sapiens; identical to SEQ ID NO: 2902

SEQ ID NO: 7684 - DNA, 630 bp, Homo sapiens; identical to SEQ ID NO: 2942

SEQ ID NO: 7685 - DNA, 457 bp, Homo sapiens; identical to SEQ ID NO: 2953

SEQ ID NO: 7686 - DNA, 283 bp, Homo sapiens; identical to SEQ ID NO: 2964

SEQ ID NO: 7687 - DNA, 261 bp, Homo sapiens; identical to SEQ ID NO: 2975

SEQ ID NO: 7688 - DNA, 249 bp, Homo sapiens; identical to SEQ ID NO: 2986

SEQ ID NO: 7689 - DNA, 1216 bp, Homo sapiens; identical to SEQ ID NO: 2997

SEQ ID NO: 7690 - DNA, 365 bp, Homo sapiens; identical to SEQ ID NO: 2998

SEQ ID NO: 7691 - DNA, 324 bp, Homo sapiens; identical to SEQ ID NO: 3009

SEQ ID NO: 7692 - DNA, 707 bp, Homo sapiens; identical to SEQ ID NO: 3020

SEQ ID NO: 7693 - DNA, 595 bp, Homo sapiens; identical to SEQ ID NO: 3031

SEQ ID NO: 7694 - DNA, 372 bp, Homo sapiens; identical to SEQ ID NO: 3042

SEQ ID NO: 7695 - DNA, 296 bp, Homo sapiens; identical to SEQ ID NO: 3053

SEQ ID NO: 7696 - DNA, 407 bp, Homo sapiens; identical to SEQ ID NO: 3064

SEQ ID NO: 7697 - DNA, 846 bp, Homo sapiens; identical to SEQ ID NO: 3075

SEQ ID NO: 7698 - DNA, 481 bp, Homo sapiens; identical to SEQ ID NO: 3086

SEQ ID NO: 7699 - DNA, 231 bp, Homo sapiens; identical to SEQ ID NO: 3097

SEQ ID NO: 7700 - DNA, 255 bp, Homo sapiens; identical to SEQ ID NO: 3108

SEQ ID NO: 7701 - DNA, 243 bp, Homo sapiens; identical to SEQ ID NO: 3109

SEQ ID NO: 7702 - DNA, 410 bp, Homo sapiens; identical to SEQ ID NO: 3120

SEQ ID NO: 7703 - DNA, 340 bp, Homo sapiens; identical to SEQ ID NO: 3131

SEQ ID NO: 7704 - DNA, 224 bp, Homo sapiens; identical to SEQ ID NO: 3142

SEQ ID NO: 7705 - DNA, 697 bp, Homo sapiens; identical to SEQ ID NO: 3153

SEQ ID NO: 7706 - DNA, 385 bp, Homo sapiens; identical to SEQ ID NO: 3164

SEQ ID NO: 7707 - DNA, 296 bp, Homo sapiens; identical to SEQ ID NO: 3175

SEQ ID NO: 7708 - DNA, 281 bp, Homo sapiens; identical to SEQ ID NO: 3219

SEQ ID NO: 7709 - DNA, 250 bp, Homo sapiens; identical to SEQ ID NO: 3330

SEQ ID NO: 7710 - DNA, 630 bp, Homo sapiens; identical to SEQ ID NO: 3370

SEQ ID NO: 7711 - DNA, 457 bp, Homo sapiens; identical to SEQ ID NO: 3381

SEQ ID NO: 7712 - DNA, 283 bp, Homo sapiens; identical to SEQ ID NO: 3392

SEQ ID NO: 7713 - DNA, 261 bp, Homo sapiens; identical to SEQ ID NO: 3403

SEQ ID NO: 7714 - DNA, 249 bp, Homo sapiens; identical to SEQ ID NO: 3414

SEQ ID NO: 7715 - DNA, 1216 bp, Artificial Sequence; identical to SEQ ID NO: 3425
  Description of Artificial Sequence: Synthetic polynucleotide

SEQ ID NO: 7716 - DNA, 365 bp, Artificial Sequence; identical to SEQ ID NO: 3426
  Description of Artificial Sequence: Synthetic polynucleotide

SEQ ID NO: 7717 - DNA, 324 bp, Artificial Sequence; identical to SEQ ID NO: 3437
  Description of Artificial Sequence: Synthetic polynucleotide

SEQ ID NO: 7718 - DNA, 707 bp, Artificial Sequence; identical to SEQ ID NO: 3448
  Description of Artificial Sequence: Synthetic polynucleotide

SEQ ID NO: 7719 - DNA, 595 bp, Artificial Sequence; identical to SEQ ID NO: 3459
  Description of Artificial Sequence: Synthetic polynucleotide

SEQ ID NO: 7720 - DNA, 372 bp, Artificial Sequence; identical to SEQ ID NO: 3470
  Description of Artificial Sequence: Synthetic polynucleotide

SEQ ID NO: 7721 - DNA, 296 bp, Artificial Sequence; identical to SEQ ID NO: 3481
  Description of Artificial Sequence: Synthetic polynucleotide

SEQ ID NO: 7722 - DNA, 407 bp, Artificial Sequence; identical to SEQ ID NO: 3492
  Description of Artificial Sequence: Synthetic polynucleotide

SEQ ID NO: 7723 - DNA, 846 bp, Artificial Sequence; identical to SEQ ID NO: 3503
  Description of Artificial Sequence: Synthetic polynucleotide

SEQ ID NO: 7724 - DNA, 481 bp, Artificial Sequence; identical to SEQ ID NO: 3514
  Description of Artificial Sequence: Synthetic polynucleotide

SEQ ID NO: 7725 - DNA, 231 bp, Artificial Sequence; identical to SEQ ID NO: 3525
  Description of Artificial Sequence: Synthetic polynucleotide

SEQ ID NO: 7726 - DNA, 255 bp, Artificial Sequence; identical to SEQ ID NO: 3536
  Description of Artificial Sequence: Synthetic polynucleotide

SEQ ID NO: 7727 - DNA, 243 bp, Artificial Sequence; identical to SEQ ID NO: 3537
  Description of Artificial Sequence: Synthetic polynucleotide

SEQ ID NO: 7728 - DNA, 410 bp, Artificial Sequence; identical to SEQ ID NO: 3548
  Description of Artificial Sequence: Synthetic polynucleotide

SEQ ID NO: 7729 - DNA, 340 bp, Artificial Sequence; identical to SEQ ID NO: 3559
  Description of Artificial Sequence: Synthetic polynucleotide

SEQ ID NO: 7730 - DNA, 224 bp, Artificial Sequence; identical to SEQ ID NO: 3570
  Description of Artificial Sequence: Synthetic polynucleotide

SEQ ID NO: 7731 - DNA, 697 bp, Artificial Sequence; identical to SEQ ID NO: 3581
  Description of Artificial Sequence: Synthetic polynucleotide

SEQ ID NO: 7732 - DNA, 385 bp, Artificial Sequence; identical to SEQ ID NO: 3592
  Description of Artificial Sequence: Synthetic polynucleotide

SEQ ID NO: 7733 - DNA, 296 bp, Artificial Sequence; identical to SEQ ID NO: 3603
  Description of Artificial Sequence: Synthetic polynucleotide

SEQ ID NO: 7734 - DNA, 281 bp, Artificial Sequence; identical to SEQ ID NO: 3647
  Description of Artificial Sequence: Synthetic polynucleotide

SEQ ID NO: 7735 - DNA, 250 bp, Artificial Sequence; identical to SEQ ID NO: 3758
  Description of Artificial Sequence: Synthetic polynucleotide

SEQ ID NO: 7736 - DNA, 630 bp, Artificial Sequence; identical to SEQ ID NO: 3798
  Description of Artificial Sequence: Synthetic polynucleotide

SEQ ID NO: 7737 - DNA, 457 bp, Artificial Sequence; identical to SEQ ID NO: 3809
  Description of Artificial Sequence: Synthetic polynucleotide

SEQ ID NO: 7738 - DNA, 283 bp, Artificial Sequence; identical to SEQ ID NO: 3820
  Description of Artificial Sequence: Synthetic polynucleotide

SEQ ID NO: 7739 - DNA, 261 bp, Artificial Sequence; identical to SEQ ID NO: 3831
  Description of Artificial Sequence: Synthetic polynucleotide

SEQ ID NO: 7740 - DNA, 249 bp, Artificial Sequence; identical to SEQ ID NO: 3842
  Description of Artificial Sequence: Synthetic polynucleotide

SEQ ID NO: 7741 - DNA, 1216 bp, Artificial Sequence; identical to SEQ ID NO: 3853
  Description of Artificial Sequence: Synthetic polynucleotide

SEQ ID NO: 7742 - DNA, 365 bp, Artificial Sequence; identical to SEQ ID NO: 3854
  Description of Artificial Sequence: Synthetic polynucleotide

SEQ ID NO: 7743 - DNA, 324 bp, Artificial Sequence; identical to SEQ ID NO: 3865
  Description of Artificial Sequence: Synthetic polynucleotide

SEQ ID NO: 7744 - DNA, 707 bp, Artificial Sequence; identical to SEQ ID NO: 3876
  Description of Artificial Sequence: Synthetic polynucleotide

SEQ ID NO: 7745 - DNA, 595 bp, Artificial Sequence; identical to SEQ ID NO: 3887
  Description of Artificial Sequence: Synthetic polynucleotide

SEQ ID NO: 7746 - DNA, 372 bp, Artificial Sequence; identical to SEQ ID NO: 3898
  Description of Artificial Sequence: Synthetic polynucleotide

SEQ ID NO: 7747 - DNA, 296 bp, Artificial Sequence; identical to SEQ ID NO: 3909
  Description of Artificial Sequence: Synthetic polynucleotide

SEQ ID NO: 7748 - DNA, 407 bp, Artificial Sequence; identical to SEQ ID NO: 3920
  Description of Artificial Sequence: Synthetic polynucleotide

SEQ ID NO: 7749 - DNA, 846 bp, Artificial Sequence; identical to SEQ ID NO: 3931
  Description of Artificial Sequence: Synthetic polynucleotide

SEQ ID NO: 7750 - DNA, 481 bp, Artificial Sequence; identical to SEQ ID NO: 3942
  Description of Artificial Sequence: Synthetic polynucleotide

SEQ ID NO: 7751 - DNA, 231 bp, Artificial Sequence; identical to SEQ ID NO: 3953
  Description of Artificial Sequence: Synthetic polynucleotide

SEQ ID NO: 7752 - DNA, 255 bp, Artificial Sequence; identical to SEQ ID NO: 3964
  Description of Artificial Sequence: Synthetic polynucleotide

SEQ ID NO: 7753 - DNA, 243 bp, Artificial Sequence; identical to SEQ ID NO: 3965
  Description of Artificial Sequence: Synthetic polynucleotide

SEQ ID NO: 7754 - DNA, 410 bp, Artificial Sequence; identical to SEQ ID NO: 3976
  Description of Artificial Sequence: Synthetic polynucleotide

SEQ ID NO: 7755 - DNA, 340 bp, Artificial Sequence; identical to SEQ ID NO: 3987
  Description of Artificial Sequence: Synthetic polynucleotide

SEQ ID NO: 7756 - DNA, 224 bp, Artificial Sequence; identical to SEQ ID NO: 3998
  Description of Artificial Sequence: Synthetic polynucleotide

SEQ ID NO: 7757 - DNA, 697 bp, Artificial Sequence; identical to SEQ ID NO: 4009
  Description of Artificial Sequence: Synthetic polynucleotide

SEQ ID NO: 7758 - DNA, 385 bp, Artificial Sequence; identical to SEQ ID NO: 4020
  Description of Artificial Sequence: Synthetic polynucleotide

SEQ ID NO: 7759 - DNA, 296 bp, Artificial Sequence; identical to SEQ ID NO: 4031
  Description of Artificial Sequence: Synthetic polynucleotide

SEQ ID NO: 7760 - DNA, 281 bp, Artificial Sequence; identical to SEQ ID NO: 4075
  Description of Artificial Sequence: Synthetic polynucleotide

SEQ ID NO: 7761 - DNA, 250 bp, Artificial Sequence; identical to SEQ ID NO: 4186
  Description of Artificial Sequence: Synthetic polynucleotide

SEQ ID NO: 7762 - DNA, 630 bp, Artificial Sequence; identical to SEQ ID NO: 4226
  Description of Artificial Sequence: Synthetic polynucleotide

SEQ ID NO: 7763 - DNA, 457 bp, Artificial Sequence; identical to SEQ ID NO: 4237
  Description of Artificial Sequence: Synthetic polynucleotide

SEQ ID NO: 7764 - DNA, 283 bp, Artificial Sequence; identical to SEQ ID NO: 4248
  Description of Artificial Sequence: Synthetic polynucleotide

SEQ ID NO: 7765 - DNA, 261 bp, Artificial Sequence; identical to SEQ ID NO: 4259
  Description of Artificial Sequence: Synthetic polynucleotide

SEQ ID NO: 7766 - DNA, 249 bp, Artificial Sequence; identical to SEQ ID NO: 4270
  Description of Artificial Sequence: Synthetic polynucleotide

SEQ ID NO: 7767 - DNA, 1216 bp, Artificial Sequence; identical to SEQ ID NO: 4281
  Description of Artificial Sequence: Synthetic polynucleotide

SEQ ID NO: 7768 - DNA, 365 bp, Artificial Sequence; identical to SEQ ID NO: 4282
  Description of Artificial Sequence: Synthetic polynucleotide

SEQ ID NO: 7769 - DNA, 324 bp, Artificial Sequence; identical to SEQ ID NO: 4293
  Description of Artificial Sequence: Synthetic polynucleotide

SEQ ID NO: 7770 - DNA, 707 bp, Artificial Sequence; identical to SEQ ID NO: 4304
  Description of Artificial Sequence: Synthetic polynucleotide

SEQ ID NO: 7771 - DNA, 595 bp, Artificial Sequence; identical to SEQ ID NO: 4315
  Description of Artificial Sequence: Synthetic polynucleotide

SEQ ID NO: 7772 - DNA, 372 bp, Artificial Sequence; identical to SEQ ID NO: 4326
  Description of Artificial Sequence: Synthetic polynucleotide

SEQ ID NO: 7773 - DNA, 296 bp, Artificial Sequence; identical to SEQ ID NO: 4337
  Description of Artificial Sequence: Synthetic polynucleotide

SEQ ID NO: 7774 - DNA, 407 bp, Artificial Sequence; identical to SEQ ID NO: 4348
  Description of Artificial Sequence: Synthetic polynucleotide

SEQ ID NO: 7775 - DNA, 846 bp, Artificial Sequence; identical to SEQ ID NO: 4359
  Description of Artificial Sequence: Synthetic polynucleotide

SEQ ID NO: 7776 - DNA, 481 bp, Artificial Sequence; identical to SEQ ID NO: 4370
  Description of Artificial Sequence: Synthetic polynucleotide

SEQ ID NO: 7777 - DNA, 231 bp, Artificial Sequence; identical to SEQ ID NO: 4381
  Description of Artificial Sequence: Synthetic polynucleotide

SEQ ID NO: 7778 - DNA, 255 bp, Artificial Sequence; identical to SEQ ID NO: 4392
  Description of Artificial Sequence: Synthetic polynucleotide

SEQ ID NO: 7779 - DNA, 243 bp, Artificial Sequence; identical to SEQ ID NO: 4393
  Description of Artificial Sequence: Synthetic polynucleotide

SEQ ID NO: 7780 - DNA, 410 bp, Artificial Sequence; identical to SEQ ID NO: 4404
  Description of Artificial Sequence: Synthetic polynucleotide

SEQ ID NO: 7781 - DNA, 340 bp, Artificial Sequence; identical to SEQ ID NO: 4415
  Description of Artificial Sequence: Synthetic polynucleotide

SEQ ID NO: 7782 - DNA, 224 bp, Artificial Sequence; identical to SEQ ID NO: 4426
  Description of Artificial Sequence: Synthetic polynucleotide

SEQ ID NO: 7783 - DNA, 697 bp, Artificial Sequence; identical to SEQ ID NO: 4437
  Description of Artificial Sequence: Synthetic polynucleotide

SEQ ID NO: 7784 - DNA, 385 bp, Artificial Sequence; identical to SEQ ID NO: 4448
  Description of Artificial Sequence: Synthetic polynucleotide

SEQ ID NO: 7785 - DNA, 296 bp, Artificial Sequence; identical to SEQ ID NO: 4459
  Description of Artificial Sequence: Synthetic polynucleotide

SEQ ID NO: 7786 - DNA, 281 bp, Artificial Sequence; identical to SEQ ID NO: 4503
  Description of Artificial Sequence: Synthetic polynucleotide

SEQ ID NO: 7787 - DNA, 250 bp, Artificial Sequence; identical to SEQ ID NO: 4614
  Description of Artificial Sequence: Synthetic polynucleotide

SEQ ID NO: 7788 - DNA, 630 bp, Artificial Sequence; identical to SEQ ID NO: 4654
  Description of Artificial Sequence: Synthetic polynucleotide

SEQ ID NO: 7789 - DNA, 457 bp, Artificial Sequence; identical to SEQ ID NO: 4665
  Description of Artificial Sequence: Synthetic polynucleotide

SEQ ID NO: 7790 - DNA, 283 bp, Artificial Sequence; identical to SEQ ID NO: 4676
  Description of Artificial Sequence: Synthetic polynucleotide

SEQ ID NO: 7791 - DNA, 261 bp, Artificial Sequence; identical to SEQ ID NO: 4687
  Description of Artificial Sequence: Synthetic polynucleotide

SEQ ID NO: 7792 - DNA, 249 bp, Artificial Sequence; identical to SEQ ID NO: 4698
  Description of Artificial Sequence: Synthetic polynucleotide

SEQ ID NO: 7793 - DNA, 1216 bp, Artificial Sequence; identical to SEQ ID NO: 4709
  Description of Artificial Sequence: Synthetic polynucleotide

SEQ ID NO: 7794 - DNA, 365 bp, Artificial Sequence; identical to SEQ ID NO: 4710
  Description of Artificial Sequence: Synthetic polynucleotide

SEQ ID NO: 7795 - DNA, 324 bp, Artificial Sequence; identical to SEQ ID NO: 4721
  Description of Artificial Sequence: Synthetic polynucleotide

SEQ ID NO: 7796 - DNA, 707 bp, Artificial Sequence; identical to SEQ ID NO: 4732
  Description of Artificial Sequence: Synthetic polynucleotide

SEQ ID NO: 7797 - DNA, 595 bp, Artificial Sequence; identical to SEQ ID NO: 4743
  Description of Artificial Sequence: Synthetic polynucleotide

SEQ ID NO: 7798 - DNA, 372 bp, Artificial Sequence; identical to SEQ ID NO: 4754
  Description of Artificial Sequence: Synthetic polynucleotide

SEQ ID NO: 7799 - DNA, 296 bp, Artificial Sequence; identical to SEQ ID NO: 4765
  Description of Artificial Sequence: Synthetic polynucleotide

SEQ ID NO: 7800 - DNA, 407 bp, Artificial Sequence; identical to SEQ ID NO: 4776
  Description of Artificial Sequence: Synthetic polynucleotide

SEQ ID NO: 7801 - DNA, 846 bp, Artificial Sequence; identical to SEQ ID NO: 4787
  Description of Artificial Sequence: Synthetic polynucleotide

SEQ ID NO: 7802 - DNA, 481 bp, Artificial Sequence; identical to SEQ ID NO: 4798
  Description of Artificial Sequence: Synthetic polynucleotide

SEQ ID NO: 7803 - DNA, 231 bp, Artificial Sequence; identical to SEQ ID NO: 4809
  Description of Artificial Sequence: Synthetic polynucleotide

SEQ ID NO: 7804 - DNA, 255 bp, Artificial Sequence; identical to SEQ ID NO: 4820
  Description of Artificial Sequence: Synthetic polynucleotide

SEQ ID NO: 7805 - DNA, 243 bp, Artificial Sequence; identical to SEQ ID NO: 4821
  Description of Artificial Sequence: Synthetic polynucleotide

SEQ ID NO: 7806 - DNA, 410 bp, Artificial Sequence; identical to SEQ ID NO: 4832
  Description of Artificial Sequence: Synthetic polynucleotide

SEQ ID NO: 7807 - DNA, 340 bp, Artificial Sequence; identical to SEQ ID NO: 4843
  Description of Artificial Sequence: Synthetic polynucleotide

SEQ ID NO: 7808 - DNA, 224 bp, Artificial Sequence; identical to SEQ ID NO: 4854
  Description of Artificial Sequence: Synthetic polynucleotide

SEQ ID NO: 7809 - DNA, 697 bp, Artificial Sequence; identical to SEQ ID NO: 4865
  Description of Artificial Sequence: Synthetic polynucleotide

SEQ ID NO: 7810 - DNA, 385 bp, Artificial Sequence; identical to SEQ ID NO: 4876
  Description of Artificial Sequence: Synthetic polynucleotide

SEQ ID NO: 7811 - DNA, 296 bp, Artificial Sequence; identical to SEQ ID NO: 4887
  Description of Artificial Sequence: Synthetic polynucleotide

SEQ ID NO: 7812 - DNA, 281 bp, Artificial Sequence; identical to SEQ ID NO: 4931
  Description of Artificial Sequence: Synthetic polynucleotide

SEQ ID NO: 7813 - DNA, 250 bp, Artificial Sequence; identical to SEQ ID NO: 5042
  Description of Artificial Sequence: Synthetic polynucleotide

SEQ ID NO: 7814 - DNA, 630 bp, Artificial Sequence; identical to SEQ ID NO: 5082
  Description of Artificial Sequence: Synthetic polynucleotide

SEQ ID NO: 7815 - DNA, 457 bp, Artificial Sequence; identical to SEQ ID NO: 5093
  Description of Artificial Sequence: Synthetic polynucleotide

SEQ ID NO: 7816 - DNA, 283 bp, Artificial Sequence; identical to SEQ ID NO: 5104
  Description of Artificial Sequence: Synthetic polynucleotide

SEQ ID NO: 7817 - DNA, 261 bp, Artificial Sequence; identical to SEQ ID NO: 5115
  Description of Artificial Sequence: Synthetic polynucleotide

SEQ ID NO: 7818 - DNA, 249 bp, Artificial Sequence; identical to SEQ ID NO: 5126
  Description of Artificial Sequence: Synthetic polynucleotide

SEQ ID NO: 7819 - DNA, 2566 bp, Homo sapiens
cgctgggcgatgagggaccgttgggtaattgggggcataggaccgggcttcgctgggttcggggcagaagcgccgaagctccgacccggaacgcggtgacttcatcaacgcagaagcccgcgcagccgagcagaggagtccctcgtaggcgaccctcggacagacgctcctgcgcggcccgcgtggctcagctccgccccaggaaacttttcgcgcagcccccgctccatgcgcccccacccagtccttcttcggggccgccccctccccaaagtagctctccgggtccactgggcgcccccgtaaccgggtcggaacctcgaacggcttcgcgtgccatccggttaccctggcaacaccatccggcggcgcccggcggtccaatcctagcctgcggcctctctcgagcctttcgcaaggtggggaccgggacgcgaccggggatggggaagggggctgcaggaggccccgcctgcgctgtcgcccctgctgggcacagcgccccccaccacccgcggcgaccccggcccccgcaaggtggggcggcgagcaggagccggggccaggccaggggctcgagctcccgttcgaggggcggggaaggcgggtgacgtgagccgggccgggcgggcggagttgggaccggctccgggaggcgggggcgagcgcgcggagaggcagacgcgaggagggaggcggctgagcagcgcgggcggctctgcggcgggcgcggtgggcgcgggcggcggggccccgggatccccgcgcgcctcctccgcgcggcgccgccgccgcgcgtccccacgccccgcgctccacggcgccctcgccccgcgcgcctctcgtgcccgcctcctgccagtctccgggccgcggccgtctgcagagcgagcgctcagacggagcccccgggcaacttgagtggcgccgatcggcggcggagcctctggcagagccccccgacccggcagcgcggaggggactcgcgtccgtccgcgtcgcgtcaccccaaaccctaagcagcgccgccccatcggcgcggagctccggctggaggcaagagccgcgcgccgggagacacgcaccgtgagcggcagcgccgccggcctccctcctcgccgccccggagggcgaagccgcggctccccagccctttgctgcgccgcgacagcgccggaacacgccccgcctcgctgccgccttcgctgtgccgccggcggagggggccgcgagccccgcgccccggccggaggatgtgcgcccccgcgggccgcccagcctgagccatgcgccccaacggcggcggcgcgccggccggcatggagccccgcgcggccgcgctctgactcgctgtgcgccccgcggccggcgggcggcgggaggcggcggaccgagagccggagaccggcgccgcgggacggaagcgagcgggcgcgggcgccgcgcagatggcctgggcgagccaggtctgaggccccgctccccgaaacgtgaccatgtggattcaacagcttttaggactcaggtgagcgacccggccggcgccgggtgcgtgtgggcgcgtgggtgccaggctgggcggaagcggcgctttcctctatgttgcaaatcaagggacccctcttcgcttcccgcaagcgggcaacggggtgcaccggtagccggaaaggggcgcccgcccggagcctggagcagcaccgcggccctggcggggagcggccgggtctccagggttccgcgcgtccggggtcggggcagcggcgcccgccccagcaacccgggaagtggggccggccaggcgcgcccgcagctctaggagccagcagcgcagtgtcctggccggctgccccggcgcgcctcctccccggggcccggggcgaggcgccggccgctgggcgcggcgggcgcgggggccggggctgccggggaaagctaaagctccgggctcccagcgagagcttcgcaggcggagttggaggaaaccacagccaaacagccactccgctcccccttctcctttctcggggccccggggctgagcaggggcctcccaggctcccagctgccgacccagctgtttgcgggtgacctccgggcccgacgggcgctcacagctggcgggcagctggggcgggagagctggggttcttggggagctccggcggccaccccgctgtaaacacacacgcacatacgcccgccggcgcgcccggggcttgtctgtgtctgggactccagggccagatggaagagggggttcgagcctagagcccgtggtgggggtgtccagaaagacccttctcggcaaactttgccagcccgccggggttctcgggcttctctggcttctgcctggggtggcccagggcccaccagagcacagctgtcgtttttgctgggcaggctgcctctgagccctcgccctcctgccggggcattcaccgagctcgtgcatttgggtcccgggttggaaccgcgagcggggaggacagaggtggaggcggagagcagcgtgcggttctcgagtttgtccactgggatgcactgcgctcccgcgttggggacg

SEQ ID NO: 7820 - DNA, 572 bp, Homo sapiens
cgcccaagaagtcggggtcctccctggccacgcgcctccgggggcgctcgcgctctccaggccctggctgcctgggcgccgattcccgggacgcgccggccgacagcaggggaggcggcagcagggaccgcagcagcccccgcttccgcacggcccgccgggtcgcggtgagcaaggcgggcaggcgcggcgggaggcgtccgacgcccaccccgggcttggcgtccccttccggccaccacgcggcgccgccccccgggatcctccagtccccggagccccgcgcgcccagagccgctcggagcgcgggcggggtcagcttgggcagccgcgggtcgctgctgcgtcggaagtctccgtcgccagggagccccttgggcgccaggtcctgggcccctgggcgaagtcgacgccagaacatgcttggccccgcactcagctcaccgcaccctcagcgcgcgtgggtggggggcgccggctgaggtggggagggcatagtccagccccaggccatagtgccccgggcggggcagcgcggtgcggggtgaacgccaccggcccggcggacagcg

SEQ ID NO: 7821 - DNA, 989 bp, Homo sapiens
cgtggtgtgtgtgtgcgcgcgcgagtgtgtgagcgccaggggccgcccgcccgccgcggctccccgtgggctggccgggccaatgagcgcgcggctgtaggggcggcgggcggggagggggcgccgagccctgcggatggaggcgcgggcagcgcggcgcgctcattccgcgcgggcgttgctggcggggggcggcgcagccactggacccggaccggggccgcgacccggggtggcgggtggcgtgggcggcgcccggggctgggatgcgccgggggctcagtggcggcggcggcgttggcggtggcgtcggcggctgcagggggacgagctagcgccgcggcgctgggagccagttgagcccggccggcgagcggaggcggcagcgcaggcagagcggcggcggcagcgggagcccgagcgctgcgcgcccaccatggccgcccagggagagcccggctacctggcggcgcagtcggaccccggctccaacagcgagcgcagcaccgactccccagtgcccggctccgaggacgacttggtcgccggggcgaccctgcacagcccggagtggagcgaggagcgcttccgcgtggacaggaagaaacttgaggccatgttacaaggtaggcatccctcgtgttctcggactctccgactgagcctctaactccttttcggacatccccaccgcgcgctccggcgcccgctactccagcctacggccggccggtttagctccaggcccgctcccccgcggagccggaggacacccagggactggagacttcgcgggactccccacccttccacgcctctcagatttccaggcgctgggggccctgtgcgaacttgactggcttcagaaaagccgaaggccgagtttgtactggcgcgcccaagttgcgttctggactttggagatgccaactttagcccggacacctgggctgtgccatccggaccactcgggccgcacagagtatgcg

SEQ ID NO: 7822 - DNA, 2400 bp, Homo sapiens
cgaaggtgtcgccagcctcagtgccggtgggcgtctgcaccaggaatagctaaagccgacgacatctagccacctcgagcgccagggaagacgctccgcgtaaaaccgcggcctcaggcggactcccgctccagctccgcgctgctggtggcatttccggggacccaaagtgggtggcctgggggcaaaggaacagaggccgaagaacttggggtatgttccactagagcacctaagggacggagtgggaggttacatcagatatgcgacctcgacacattccaaaagtggcagccccgtgggctacccccaatagtgggatggatctccccaacttctctcgcccctcgaagtccccctgttatctcgggccatgctcctcccccgggattcccttgtgcaaaattattctctcccttgcccaaaggatttttcccttctttctgaccccacgaactcatctccccaacaggttcctaaagtatgggcggatgtgctccctctcgcccaccgccaggagccgagccccggcaggtgagcggtgcaaaacacgcacccagctgcccccagcttcctccgtccccgctgagttggctgtccccaccccgcaccacggcacccgagcctgtgagtccccgaccccggccccagccgcagccgccaacaaccctacaataaacaagaggacaggattgagcgtccgcgtcccggagcgcactggctgggggcaactcctcacccccggcgcgccgcccgctgccccgatccgagagcaccgggagagccgagggaagggaaggcggcgaggggaaggcaggcggggatggagggaggcacggcgcggcgcggagcgaggaggtgggctgcaggggacgccgagaagcggtggggctggcgcagagggcgggcgcccggggcgcgcgttaccttcgtcttgcccccgcagtggcagcacacggtccacaggtacttgagcgtccgccagagcaagatgatgaagaggcccccgaagaaagtcaccatggaggaggccaggaaagcccaccacatgcgttggccccggctgtcgcacggcacctccatggtcaccgggatgatgagcgcatccatcttgggctcgtggaccgaggacgaggaggaagaggaggaggaagaagaagaagaggaagaggaggaggaggaggaggaggacgcgtctaggctgagatggttcgcgtggatattgctactcattctaagactgctgcctccgccgccgccgccgccgccgctgctgccgccgccgccgccgccaccatttgccatagctagcaacgggcagccggcgcaggggctcgggggagctcctcccgccgccagcgccaccccaaacacccatcaacagccatattgctgctactgctgccgccgccgccgccgccgcggagcgcgggaggggggcggggaggcgcctgggctcggggcgctgtgcgcgacctggcggggtgcgccgagatatatacagcgagccgccgccgcccgcccgggggggagggggatggagtgcgcgggcagctccccctccccggcccgcgccccgctcgccccgggctgcgctggccccgagcgccgagagccagggggcgccgcgggccgcccgcgcccggggtctgcgccgcccccgggcccgccccggctccgcgcgcggtcccgggtgtcctcggcgccgcgccgcccgccgtgcgccacgggtgtgcgctgcgctcggccggtgacccccttccccgagcgcctcccgcgcggctaacgagccgctctccgcttattaggtggtaactcgttaataatggataatcggccccctccgcccgggcgcccctgcgccagccctcctcccccggctgcgctcggctccggctcgccgcgccagtgcgcgcccggccgcggcaggttcaccgcgtccggccgccggcccgtggccgcctgctagcccatgttctcgggaccccctagtcctgtcgccacgccgctgagcccctcggcctccgctcgctcttcctccttgccgcctccgactcctcctcgtccccgtcctcgccgcccaagcctcttcggcgcgcgccccgcgctccccgcagccgccagcagcagcagctgcagcaactggagcgggcgcggactcaggacgacccaggcgggaggggaggaggctcgccgcgctggctcgcctgggctccgggctgggcaggggtgggcagggcccctcggcagcggcccggcaagcgcccctgacccccagggcgcaaggtagagcgcccccagcccaggcgcggggccaggcgcctctctccaaggtgctgcgcccccagccgagagcggtggggtacactgggaggacggcggggcgccccggtcaggccg

SEQ ID NO: 7823 - DNA, 1859 bp, Homo sapiens
cgcgatgtcagccacggcccgcggcggtcacggagccacttcagcacctcgcgatggacagtgacccccggcgtggcgcgagttccctgcggtccccacgcgggcctgggcggcgggtccctccacggctccgtccagacacccggaggcacctgccaaagctgcggaggtggacgaccgggcgtccaagcacgaactttctcgccgaggcacggctgccgggctccgtcctgagggtttggggcggcgaggaccgccggggaggagggcgcgcgagccggaggccagagccgggccgggcagggcgcgcccaggagcaggggagacggcgacccgggccgaggcgggacggggacacgttacctgcccgtggagcgcggggaaggggtgcgcggcggcggcggcggcggagtctggcgcagagggcagcggcagcagcgggagcaccggctcgctcggggccggccagccggggagaccggggagcagcggggccgcgggcggcggggccgaggcgagcagcaccgggggaaccacgacccccgcgctgagccggagcagcccggccgagcccggcaccatccagacccagggcggcggcggcggcggctctgcgtccatcggccagaggagaggctgccgccgccggggctgctgctgctgcagctgccgccgccgccgctggaacctggcgcccgcctgcatcctacatccccgcgctgacggcggcggcgggggcggcgggcgcccgagatgctgggccggcggcggcgcggctccggagcgaactcacttggctccgcggcgcggccgctcgctccgcccctgccccgcgcgggaagctcctcctcctcccgcccgcgccgccgccgcccccggacccggcccccgccccggtccccgcccgcccgcgcccctccccgccggaccccgccccgccctcgcgctccccggccctggccggggtctcctccccgctgcgcccctggacccgggcggccgcggaggacgtgggtgggagagggccgagggcgcgcccggctgggctcccgccgatgccggccccctggtggcctctggccctctgggacccagcgcaccgcgagggaggctccgggctccgcactcaagggcaagcggaagccgaggtggcggcgccggagccaggcatgtcccgctgcccagcgcggggctgagggcgcagacggggaccgcgcgagccgctctctacctggcctcctcggagtccagggcgcggagggtactgggctgcggatccggcgcaggcggccccggacgctgctaggcgcgggcggatttctgttgcacaaatgggccaaacaggttcgtaaggcccccgcgggtcccctggcccggaagttgagccgcgggtgcctggtctgaagttccgcgccccacagtggcccgcgggcctcggcggctcctgccctacgccctccaaggcaccaggcaggtggccccagggcctttgcccacgacaccccctgggtggggcaggaccacccctctgtgaattcgtcctggatgcccccaggcacagtctgtactcctccctcccccagcacacgcggcctctgacgctgcacgccgagcttcctgggacccaggacgaaccgggctccaaggaccctcgctccgcccggaccacacgcaggcagcgccggccgagccgagcctgggtccgcactggccacgcgcagccaccgccagacggcgctagccctcccccgctgtagaccctgcttcggaggccgccagcctcctccccatcccgggtccacagcttcagtgcagcccctggcgacgcgcgctgacagctgggcagagacttccgtgcg

SEQ ID NO: 7824 - DNA, 902 bp, Homo sapiens
cgatcccagaactcgttccccaccccgagcccgtttcccgccgcctcctcgcccctgggagggcggccccattaaccctcgcgacccgggccgctcctggcggtcctgaccccgccaccccgtcccgcggcgggggtttgggggtgaggggcgcgccctggggcagaggattgcgcggcagggtctgccacagggcagaggccagggctctccgggaaaaaggcaggcgcatatatgcccccctttctgggaaaagacggggaggggggcttctcctgggagactccaggcttcgaaattcctcgttccctatcctccggcccccgcacccctcctcctccccgccacgcaccctctcccctccccagccatctgttccactccgcagcgccgcgacaaacacggctccagctcgcttccgcccctgcccagccccctccccaagccccggggagtgggggagtgagcagacgcccttctcctaggaggccggaatttctgcctccatctcccaccggggtccggctggccagaggcaagcttcgagaccccccaccaaccaccaccaccgttgcgagggccggtgaggctgcagataacgcttgcaaggacgggagtcggggagggtgtagggcgagtttaaaggacgggcagagcaagccccgggaagaggcaggggttttccctcccgggtcgccgccccccgcaccctcggagccagccgcagccacgcagcgccgcctgccgggcacaccaaggacctggcgcgcacgtggcgcttacccccacccccgggtccgctcctggctcgcgctcagcctccccagactattcgcaaattgaggatcccggacacagagtgcagagaccccggcaagcctactgaaagccagccgaacccg

SEQ ID NO: 7825 - DNA, 2044 bp, Homo sapiens
cgaaacggcagaggccggcagcccgcggcccacgtgcacttgctcagggaaccgttccagcgaaacctgacccggatcggaatcctcccgcagcacagcggccgtgtttatcggaatggaacgctacaagttgtcacctgcatccctctcccagctttgacagggaacacgcgctgcccccacgcccacaccgacacccggatccctatccagcccggccagagtcccaggggccagggaccagtgcagggagaaggtcccccacctcagccctcaggacccccaaccacagcccacccgcccccaccctgctcggttctaggcccagccgaacctacatgtccccgtagtgtcgagcgttatcatccacagtcgcccctcaaactgtgacccccacctgggagacccggaatcatccaggaccctggtgtggggggcagtactccccatatctgccccccgaaaactgctatggagcagccgcgcctcggcgggcaggtgagggggccgagcccaccagcgccgcagccccgctgcctaccttcttcagcgccggctgccgctcccgggcagacatcgccggccctgactttggggctgacaccgccaaagggcagtcagtgctcgcccaggccacttcgggaggcccaggggcacggcgaggggtcggggaaaggcgatcgcccactacagcccgcgcgcctagactgagggaggagccgggctgcagaaccggcggcggatggagacgggagggaggctgcgaggtcgctcgaggagagactaaggctctagaaacggagaagcgggcgctctgcgggaggcggcggcgctgccgctggccgtcaagggcgggaagtgttctgggactctcattaggggccgcgagcctcgagcgtcaaattcccgcggcgtccgcctagcgcgctgctgtggcgggcgcggagggcgcgcgccggcagtgggggctgcggcggcggagggcacgggcccccgctcagcgtcctcaccttcttggtgcagctgcctcccgcgagccgagacactcctgtcagggaagaggagcgccccggctgtccccctagagtctcctgctggggggacatcgcttccatgaagaaaatcttcaaacaaatcccagcccaggaggaggctacacgatcatgtccgcgggctgccggccggaggggcgaggacgcgcgggcggaggcgcggctgccgtgctcaggcagggagccgagctccgggtgctcgccgcgcgcctcccgtcggggccatgtacctccgcctgcgctcgacaccgcgggctggaggcgagtgcagcggcgacagcccgtcagcgccgcggcccgccccgcctcgggcccgccccctccgctccgggcgccctgcgccggggcccgcccccgcagccctcctcagccctcctccagcctgggccctcctagcctcgtcccagcctgcggcgcgcctggcgggcgtctctctatatatgttagcacaccggccaccggctgaccttttcggtctgtgactccgcgtgggtgcagcccgcaggagctcatcggcctgtgtcacgcacgggggcctctagtgcacggacacgcgcctctcccgccacctgcccactcccaccagaccccatcccttcccgcgccgtgcccgcggcggaaggcgcccctgcagcgcgtgcatccgcggagcggtggcgacctcagcctgagcagaggagttgcagtgattcctgcctcgctttcagcggactgcggagggaatcccccaccccaccccactggggatagggtggcacgtcgcagagtgtcgcagctgtacaaatttggaagcccacagcatcgcctgacctcttgtgcaatcccgaacgctagcctgttcgggtaaccctgagtgggcttctgcagccggtcatgtcagcggcccctgcacatttgcacccgcggtttccgctgtctgcaggctgcagagacgggggcattccaaacgtgaaagagcaatgaaggaaaatgcagacagagcgaggacgccg

SEQ ID NO: 7826 - DNA, 1152 bp, Homo sapiens
cgccccctccgtagagaccgctagctgaggctgcaacacctgccccggcaaagcgtctccgcagccttcccggcttgcccgactcggcttcctccgcctctgccccggctgcggcaccacttcttggagccacgtctcggcgagcgggggccgcggagcgagggggccgctgtgccgctactcacccgagccgctcgggctggccgcgagccgggatccgcgagggctggcgggctctggcccccgaggacgcagacatgtggcttgaacctccgctcccctagccgttgcctctgtgcatctttctgggcgcccccagcgaatgcgagcggcgaggcgagggcgagcgcgccgaggaagggcgggagaggcgcggagcttggccgcgccgcgctgcgccgagcgccgggctctccccgcgagctccccgggcccgcgcgcgcgccccccactgcccccgccccccgcgcggcgcgtgccccccaccccccgccgcgcgccctcgcacccgcccggctccacgcggcgcgcgcctgccctggcggcagcggcggcggcggcggcgcgtcctcccccgaacgccgtctccagggctgctggctgcgctctccattgttccgcggctgctgcccggggtgggcggcgaggcgggggggaggtgtcggcttggccgccggggagggcttaccgctcgggcggaccctcactgcgagagcgatgcgggcccaggcgcggcgcgcgggggctgcagggcgcctagcactgggggttgccggcgcgcgggggcctcctcctggctcccaggcactcgctgctgctgggcgcccctcgcatcctcggttactatggatatctcgctcctccgccgccccctccgcgcactccgggaggccgccggggcggtagcagcggcgcggctccgcgggtgcccaggtgaccggctcggcagcggcagagcagtggcagcagccgccactgccgctgttactgcggtcgccgccgctggagagaggaggacgaggagggcaaggggcagaagcaggtcctgctctgtctgccccagaggccacctcgggtttcttctcactaaccaagcgacttcgtgtttacctcgcaggagacgcctcggcagtcctcaacttgtgtgcgccg

SEQ ID NO: 7827 - DNA, 872 bp, Homo sapiens
cggagagctgccaccgaccccctcaacgtcccaagccccagctctgtcgcccgcgttccttcctcttcctgggccacaatcttggctttcccgggccggcttcacgcagttgcgcaggagcccgcgggggaagacctctcgtggggacctcgagcacgacgtgcgaccctaaatccccacatctcctctgccgcctcgcaggccacatgcaccgggagccgggcggggcaggcgcggcccgcaaggacccccgcgatggagacgcaacactgccgcgactgcacttggggcagccccgccgcgtcccagccgcctcccggcaggaagcgtaggtgtgtgagccgacccggagcgagccgcgccctcgggccagcgtgggcagggcgccgcagcctgcgcagccccgaggaccccgcgtcgctctcccgagccagggttctcaggagcgggccgcgcaggagacgttagagggggttgttagcggctgttgggagaacgggtcacggaaacagtcccttccaaagccggggccatcgtggggtgggcgagtccgccctcccaggccgggggcgcggaccagaggggacgtgtgcagacggccgcggtcagccccacctcgcccgggcggagacgcacagctggagctggagggccgtcgcccgttgggccctcaggggcctgaacgcccaggggtcgcggcgagtccacccggagcgagtcaggtgagcaggtcgccatggcgatgcggccccggagagcgcacgcctgccgcggtcggcatggaaacgctcccgctaggtccgggggcgccgctgattggccgattcaacagacgcgggtgggcagctcagccgcatcgctaagcccggccg

SEQ ID NO: 7828 - DNA, 1070 bp, Homo sapiens
cgagcggtggctcgaccccgggtgtggcaggaaggggtgccccgcgttccagagccagtgccagtccctatcctcccgggaagccgagactcagggggaacaggtttcccagagcccagcctgcagggacgcggagggcaggagccgccggcgaggagcagccaacttgccatctctggcggctgcacttctcggcggctacaggttgcccgacagcggactccagggtccccgcgacggcacccagagtgctcagaagggaggccggggccggggtgggccgggaaaaccgagggagggaaggagcctggagaagctccgtttaggcggggagggggcgacccggggcgcatctcccgaccatgacccccacagaccttggcgccgcaacctgcgcttcttgaggccgaagatgcgcactttggagaagatatccaccaggttgccgttgcagagcccgcggttcttgctggggctgctccgcctcctgctggcagacggccggtcccagtgctgctcccgcgcctgccgcttctggcggatcaagccgctagcgatggccgcggccatggtggccccgggaacgggtccggggagggagggcgcgggaggacggcgagccgggggcaccggaggggaaggcggcggcgcagaccgtggctcgccctcggggcagaggagggggtgccaggcgggactggggagaggggaaggggggctcagtcctgaccgggacccatcgccctctccgcggggcgcggggccaggcgcgcagatgcgcccagggcgcagccggacgatcccgggaagccggacgtcgtggccgccgccgcttggccacgtccgagtggagagcgggaccgcggctgcgggcgctgctggtcaccgctcgtcgcaggaaccccggcgggggtcgccaccgccactcgcgctgccttctcgccctgcccggctcccgggcgggaggtagagccggccggcggctccccgggcgccggctggagggcgggtcccggcagggtctctgcgcgtccgtcggtccgggtcgcgctgggcaggactcagcgccg

SEQ ID NO: 7829 - DNA, 395 bp, Homo sapiens
cgctgggaagggaaaaacggcccacatcgaactggatgccggatggaaacctctctgcgctattagactgcgtccagtacagcagatggcacgagcacgtgcggcgctcagcttaggctctcggaggcagctgagttggaaatcccgacggaaagcacccacaagctcccactctgcgctggcccacccgcgtgcacgcccaccccccacgcgcgtccctggctcagaagcgcacagatgtttactgcttagagccggtaccgctggggagatcgagcgacttgcgcggcgcacagtgcggcgctggcagggctctgggctcccggtcgggggttcgagcggccaagggatgggggtgggggcggggagagtggggggagggcgaaagaccgccg

SEQ ID NO: 7830 - DNA, 265 bp, Homo sapiens
cggggacacctaggcgcggggcaggtgcaggggagggggcgcggggcaggggcgcaggggccgccgggttcgggctggaggtgtccgggccgcgggagggagggagggaaggagggagggaggacggcgagggagggaggcaggggcgggcggcgggggatggggccagcggggaggtggaagcgatacccaccgcccgtattggtcctcttggtgctgccggcttcagggggggcttccagcggccttttccgcgagtccggcg

SEQ ID NO: 7831 - DNA, 1169 bp, Homo sapiens
cgggctggcgggcactgagctggggccatcacgcctttctagagcgcctgcggaggtggcgaaggcttggagagcatacgaggcggaatccggatcgagtgagttccttgagccgcttgcgtgggacgcagggagagggcgaataacgccctcaggcgctgaatgcaggggcaaggagccagcgagggtggctggagcaggccttgccagctgttaccaagtctctccacaggcttgggggcttggggcctcctggaaagatccctccgccgcgctgaccagtacggggctcgctcccgcactttgaaggctgccgcggtctttcgtcatttataatcaagcccaagatcaaggttgcaagctgaggtcggggtactgacaacgggaatgaagccataggggaagaggataactgggacgggctggacccatacttgatacccgggaaactcctagagcgtgtggtgctcctgccagcggcagttactggtggagctgaggccaccgctactgtcgtcgttggcgctttgcttctggaacctcccagcaagatggcactcactgtctgttcccttccgattagcacccccagccgcgctccctcctccccgggatacgtattagtcacatactgtggggagaagatgggctatgtaaatgtaagtcaacgcgctttcccagccacctttgcataatgcaacaggaacagcgacccgcgcgcacgaaccgggtagtgtgcgcgtgtgtgtgctcgcgtgtgtgagcgcgtgtgccagcgtgcgtctccgcgcgggcgtgcgtctgggtggatccttgcgtggcttgggaggcaaatcgggcgtttctccaagtcgtcttaacatgatttaggctctcaaatacgtgaaagcggtagacacaacagggatgcgaaggaaataaaaaacaattggggaagtggtgccaagtcactcaggctttgaactgaggacgagtagtgcggtcgcgcctggggcgcgtccggaaatcatcctcagcctgtggcggccactgccccacttaaactcttctgcggggagagttgagcggatccctggggggttggtcctgggctagttttaaactctccggttgcatctcgcgtggccccaccgacggcgcgtctcggcgtagctcttggcgcgggctcg

SEQ ID NO: 7832 - DNA, 1743 bp, Homo sapiens
cggtgggtcgggggcgtggcgagaccctgtttcagtggagggagggcttatgcattgccgagacgccgattatcagaccttgaccctgtcgctttcagaaaaaccactggcagaagatccggaccatggtcaatctgccggtcataagccctttcaagaagcgctacgcctgggtgcagctggcagggcacactggtgagcagtggggcgggtgggcgggtgcccgcgacgggaaggggctgggcggcgctgacggatgccggtcctcagggagttttaaggcggcgggcaccagcgggctgatcctgaagcgctgctcggagccggagcgctactgcctggcgcggctgatggctgacgcgctgcgcggctgcgtgcctgccttccacggcgtggtggagcgcgacggcgaaagctacctgcagctgcaggacctgctcgatggcttcgacggaccttgtgtgctcgactgcaaaatgggcgtcaggtatgcgtgccctgccaggtcggttggggggatcaagtaggggtccggggccgggacagctgcttgagggggacccggggcgagtgctcgaaggggtctccgtgtgcgccccctcatgccctggccgctgcctgcgcccccacaggacttacctagaggaggagctgaccaaggcccgtgagcggcccaagctgcggaaggacatgtacaagaaaatgctggcggtggatcctgaagctcccacggaggaggagcacgcgcagcgcgccgtcaccaagccgcgctacatgcagtggcgggaaggcatcagctccagcaccaccctcggcttccgcatcgagggcatcaaggtgaggcaggcgcgcttcgctggcaccgccgcagccccactgcgcgctgtctttcccgatcccccgctcccgccccgcctgcccctccgccctctcccaccgcctcgccgtcccctgcaactgggaggtaccgctgctctacgctgtcctcttccccactggcgggcccggggcccctgacactcctgtcccacatccagaaagcggacggctcctgcagcaccgacttcaagactacgcgaagccgagagcaggtgcttcgcgtctttgaagagtttgtgcaaggagatgaggaagtgctggtgagagcgggatcccaaaccctgaggtgttggggagcctgaagccgaggactgcccctgtcatctggcccagtgccctcggctgtgtccccaccatggccctcaccgcgctggctcgcaactgctctacgctccttcccttctgggccacgctgggcggggccctgggtcctcctcctggcggcatttgccaagcacagcgtgggtcccggctcctcatcgttagcaggggctcatttggcgtttagttaatttgccctcctctcccaccccaccctctgcagaggcggtatctgaaccgcctgcagcagatccgggacaccctggaggtatccgagttcttcaggaggcacgaggtaagcggcggctgcccgggtgcccgggccgcgagggctagggcgggaacccggcaagggcgtctctgggcagggccgcggcctgacggtgcggggctcgcaggtgatcggcagctcgctcctctttgtgcacgatcactgccatcgcgccggcgtgtggctcatcgacttcggcaagaccacgcccctccccgatggccagatcctggaccaccggcggccctgggaggagggcaaccgcgaggacg

SEQ ID NO: 7833 - DNA, 2405 bp, Homo sapiens
cgcagcgctatagccgcgactgcggcggcggcggcggcgcagggggcgggggaggagagaagcgcccacttcgtcccgctgcctccgcagcagccctggccctagccccggcgcatcagagcggtccttgggaatctttgggcttgttgctccggcggccgccagctgggagcccaccaccgctcgatggtaccgaaccgacccgtgtagccccataaccccagcccaactccgaggagctagcgcagaccgctctccgccctcagctgcggcgaggcaagggctggcagcgctcggacgcctccgtcttgcccttcccatgcctaagcgcggggaattacacgttcccggtgtagaacagacgatcggggctattagggctgggcggtgggagtgggggttgggagcaccatttttggctggacgtgtgtccagactcatcgtctctggtccttaggaccccatcttcctctgcatctccaggtgtcggcccctctgtacccgcctcccacggggctcgtccggcgaagggcagccgcagcccacatctactccccgccctcaatccctgccccctctgcccgccgcagtcactcgcctggctgggagcaagcctcccctctcgctgagggtgcagagagcgcctagggcgccaagagtagaggggccaaagttcaagcgccatcagccagccgaaggccctgagcccccagggccgcggccgggacgcagggaggtcaggacgcgacgctcgcctcacctgtttctccagcggctccttggccgacagcgccggcttgggggagggcgcgcggtcgcagacgcagccctccagcaggtaaagccccgagggccgcgagctcgagtcgctctcgaagtagaagagcaggttctgcagcagcgcgaaccacttggtttgccattttgtgttgtccgaactccgcttgctcaggtagcctttgcgcgtgccgtccttgcgcgccagcagtcccagggacgcgacgtggccatcattcagccggatccccttctgcatggtgctcagaggccagcgagaccccacgcgcttacatcttctccgcgcagcagccccccgtccgtgcgcgctgcgcgctgcctctctctggcgctcgctcgctcgctccctctagctctcccctccccccaaatatctacactccaggatctggcgccgagccgcggcttcttgaatccagatataccattccccgctggaacctcttctccgctccgcagagccccagtacccggaagatgccgcccgaccctcctccggtgccgggcaaactgagggactggcgatctgcgcgctggcgaggggcaggcggagtcatgtgacgccgatccctcgaagagcccgtttcagcagcgcggacagggacacacgcacgcagccccgccgaggcgcagagccgcgcgcaggctgcaacttggtgcctcctccccctccccagacacacacacacgcacacgcacacgcacacactcaaaccctgccctccctcccctcatctccccttctctccctcggatgttaaaaagcaaatcagatcaattttcgtttaacccaatgaaaccccgaaggctcgccatcccgggagtttgcgtctttgcgccccaccgcggcgcactgtagacctggggttaagtgccagttgtcattttctcctccaaaggctcgccccccccccccactttatttctaatacgaggtggaaggaggaaggtgggtggcgaaatagagctgcaaaagcgtccagtcctagtctttgcatagtcagccgggtcacattgaattccagcatccggctgcactcccggcggcttccccagctacctgaggacagtacagggggtgagatggggtggtggttggtgaacgttggttactttattttatattattttattttgagagttgccataattaccggcgccaccccccgtgcaccctgaggtctggttggcgagccgctgctgggagttttctgcaaataccccccaaagcctgaaggcgggcttcaaacgcaggcgccggggaccatgggagccttcaaatagctgcgctggcgcaatgataccttaatgatagattttccgttcttatttttagctctcattcgcctacacagttacacggcatttatccgagaacgtcacagcgcccgcatgctgcaccgggagggcgcgcgggccgccgggcgagccgggagctggggcggggagcgcgcatcgctgtctgccgcagagggcagcgagctcgccccgacccggagcaagccgcgcctggcccgggcgctttgcagcggggatgggtgcccgcgcagccctgtgaaggaaagacaccatctttccgcacggaaactgcgtatacccctcccccg

SEQ ID NO: 7834 - DNA, 1920 bp, Homo sapiens
cgcggacctgggcctggcgcccaccccatcgccaggactggacagaaaggccctggccgaggccaccaacggagaggccagagcggagcctctggcccagaatggaggcagcagcgagcccccggcggcccccaggagcatcaaggtggaggcggtggaggagccggaggcggcccccatcctgggccccggagagcctgggccccaggccccgtcgcggacgccgtcgccgcgcagccccgccccggccagggtcaaggccgagctgtccagccccacgccgggctccagcccggtgcccggcgagctgggcctggccggggccctgttccttccgcagtacgtgttcgggcccgacgcggcgccccccgcctcggagatcctggccaagatgtccgagctggtgcacagccggctgcagcagggcgcgggcgcgggcgccggcggcgcgcagaccgggctcttccccggggcccccaagggcgctacgtgcttcgagtgcgagatcaccttcagcaacgtcaacaactactacgtgcacaagcgcctctactgttcaggccgccgtgcgcccgaggacgcgcctgccgcgcgcaggcccaaggcgccccccggcccggcccgcgcgccccccggccagcccgccgaacccgacgcgccgcgctcgtccccgggccccggagcgcgcgaggagggggctgggggcgcggccacgcccgaggacggcgcgggcggccggggcagcgagggcagccagagcccgggtagctccgtggacgacgcggaggacgaccccagccgcacgctgtgcgaggcctgcaacatccgcttcagccgccacgagacctacaccgtgcacaagcggtactactgcgcctcgcgccacgacccgccgccgcgccgaccggccgcgcccccgggaccccctgggccggccgcgcccccggccccctctcccgccgcgcctgtgcgcacgcgcagacgccgcaagctctacgagctgcacgcggccggcgccccgccccccccgccgcccggccacgcccccgcgcccgagtcgccgcggcccggaagcggaagcggaagcggccccggcctcgcccctgcgcgctcgcccggccccgcggccgacggccccatcgacctgagcaagaagccgcggcgcccgctccccggagccccggcaccggcgctggccgactaccacgagtgcacggcctgccgcgtgagcttccacagcctcgaggcctacctggcgcacaagaagtactcgtgccccgctgcgccaccgcccggcgcgctcggcctgcccgccgccgcctgcccctactgccccccgaacggcccggtgcgcggggacctgctggagcatttccgcctggcgcacggcctgctgctcggcgcgcccctggccggcccgggggtcgaggcccggacgccggccgaccgcggcccctcgcccgctcccgcccccgccgcctccccgcagcccgggtcccgtggcccccgggacggcctcggcccggagccccaggagccgccgcccggcccgcccccgtccccggccgccgcgcccgaggccgtgccgcccccgccggcgcccccctcctactcggacaagggcgtccagactcccagcaagggcacgccggcgccgctgcccaacggcaaccaccggtactgccgtctttgcaacatcaagttcagcagcctgtccaccttcatcgcccacaagaagtattactgctcctcgcacgccgccgagcacgtgaagtgagcgcccacactacagccgcagacgctttgcacgccccgctgcgatgcggggagggggccgcccccaggccgcacggactgccgctcctgggaaccccgccacgcacaggcctcggcggagggggccgcagggggcagcgcccg

SEQ ID NO: 7835 - DNA, 1403 bp, Homo sapiens
cgcggggtccccgggaaccgccgcctttcttcctcgctcccgcgctcgcgcttcccctcccggggccccggcccacccacccctggtgcggccccgccggactcaggagccccggccgcccgggctgcggggagggggcgccccgggccggccctagaagttactttgcaaagaggcagggggcgcggggccgcgcggggcgagctcgggatccgcggggaagaagccctccgggaccgcgcctcggccgcccgagccccccgcgcccgccgccccccacctcggtcgggggcttacctgggagcccgctgcccccggccagccgcccgcgtgtgcccagggccagcagcacgcacaagtgccagcgcacggccgccgcgcccatgctcaatgcgggccccgctgggcgtgcgggcgtgcggggcgcggggacccgaccgaccggccgctcccgcaggcgctgctcgctgctcgccgctccgccaccgctcgggctcccgagccgcccagccagcccggctgatgagctgacagcgcgcgctcattggcccgtggcgtcggaggggcggggcgtcgcccagggccggccaatgggcgccggcctccggccctccgaggaagaggggggctcgggcgtcgtcggggggacccttcccctggggcgggcggcaggtggggggtgtgggcctggccggccggctcgctaggcgcggggtctaggccaggctggggctgcttggaggctgcgccctcccctgcccgcggcgccccggcccccgccgtcgagagtggacgcccctctggggtaacccctcccggcccagaggcagcctcgggggcggggatcctgcgaaccggggatcccgtgaggtcgcccgccatccgtgggcagtgaaacgcgccagcgcgcagagcagactcgcctgcgctgccgtttgctggacgtttcttgagcacctactggggaccgagtgcgggcgaggcagcagcgaaggaaccgggaggggaaacctcgtgaagatcacttgaaaattgacgttcaaaacaaacgaactttttagcactcgtcaaaggacagtggcccgtcagtgtgcttgtcacggggcggccgcaggacctgcgtctggaaccgggcgggcgcccgggacggacaatgccgcttggcggtcggtcccgcgggaggcccccgcacggggctaacctcggccggcgaagttcgctgcccggaatgcgaggccgaggcctccccctgtgacagaccgggcggggccaggaggaggggcagggcgggcatcccggtccgaagacccaggaactgctctggcctggcctggggtctacacctgacgcctggcgagggttggcttcgggtctggtcccaccgggcctgggagggacgggcg

SEQ ID NO: 7836 - DNA, 1088 bp, Homo sapiens
cgggaaacgccgtctcccctggcgtctgagatctggggtcccctccccacctggtctcctcgctcccgccccagccccgtgcgccccaggagggcaccgccgagcgccgggtccccgcagggttcgggagactccgcggaccggaggagggataggacccccgagctttgggggcgggaagggagggtggaaggaggaggggagcggggttggggaaagttggagcttcggtatcttttctccgggccaggccgtcctcggggccctgcgctgcgtctccaagtgctgggaagactccgcggggaaaggtctgaggacgcggccggctggcacaggtgtggcggcttcagagggccggggagaacccatggcttcgaggctgtggactagaaatgtccctgattagaagctgagaacctttggccagggaggtggggcggcggggaggggtcgtcaagccggtccagagcgcgcccacctgcgccacaagggagaagaggtgccccccgcccccctccgcccaccgccgccacgatgcgccgcggacctcggcgacccagcccgggtagaagcgcgcgctcccctcctccagcctcgtgcgccggcccctgccccgccagccccgctatggtcccccatccacccccgcgggagcgcccctgtccccccatcctgcacttcccccagagtcgcgcgccagtttcccgccccgtggaagcgcccctctcccgacttcggctgatccccgctcgccgccctccccgcgggtgcgcgcccggcccctccctcgcccggggcgggtctgcgtgggcggtgctccgggtcggcgggcggagctccggttccccagccctgcgccccggtggagcccgagccggagccggcagaggggcgcgggcgcggacgcggcgcctggcggggccctgggaggctcggacggggtcctggcgttgagctcggccggcccggagcgcggacccagccgcaggggcggcgatgggcaccgagggacccccgcccccggccgcctcccgcggacgccagggctgcctgctggtacctgcgcgggtgagtgcggcccctcagcg

SEQ ID NO: 7837 - DNA, 1812 bp, Homo sapiens
cgggcggcggaggagggctggcggttagatacagtatcgctggagctcagagagccgggcagaggctggcggagagccgaggctggcccagccttcaggagaccggcgagctggggtgtgtgggagcgggatgcttctaaggcgaaaagaagcgccagcctcgtaagcggcctctatctgggctgcccaggccggatgctcaggagcccacagcaggggggatggagcgaaggaccgaggggctgggaggcgaggccgcagcgcactgacgcaggccagcgaggccgctggccccgacgcagggcgcccggcaaggtgtctggcaccacgagagtcaatccttgcgcgccatctccggaggccagtgcgcccagggcgcgccggcccggcaggagggtgggtgccagcctttcttcccatctctcgagcctcctccccggcgcccacgtgggcggagcagcgcgagggtgtgcgtggcaggggccgcggcggcgtgtgccgtgcgtggggtggggtgcgggctgggcggcctcgccttcgggccccgcgccgccggggcgcggcccccagctccatcttctttgccacctgggcggagatctgggggactgtgacctaccctgcggaagacacggaggggacgggccggccacaccccccgcgccactccggcaggcaccgggtgggtccccctcccgctccttggcttgagggcggaatccggagaagagtggaaataggggtggcgtgaaggagagctgggggctgggggcgggaccgggagggggtgttgggggaagcgacgcagcggctgggagattttgcaagggggtctgaagaggagtgggggatgggtatggaagggtgggggaccactgaggtgggatgcgagagtggaagggggacccagagggggcgcgatggccggaggagggggagatggacgatggggcggggcggcaccggtcgccgcgtcccttgccgccaggtccgcccctcggtcgccgggtccacgggttccctctggccagcgctcgcctcccgccccccggcgcacctgtacccacctgctcggcgctcaggcccgagccgggcagcagcagcggacgtagcgagcgcagccccgcgccgcatcctccggccgccccctccccgctgcgagcttacgccgctgtcgccgccgccaccgccttaaaaaggacaaaacggaacagaaaatgaatgcatgcacaaaaaaaatcgtaaaaagcaattgaggaggatggcagtcgcgcgcgcggctcggcggggcgggagtcgagaggccgcggcactggtggccgcgatccgggcaggcggccggcgcgtgccgcacgcgggtggctgcagctccctcggtcgcccgcgcccggctcaggcacggcaccgcccctccccccggggagcccctccgattggtctgtcttcctgccagtcaggcaggagggcgcggcgcccgccccgccccgcccccgcccccgccccgggcagatgccgggagctctcctgccgccgtgggagggggagctgagctgccggagcgtgcgcactgggccagcgggcggccggggcagggctggggtcccggcgctgagcgcccccagccgcgccgggcagcctggcgcctcgctgagtcggagcaacccccggcaggagctttcaggctctggtcaagcctcgggacccgggaagctatccctgccctcgggggctcgagcctggagtggggcttgcaggtaaagcggggctggggccgtcctggccgtcagtggtcaggaagacgcagcgaccccg

SEQ ID NO: 7838 - DNA, 5819 bp, Homo sapiens
cgagtagaaggcggacgcctccgagccgtaggtcacgtagttgccatagccctgcgatccgccatagggacccccatagacgcccagcgccgcggccgagttgagctcgtggcgcgcggtggccagcagccggctctcgtagaccgggcagtagaccggcgcctgggccgaggcggcgggcccggagtccgccagcgtgcggcctccggactcgcagcacgtgctcagggagttggtggccatcaagaactgcagagagaggccgcgaggactggcgggaagccgggctggaggctggggccctgggccttgccaatcccgcgcgccgcccacgagggcgtgccccgagtacccccgggcctcccgccgtccacaccaggatgctcgcccctttccactagcttgtgcgcgtctggcctcctccgccacgtggggcccagccgagcacctacacccttccccggagggtttccaaggcctctgacgccatttgcgcgccaagcctccttccccaggggttccttggggtcctaggactcccctggggcacagcctgagccttgtggttcaaacatcagggaacccgggcccggcccgtcggattttcttagcgcctcggcctttccccgggggtttggggagcaggggttgggcgtgaggggcgcgcgacccaggccttgctagctcggaagccgcaggcagtcgtaggtcggacactccccaccccccgtccccgccccatccgccctaccggcacctgcggtggcctgggcggggcggggctccgcttacctggggagccgaggagtaggggtatccaaactgcgggtaggacatggcgggcgcggcccggggcggacgggcggggcctgcagggttctgcgcgctggggccggcgtggcgcggccactgctccggagctgcaggcttctaggcgctgggagggcgaagcaggagagccggttagtccatccccgcgctccgcaaacttttctaaccgggtaacaaagtgagcagcggtggccgccgcgattcctttaacttcgcattccggaggctcgagggggctctgggaccgagcggcctcgcagcggcgacagaaatacatattttacgaaaaagaaaaaaaaaaaaacgagtcgcgcgaacccgtcaagtcagatgtgcgcggcttgaagcggaggaggctctgacgtcagccccacctcgcgcagcccggcctggccgcagactcgccggtcactcgccggcggctcaggccgggaggggccaggacagtcccggccgcgcggtggacggaggggccattcctccgggcgttagcaaataaattccatccgagtcaatatcgcccagcgaacggtgtttctctttagtcacccgagaacgagaggcacttttaattagaaattaattaatgagcagctgctccttcccgccccactgtaatcattcgtctcaattacaaatgagacctatgaaaggacacgctgaagatgtaatcaacagttaaaattagcccggcgctgcgcaggcggccggcccggcctcgcgctggcgcgctctgctccgagtggcaggaaggggctcgcaggcgccccgcacgcgtctcgtcactattgtttaatcgagaatcagcaacgcctcccgccggtttccaccctacgccggaatggactttcagaacccactgcggccgcaagacagcccgcaagagctggtcaaaatgccctcaggtgcgtgggggcttcggggccttagttggagcccgacaccctgagactggcggcccgagggctgtagggccgccccgggcgtgcgcccaccggctttgcacctctgggcagccgagtgtcgcggagaacgccccatcttctccaccgcggtcttttaagttcccgctcagcccaccgcccccacctcgcctccccgactttcctccccgatcccctttccgccggccgtgctccgccggcttccccctgcccctcgcggctaagccggggactgccgggcggccctgcgcgctcggaagagcaggttcctcaacccaggccccggcccctcccgctaagctcgtccctcccggcgccccgcagggctggctgcgagggagggggcgttgggtgcctggcggaggcgccctcccctgtccattttgcccagctttctgtctggggcgcacggagcaatcggaagaggggaccgagcgcccaccccaggactccctcggccagtaccctccctgggaccttgcccaagttcaaagcggaggccagtgagcaggcggcaagggggcggcaagggggcgcccgggccatcccgaacccgttccccgccttctgcgccatcgccctccgggaccgggactcgccccggttgccctcgccccctgggccggcctcccgtggtaagttgggaaggaagccgtgcaaggcagcgttgtgcagacttgctcagaaagattcctgggttcagacctgtgaatcgccccagggtcaccctctaattaatgatgacgtcctcgccctctccccagctgcaagcctgcctcccagaaacgaaatctgcctgctcttttgacagctcggttgaaggtgattgatgactatctggagaccacagtacacatcatataatatctgctgcgtaattgctttaatttacagatgaaaatacgagttctccgatcgcgttggaccggagcgggccacgtccgagctgcttgcagagggaaaccatcggaaataatgaatagccgctccatgcaaattattcagacagtttagcgtcggtagccgcgagaaatatataaagaacacgagtcaaatgacattaataattgtttctgaattctgtattgatttcgcggcaggccgcgtttctttctttctcacctgaatcgctaatatcaccttcctgtaaataataagaaactagccaccggggtttctcgctagaaatgaatctctcaacccctttccctctcctcctgctcctcccctcccccaccctccttcctcccctctcccaccctccctcctccccactccttgcagttttctggtttttcccgagcatccttctacttcccattatttattgtttacaaactactcgctctctccaggtaatgaggcccggctgaaggaggggtgtgagcccagccgggccaagggctgggatggggagtagagacccccagaggggaggcattcagctgtggcttgtcctttcctcacctatactcggggacctggcctcggcgactgtgagcactccgccggctgagggggagagccagggcccaggggcccagccacctatgccctgcacctctgggctctagtgcaacagctcagcccacccagacctgaggctggtgcatttccttccttccagacccggcggggcttaactggagccgaagccccagaacaggcggccattcatcttctgagcagagtctgggagaagcagcctccacttcccagggcagccagtacgtgggggccctttcgggggcttcctttgaccaccaccgccaccttctcctgttctcttttgcctttccagcctgtgtgcataaatcgacgctccagtccccaccagcgggcgaccctttctccgtgacccagaaacctggcctctgaatcggctttcccaggccgccgcacacacacgctccacttcctgcccgccagcaggccccagcgcctggggtccgggcccagtcacagtcaccctgcctcgggaagctcgcaactgcccaggaggcctcctgacccgcccggcctcacccaggccccactactcattccaggacacagggtcaatccagcctgtggattggcgaccaccgggacatctcactgaaaccctgtagcctggcctaggcccgcctgcccaaaccggggattctcactgggccacccttctcccatagataatactggaatattttccaagtgccttcaccaaaaggccaagcctggagcggaggcacccagtgtccctttcaccaacgataggacgctcagcatctcaggtatcagctgaacgcgtctgcatagactcggagtgctgagccttcctccctctagggacccccggtactaaatacacccgtgagcaggtgggccagaagtcagccggctcccggagtacacagcaccggctcagcttcggggagatgaggtgctcccgctggcctggagcgctccgaagagcggaggaccagggccggagcaggccgcaggggaggcaggggatggtcagcccctaacgcgaagcgcaggcgggtcgcctattttgacggggttaccgttggccgtcggaaccatggaaggcctccggggagacaggccgggccctgacccttcttcggccagcctagccctggtgcttcaggagttaccctgggggccaccagttccccgcaccaagagctcgtccggagggagctccttccagcccagagaagttaactccagccaaaggcgaagccgggagcccggggcaccaggcaagggcctttctttctgagacctggggccagagaccttgggggcgcctgtgcccgcccaccgctcgggacacccggctggggtgtgggtttgagaggcctcacggtcgctgacgccgcactggcgaacctcgaggttggcaggtcatttcctcacagccccgaggccccctcggagccagtggtaggagaaggagccacagggacaagcggtgaatctctggattcccaaccgccctccatgggggcccgcggccctctccctcctctctcccgctgcgcccccgccgcttgctccctgggtacggcctgaggctggacggagcgccgtccgggcgtccaggactcaggcctggccactccgagccccccaccccccgccccgcgccggcccgcgcaccctgcttcccgcaacttgcagcaaacgcagcggcctctggagagcctagcgacgggtagcaaactttgtccccttaagcgcaagagcaatcctcgcaaagtttgtgcggcggagcccactccctacctgagctggggaagctcccgcccgcgccgtgtggctgccggggccgcggggagcagctcgcagcccgggacgcaccggggagtcgccgcagccgccgccgcccgctcccctcggcggccgcgcggagcctccgcctcctcggaaggggggaggggtctcggaaccccggggcgggggcgggagcgggggacctcacctacctgcggtggcgctgggccgctcccggcagcccgcgagggctccgcgcggaagctcggcgcgcgcgctccagcggggagccggcgacaactaatggagacatttccaggcggagcacctggcgagcggagcgcgccggcgtccccaggcgccgcggtcgtcagccgagcccgcaccggcgtgacgtgggcgagcgagcgcgctgctcccacccggccgcccattaacgctttctcccgcgggcgccgcgctcttgccaactttcccctccgtccggtctgcgcgcggcgcgccgggtgcaggagctggggtgagggcgccccgggtgccagcaggggcgctgggagctgtttgggcggggacgtagggctccgggaggtcacacagccctaacaggacagtgggaaggcgcgcgagccagatttggccaaacgctaagctcgctgcggcctcgggccctcggcccacggggcccctctccccgtttgggctgccccacccagggacgcttgggccgggcgcgaagagcccggaaatagccacccttgtcgtcggcccggtttccctccg

SEQ ID NO: 7839 - DNA, 2001 bp, Homo sapiens
cggaggctgtgccggggctcgtcaaaggctacaaacaaaccggacgggtgggaagcacgtttcagcggcgactggatttttaaaaatctgctggtagagtgaaaacaaaaattgtcctccaagttggcaaaatcggcgtcccagacggtgcgcaggagggccctgcgaggcctgtccccggagccccgcgccagtcctgtaggcccggctgggtccgcagcccggtgttccactcgtgggtcgggcccggctgcggggtctttccgcagccgggacacccaggacagcagcggctggggagccggggccaggggcttccttgcaattccaatgatttttattattatcactcgcaaaggacaaacgcggccaaggccgggcctcacagtggctgtgctggtcatcgcgtggaggagtgtgcgctaacccaggggcgaggggggcgcgcccggtgtcccggggagagcttagaaggaagacgccccaccgtggtccctacagtcagggacagtctgggtgctagaaattcccagagagaactcgaggggctgatgtcctgggtcaccagtccctggtgcctgtggggcttcctgcgcgcccacccccatccccctcccccctctcaggttcgacggattctcccggaggcttaggacagtgatttacagtaagtggtgacagtggaataacgtgacagtccgctgcatttgccagctggctcctgggcaggcctacccgccgggcccgaccccagagtcgagtcctcggagccgccgggtaaagccccctcccccgccccggtgcagccccgcgttccccgcgcccggcgctgccggggaaaagtggcacaacaggaaagcctcgccagagggcccttcccagtcggcttcctcgccataaaaagccagactccagccgaggtcctgaccccttccaaatatacgttcccttgcccgcggcccgccactcccgcccgggcctcgggctgtgcagcttcctcctaggcctgcccgggcccatgcctcccccgaagcggcgggagtcggtgcagcctcaacttctactgcgtgtcccaggtcgccaaccagctttgctcgcgtgccgttggcccggaggctgccgcgccagtctctgcgtgcgcctgagcgcgctggagcatttgcgaggccagggctgccgacggcgagaggatactttgaggaacacggtgcttcagtcccgcccccgctctccgcccgagctggaggttggggcgcgctgagccgcagcgcctggacaagtgcgcgggccggagccgcccaggcctgcacccgggggctcgcggccgacgcatgcgcacgcgcggtggcgggtctgcaggcccgaaggcccggcccctccctcaaacccggagcggggaagcccaggggctgagagcctcggcccgggtcgcaggagctggggagcggggacgcgggcaggctaggtcttcccacctgccgtcggggctcctccccgcagcagcaaaggggtcccagtgcccgtggcagtgcatgccccagcggacacgctggctcccaaattcagagatcagaggggcggctgagaacggggcgtccgctgtgtgtgacccctgaccgtggaggaagggcgggagccgggagtaggcggtggggcccggggtcaggccgcggtcgtcggctcccggcaaaggcgctctggccggggaagggggcgagggtgggcggccggcctctgccgtcgtagtcatacctgggacgttgaaatgggctttggggatagagctcactcccagcgcgccccacaggagaagcccgcagctcaggcctgggccgtgcagaccgctgggcgggctcggggcccgaggagagcaacacggcgcgaggtccagtcgcgagtaataaccccgacagcacggcccctcgaagacgtgttccgggcaccggggttgtgagcgggggagcctcgggccttgggcccgcttggcacggggcgggggcg

SEQ ID NO: 7840 - DNA, 1265 bp, Homo sapiens
cggcgaggagggctgtaggtgaagcgcggggagagggaggtcgcccgctccggcctctcccccaggggccctgcggctggccagcgctccggctgcacctcctggtgcgcgccgcggcggcgccacaggcccctcgaccctttgaccaccgccctcgggccgcgcgtccggcagccgggaccggtgatggcgcgggactgacggccgtctcctcccagacccctctgtcccgcctggggctcgctggggctgcggcgccgccccgagctgcatgtggggcgggcgcgcccgagcccagagcgagcggccctcggcgcccccgaggcggtgccccgccgcgccagagtacgaggaggagcggcgggccgggccaggctccccacgcgccgcagcctcggagcacgggctccccggaggggacttggggcgtcccagcccaggaggaaggacccggaagcagaagcggagccgcgagtcgagccgagccactgcccccgctgcccgcgggcgccgggtgggggtcccggcggctggatgggcagcggcggcgcgggccgcgggcggcgatgggcgaggagcagagcacggtgagcggcggcggcgggccccaggagtcgcagaccctggccagtggcactgcgggccaccctgagcccccgaggcctcagggggacagcgcccgggcgcccccgctgcgcgccgcctccgcggagccgagcggcggtggctgcggaagcgactggggctgcgcggacaccagcgccccagagcccgcgaggagcctggggcccccgggctggagtaagagccgagcaccggcgcagcctgcgggactggcactcaccgggcctctcaatccccagaccttgccactgcagttggagctggaggaggaagaggaggaagctggggatcgaaaagagggaggggatgaacagcaggaggcgccccccggcgaagagctggagcccaggacccgcgtgggggccgccgacggactggtcctggacgtgctgggtcagcggcgcccgtccctcgccaagagacaagtcttctgctccgtgtactgcgtggagagcgacctgcccgaggcccccgcctcggagcagctctcgccgcccgcgtcgccacctggggctccgccagtgttgaaccctcccagcacccgctcttccttccccagcccccgactgtccctcccaacggattccctctcccccgacggcggcagcatcgagctggagttctacctggcgcccgagccg

SEQ ID NO: 7841 - DNA, 1360 bp, Homo sapiens
cgcccccgacccccgccgctgggatttcccgccgcagctcctgctccagtctgtgctgcgggtggggtcgggttgagcagcccggcgccccccaccgcgccccccaccgcaccgccctcgatctaaccccgcccccgggcgctcattggcctgcagcaccccctccccagcctgtgaagtgagcagggggaggcggtggtcggtcgcctccctccagcgcccagcctggcttcgcggcggaggcggcgcctctcccgcaggacggagccaagctggactgccgcgccgcgcggggcgggcaaagggggcgctgcgctcggccccgggcagggagtgacggcggcggcggcggctccgggcgagcgtggtccccgcgtgcgcacacgcacacgccgccgcgcagggacacacggaccccggccgccagccggccacacaggcgcggagacccggctcggcgcgcgctcctcggcgcacacgctccccatccccgcgccgcgcgggccgcggacttgcaggctgcgcgtcctttgcggagtctgccccggccccacggacaggccccgcagtgagcaggtaagggtcgccccgccgcggctgcccctccacgcctcggccgtcttctccccctccagaaccttcgcccagccgggacctcggatcccctcctctggcttggcggtctccgccagccgcgacctccaccgacggagagcgggcgagggccggcgccaggcaagcctcccagatctgaaatgaagccccctcccgccgctgcgcccttcctgcgcgtcaggctgacaccccccaacccaagtgtctggcgctgcgctcggggcggccgatcgccgcagactgccggggtgggggtcgacctagctatctcacgcccctcctgatgcggagaagggagaccaggggggcaggcaagccatgcggccggagggacccggagggacatgcctccctacccttaggtggacggacgcacctacgcggatcgggaaggcagggctggagggtcccccggggctaggtaccgcaatccgcacggggtttgaggggtgggcaagcaatgtgctaggtgggggttggggtaggggccagtgtagaatgcccctctgtggtgacacatccgggattgttcaaaagagtgtcgtcttcgtttcccgtggcgcggaggggctggggttggggatgccagggcttcagtggtccccagaagaaacgccctgcggggtctgtggggaaacgcaccggccttcccaggttgaagtgggcccgctgagacccctgcctgccgctttagaggcagaagctcctgcggcggctgcggggggcggaggccacatcctcggcg

SEQ ID NO: 7842 - DNA, 362 bp, Homo sapiens
cgctcagcacggcgggcagcgccgcgctgcgcaccgccgccgaccatgagcgaggacagccgcggagacagccgcgccgagagcgccaaggacctggagaagcagcttcgcctgcgcgtgtgcgtgctcagcgagctccagaagaccgagcgggactatgtgggcacgctggagttcctggtgtcggtgagtgtccccggcagacgcagggggacgtccgggcggcgcggggcgcgggtcccggagtggctgcgggaaggacgcgcggcattgtctgtgcggggacccgggacgggtcggggcatcacaggcgcgggaatccacgtgtggactctgcgttcgcgggcgcggtgacccccgcg

SEQ ID NO: 7843 - DNA, 2566 bp, Homo sapiens
cgtccccaacgcgggagcgcagtgcatcccagtggacaaactcgagaaccgcacgctgctctccgcctccacctctgtcctccccgctcgcggttccaacccgggacccaaatgcacgagctcggtgaatgccccggcaggagggcgagggctcagaggcagcctgcccagcaaaaacgacagctgtgctctggtgggccctgggccaccccaggcagaagccagagaagcccgagaaccccggcgggctggcaaagtttgccgagaagggtctttctggacacccccaccacgggctctaggctcgaaccccctcttccatctggccctggagtcccagacacagacaagccccgggcgcgccggcgggcgtatgtgcgtgtgtgtttacagcggggtggccgccggagctccccaagaaccccagctctcccgccccagctgcccgccagctgtgagcgcccgtcgggcccggaggtcacccgcaaacagctgggtcggcagctgggagcctgggaggcccctgctcagccccggggccccgagaaaggagaagggggagcggagtggctgtttggctgtggtttcctccaactccgcctgcgaagctctcgctgggagcccggagctttagctttccccggcagccccggcccccgcgcccgccgcgcccagcggccggcgcctcgccccgggccccggggaggaggcgcgccggggcagccggccaggacactgcgctgctggctcctagagctgcgggcgcgcctggccggccccacttcccgggttgctggggcgggcgccgctgccccgaccccggacgcgcggaaccctggagacccggccgctccccgccagggccgcggtgctgctccaggctccgggcgggcgcccctttccggctaccggtgcaccccgttgcccgcttgcgggaagcgaagaggggtcccttgatttgcaacatagaggaaagcgccgcttccgcccagcctggcacccacgcgcccacacgcacccggcgccggccgggtcgctcacctgagtcctaaaagctgttgaatccacatggtcacgtttcggggagcggggcctcagacctggctcgcccaggccatctgcgcggcgcccgcgcccgctcgcttccgtcccgcggcgccggtctccggctctcggtccgccgcctcccgccgcccgccggccgcggggcgcacagcgagtcagagcgcggccgcgcggggctccatgccggccggcgcgccgccgccgttggggcgcatggctcaggctgggcggcccgcgggggcgcacatcctccggccggggcgcggggctcgcggccccctccgccggcggcacagcgaaggcggcagcgaggcggggcgtgttccggcgctgtcgcggcgcagcaaagggctggggagccgcggcttcgccctccggggcggcgaggagggaggccggcggcgctgccgctcacggtgcgtgtctcccggcgcgcggctcttgcctccagccggagctccgcgccgatggggcggcgctgcttagggtttggggtgacgcgacgcggacggacgcgagtcccctccgcgctgccgggtcggggggctctgccagaggctccgccgccgatcggcgccactcaagttgcccgggggctccgtctgagcgctcgctctgcagacggccgcggcccggagactggcaggaggcgggcacgagaggcgcgcggggcgagggcgccgtggagcgcggggcgtggggacgcgcggcggcggcgccgcgcggaggaggcgcgcggggatcccggggccccgccgcccgcgcccaccgcgcccgccgcagagccgcccgcgctgctcagccgcctccctcctcgcgtctgcctctccgcgcgctcgcccccgcctcccggagccggtcccaactccgcccgcccggcccggctcacgtcacccgccttccccgcccctcgaacgggagctcgagcccctggcctggccccggctcctgctcgccgccccaccttgcgggggccggggtcgccgcgggtggtggggggcgctgtgcccagcaggggcgacagcgcaggcggggcctcctgcagcccccttccccatccccggtcgcgtcccggtccccaccttgcgaaaggctcgagagaggccgcaggctaggattggaccgccgggcgccgccggatggtgttgccagggtaaccggatggcacgcgaagccgttcgaggttccgacccggttacgggggcgcccagtggacccggagagctactttggggagggggcggccccgaagaaggactgggtgggggcgcatggagcgggggctgcgcgaaaagtttcctggggcggagctgagccacgcgggccgcgcaggagcgtctgtccgagggtcgcctacgagggactcctctgctcggctgcgcgggcttctgcgttgatgaagtcaccgcgttccgggtcggagcttcggcgcttctgccccgaacccagcgaagcccggtcctatgcccccaattacccaacggtccctcatcgcccagcg

SEQ ID NO: 7844 - DNA, 572 bp, Homo sapiens
cgctgtccgccgggccggtggcgttcaccccgcaccgcgctgccccgcccggggcactatggcctggggctggactatgccctccccacctcagccggcgccccccacccacgcgcgctgagggtgcggtgagctgagtgcggggccaagcatgttctggcgtcgacttcgcccaggggcccaggacctggcgcccaaggggctccctggcgacggagacttccgacgcagcagcgacccgcggctgcccaagctgaccccgcccgcgctccgagcggctctgggcgcgcggggctccggggactggaggatcccggggggcggcgccgcgtggtggccggaaggggacgccaagcccggggtgggcgtcggacgcctcccgccgcgcctgcccgccttgctcaccgcgacccggcgggccgtgcggaagcgggggctgctgcggtccctgctgccgcctcccctgctgtcggccggcgcgtcccgggaatcggcgcccaggcagccagggcctggagagcgcgagcgcccccggaggcgcgtggccagggaggaccccgacttcttgggcg

SEQ ID NO: 7845 - DNA, 989 bp, Homo sapiens
cgcatactctgtgcggcccgagtggtccggatggcacagcccaggtgtccgggctaaagttggcatctccaaagtccagaacgcaacttgggcgcgccagtacaaactcggccttcggcttttctgaagccagtcaagttcgcacagggcccccagcgcctggaaatctgagaggcgtggaagggtggggagtcccgcgaagtctccagtccctgggtgtcctccggctccgcgggggagcgggcctggagctaaaccggccggccgtaggctggagtagcgggcgccggagcgcgcggtggggatgtccgaaaaggagttagaggctcagtcggagagtccgagaacacgagggatgcctaccttgtaacatggcctcaagtttcttcctgtccacgcggaagcgctcctcgctccactccgggctgtgcagggtcgccccggcgaccaagtcgtcctcggagccgggcactggggagtcggtgctgcgctcgctgttggagccggggtccgactgcgccgccaggtagccgggctctccctgggcggccatggtgggcgcgcagcgctcgggctcccgctgccgccgccgctctgcctgcgctgccgcctccgctcgccggccgggctcaactggctcccagcgccgcggcgctagctcgtccccctgcagccgccgacgccaccgccaacgccgccgccgccactgagcccccggcgcatcccagccccgggcgccgcccacgccacccgccaccccgggtcgcggccccggtccgggtccagtggctgcgccgccccccgccagcaacgcccgcgcggaatgagcgcgccgcgctgcccgcgcctccatccgcagggctcggcgccccctccccgcccgccgcccctacagccgcgcgctcattggcccggccagcccacggggagccgcggcgggcgggcggcccctggcgctcacacactcgcgcgcgcacacacacaccacg

SEQ ID NO: 7846 - DNA, 2400 bp, Homo sapiens
cggcctgaccggggcgccccgccgtcctcccagtgtaccccaccgctctcggctgggggcgcagcaccttggagagaggcgcctggccccgcgcctgggctgggggcgctctaccttgcgccctgggggtcaggggcgcttgccgggccgctgccgaggggccctgcccacccctgcccagcccggagcccaggcgagccagcgcggcgagcctcctcccctcccgcctgggtcgtcctgagtccgcgcccgctccagttgctgcagctgctgctgctggcggctgcggggagcgcggggcgcgcgccgaagaggcttgggcggcgaggacggggacgaggaggagtcggaggcggcaaggaggaagagcgagcggaggccgaggggctcagcggcgtggcgacaggactagggggtcccgagaacatgggctagcaggcggccacgggccggcggccggacgcggtgaacctgccgcggccgggcgcgcactggcgcggcgagccggagccgagcgcagccgggggaggagggctggcgcaggggcgcccgggcggagggggccgattatccattattaacgagttaccacctaataagcggagagcggctcgttagccgcgcgggaggcgctcggggaagggggtcaccggccgagcgcagcgcacacccgtggcgcacggcgggcggcgcggcgccgaggacacccgggaccgcgcgcggagccggggcgggcccgggggcggcgcagaccccgggcgcgggcggcccgcggcgccccctggctctcggcgctcggggccagcgcagcccggggcgagcggggcgcgggccggggagggggagctgcccgcgcactccatccccctcccccccgggcgggcggcggcggctcgctgtatatatctcggcgcaccccgccaggtcgcgcacagcgccccgagcccaggcgcctccccgcccccctcccgcgctccgcggcggcggcggcggcggcagcagtagcagcaatatggctgttgatgggtgtttggggtggcgctggcggcgggaggagctcccccgagcccctgcgccggctgcccgttgctagctatggcaaatggtggcggcggcggcggcggcagcagcggcggcggcggcggcggcggaggcagcagtcttagaatgagtagcaatatccacgcgaaccatctcagcctagacgcgtcctcctcctcctcctcctcctcttcctcttcttcttcttcctcctcctcttcctcctcgtcctcggtccacgagcccaagatggatgcgctcatcatcccggtgaccatggaggtgccgtgcgacagccggggccaacgcatgtggtgggctttcctggcctcctccatggtgactttcttcgggggcctcttcatcatcttgctctggcggacgctcaagtacctgtggaccgtgtgctgccactgcgggggcaagacgaaggtaacgcgcgccccgggcgcccgccctctgcgccagccccaccgcttctcggcgtcccctgcagcccacctcctcgctccgcgccgcgccgtgcctccctccatccccgcctgccttcccctcgccgccttcccttccctcggctctcccggtgctctcggatcggggcagcgggcggcgcgccgggggtgaggagttgcccccagccagtgcgctccgggacgcggacgctcaatcctgtcctcttgtttattgtagggttgttggcggctgcggctggggccggggtcggggactcacaggctcgggtgccgtggtgcggggtggggacagccaactcagcggggacggaggaagctgggggcagctgggtgcgtgttttgcaccgctcacctgccggggctcggctcctggcggtgggcgagagggagcacatccgcccatactttaggaacctgttggggagatgagttcgtggggtcagaaagaagggaaaaatcctttgggcaagggagagaataattttgcacaagggaatcccgggggaggagcatggcccgagataacagggggacttcgaggggcgagagaagttggggagatccatcccactattgggggtagcccacggggctgccacttttggaatgtgtcgaggtcgcatatctgatgtaacctcccactccgtcccttaggtgctctagtggaacataccccaagttcttcggcctctgttcctttgcccccaggccacccactttgggtccccggaaatgccaccagcagcgcggagctggagcgggagtccgcctgaggccgcggttttacgcggagcgtcttccctggcgctcgaggtggctagatgtcgtcggctttagctattcctggtgcagacgcccaccggcactgaggctggcgacaccttcg

SEQ ID NO: 7847 - DNA, 1859 bp, Homo sapiens
cgcacggaagtctctgcccagctgtcagcgcgcgtcgccaggggctgcactgaagctgtggacccgggatggggaggaggctggcggcctccgaagcagggtctacagcgggggagggctagcgccgtctggcggtggctgcgcgtggccagtgcggacccaggctcggctcggccggcgctgcctgcgtgtggtccgggcggagcgagggtccttggagcccggttcgtcctgggtcccaggaagctcggcgtgcagcgtcagaggccgcgtgtgctgggggagggaggagtacagactgtgcctgggggcatccaggacgaattcacagaggggtggtcctgccccacccagggggtgtcgtgggcaaaggccctggggccacctgcctggtgccttggagggcgtagggcaggagccgccgaggcccgcgggccactgtggggcgcggaacttcagaccaggcacccgcggctcaacttccgggccaggggacccgcgggggccttacgaacctgtttggcccatttgtgcaacagaaatccgcccgcgcctagcagcgtccggggccgcctgcgccggatccgcagcccagtaccctccgcgccctggactccgaggaggccaggtagagagcggctcgcgcggtccccgtctgcgccctcagccccgcgctgggcagcgggacatgcctggctccggcgccgccacctcggcttccgcttgcccttgagtgcggagcccggagcctccctcgcggtgcgctgggtcccagagggccagaggccaccagggggccggcatcggcgggagcccagccgggcgcgccctcggccctctcccacccacgtcctccgcggccgcccgggtccaggggcgcagcggggaggagaccccggccagggccggggagcgcgagggcggggcggggtccggcggggaggggcgcgggcgggcggggaccggggcgggggccgggtccgggggcggcggcggcgcgggcgggaggaggaggagcttcccgcgcggggcaggggcggagcgagcggccgcgccgcggagccaagtgagttcgctccggagccgcgccgccgccggcccagcatctcgggcgcccgccgcccccgccgccgccgtcagcgcggggatgtaggatgcaggcgggcgccaggttccagcggcggcggcggcagctgcagcagcagcagccccggcggcggcagcctctcctctggccgatggacgcagagccgccgccgccgccgccctgggtctggatggtgccgggctcggccgggctgctccggctcagcgcgggggtcgtggttcccccggtgctgctcgcctcggccccgccgcccgcggccccgctgctccccggtctccccggctggccggccccgagcgagccggtgctcccgctgctgccgctgccctctgcgccagactccgccgccgccgccgccgcgcaccccttccccgcgctccacgggcaggtaacgtgtccccgtcccgcctcggcccgggtcgccgtctcccctgctcctgggcgcgccctgcccggcccggctctggcctccggctcgcgcgccctcctccccggcggtcctcgccgccccaaaccctcaggacggagcccggcagccgtgcctcggcgagaaagttcgtgcttggacgcccggtcgtccacctccgcagctttggcaggtgcctccgggtgtctggacggagccgtggagggacccgccgcccaggcccgcgtggggaccgcagggaactcgcgccacgccgggggtcactgtccatcgcgaggtgctgaagtggctccgtgaccgccgcgggccgtggctgacatcgcg

SEQ ID NO: 7848 - DNA, 902 bp, Homo sapiens
cgggttcggctggctttcagtaggcttgccggggtctctgcactctgtgtccgggatcctcaatttgcgaatagtctggggaggctgagcgcgagccaggagcggacccgggggtgggggtaagcgccacgtgcgcgccaggtccttggtgtgcccggcaggcggcgctgcgtggctgcggctggctccgagggtgcggggggcggcgacccgggagggaaaacccctgcctcttcccggggcttgctctgcccgtcctttaaactcgccctacaccctccccgactcccgtccttgcaagcgttatctgcagcctcaccggccctcgcaacggtggtggtggttggtggggggtctcgaagcttgcctctggccagccggaccccggtgggagatggaggcagaaattccggcctcctaggagaagggcgtctgctcactcccccactccccggggcttggggagggggctgggcaggggcggaagcgagctggagccgtgtttgtcgcggcgctgcggagtggaacagatggctggggaggggagagggtgcgtggcggggaggaggaggggtgcgggggccggaggatagggaacgaggaatttcgaagcctggagtctcccaggagaagcccccctccccgtcttttcccagaaaggggggcatatatgcgcctgcctttttcccggagagccctggcctctgccctgtggcagaccctgccgcgcaatcctctgccccagggcgcgcccctcacccccaaacccccgccgcgggacggggtggcggggtcaggaccgccaggagcggcccgggtcgcgagggttaatggggccgccctcccaggggcgaggaggcggcgggaaacgggctcggggtggggaacgagttctgggatcg

SEQ ID NO: 7849 - DNA, 2044 bp, Homo sapiens
cggcgtcctcgctctgtctgcattttccttcattgctctttcacgtttggaatgcccccgtctctgcagcctgcagacagcggaaaccgcgggtgcaaatgtgcaggggccgctgacatgaccggctgcagaagcccactcagggttacccgaacaggctagcgttcgggattgcacaagaggtcaggcgatgctgtgggcttccaaatttgtacagctgcgacactctgcgacgtgccaccctatccccagtggggtggggtgggggattccctccgcagtccgctgaaagcgaggcaggaatcactgcaactcctctgctcaggctgaggtcgccaccgctccgcggatgcacgcgctgcaggggcgccttccgccgcgggcacggcgcgggaagggatggggtctggtgggagtgggcaggtggcgggagaggcgcgtgtccgtgcactagaggcccccgtgcgtgacacaggccgatgagctcctgcgggctgcacccacgcggagtcacagaccgaaaaggtcagccggtggccggtgtgctaacatatatagagagacgcccgccaggcgcgccgcaggctgggacgaggctaggagggcccaggctggaggagggctgaggagggctgcgggggcgggccccggcgcagggcgcccggagcggagggggcgggcccgaggcggggcgggccgcggcgctgacgggctgtcgccgctgcactcgcctccagcccgcggtgtcgagcgcaggcggaggtacatggccccgacgggaggcgcgcggcgagcacccggagctcggctccctgcctgagcacggcagccgcgcctccgcccgcgcgtcctcgcccctccggccggcagcccgcggacatgatcgtgtagcctcctcctgggctgggatttgtttgaagattttcttcatggaagcgatgtccccccagcaggagactctagggggacagccggggcgctcctcttccctgacaggagtgtctcggctcgcgggaggcagctgcaccaagaaggtgaggacgctgagcgggggcccgtgccctccgccgccgcagcccccactgccggcgcgcgccctccgcgcccgccacagcagcgcgctaggcggacgccgcgggaatttgacgctcgaggctcgcggcccctaatgagagtcccagaacacttcccgcccttgacggccagcggcagcgccgccgcctcccgcagagcgcccgcttctccgtttctagagccttagtctctcctcgagcgacctcgcagcctccctcccgtctccatccgccgccggttctgcagcccggctcctccctcagtctaggcgcgcgggctgtagtgggcgatcgcctttccccgacccctcgccgtgcccctgggcctcccgaagtggcctgggcgagcactgactgccctttggcggtgtcagccccaaagtcagggccggcgatgtctgcccgggagcggcagccggcgctgaagaaggtaggcagcggggctgcggcgctggtgggctcggccccctcacctgcccgccgaggcgcggctgctccatagcagttttcggggggcagatatggggagtactgccccccacaccagggtcctggatgattccgggtctcccaggtgggggtcacagtttgaggggcgactgtggatgataacgctcgacactacggggacatgtaggttcggctgggcctagaaccgagcagggtgggggcgggtgggctgtggttgggggtcctgagggctgaggtgggggaccttctccctgcactggtccctggcccctgggactctggccgggctggatagggatccgggtgtcggtgtgggcgtgggggcagcgcgtgttccctgtcaaagctgggagagggatgcaggtgacaacttgtagcgttccattccgataaacacggccgctgtgctgcgggaggattccgatccgggtcaggtttcgctggaacggttccctgagcaagtgcacgtgggccgcgggctgccggcctctgccgtttcg

SEQ ID NO: 7850 - DNA, 1152 bp, Homo sapiens
cggcgcacacaagttgaggactgccgaggcgtctcctgcgaggtaaacacgaagtcgcttggttagtgagaagaaacccgaggtggcctctggggcagacagagcaggacctgcttctgccccttgccctcctcgtcctcctctctccagcggcggcgaccgcagtaacagcggcagtggcggctgctgccactgctctgccgctgccgagccggtcacctgggcacccgcggagccgcgccgctgctaccgccccggcggcctcccggagtgcgcggagggggcggcggaggagcgagatatccatagtaaccgaggatgcgaggggcgcccagcagcagcgagtgcctgggagccaggaggaggcccccgcgcgccggcaacccccagtgctaggcgccctgcagcccccgcgcgccgcgcctgggcccgcatcgctctcgcagtgagggtccgcccgagcggtaagccctccccggcggccaagccgacacctcccccccgcctcgccgcccaccccgggcagcagccgcggaacaatggagagcgcagccagcagccctggagacggcgttcgggggaggacgcgccgccgccgccgccgctgccgccagggcaggcgcgcgccgcgtggagccgggcgggtgcgagggcgcgcggcggggggtggggggcacgcgccgcgcggggggcgggggcagtggggggcgcgcgcgcgggcccggggagctcgcggggagagcccggcgctcggcgcagcgcggcgcggccaagctccgcgcctctcccgcccttcctcggcgcgctcgccctcgcctcgccgctcgcattcgctgggggcgcccagaaagatgcacagaggcaacggctaggggagcggaggttcaagccacatgtctgcgtcctcgggggccagagcccgccagccctcgcggatcccggctcgcggccagcccgagcggctcgggtgagtagcggcacagcggccccctcgctccgcggcccccgctcgccgagacgtggctccaagaagtggtgccgcagccggggcagaggcggaggaagccgagtcgggcaagccgggaaggctgcggagacgctttgccggggcaggtgttgcagcctcagctagcggtctctacggagggggcg

SEQ ID NO: 7851 - DNA, 872 bp, Homo sapiens
cggccgggcttagcgatgcggctgagctgcccacccgcgtctgttgaatcggccaatcagcggcgcccccggacctagcgggagcgtttccatgccgaccgcggcaggcgtgcgctctccggggccgcatcgccatggcgacctgctcacctgactcgctccgggtggactcgccgcgacccctgggcgttcaggcccctgagggcccaacgggcgacggccctccagctccagctgtgcgtctccgcccgggcgaggtggggctgaccgcggccgtctgcacacgtcccctctggtccgcgcccccggcctgggagggcggactcgcccaccccacgatggccccggctttggaagggactgtttccgtgacccgttctcccaacagccgctaacaaccccctctaacgtctcctgcgcggcccgctcctgagaaccctggctcgggagagcgacgcggggtcctcggggctgcgcaggctgcggcgccctgcccacgctggcccgagggcgcggctcgctccgggtcggctcacacacctacgcttcctgccgggaggcggctgggacgcggcggggctgccccaagtgcagtcgcggcagtgttgcgtctccatcgcgggggtccttgcgggccgcgcctgccccgcccggctcccggtgcatgtggcctgcgaggcggcagaggagatgtggggatttagggtcgcacgtcgtgctcgaggtccccacgagaggtcttcccccgcgggctcctgcgcaactgcgtgaagccggcccgggaaagccaagattgtggcccaggaagaggaaggaacgcgggcgacagagctggggcttgggacgttgagggggtcggtggcagctctccg

SEQ ID NO: 7852 - DNA, 1070 bp, Homo sapiens
cggcgctgagtcctgcccagcgcgacccggaccgacggacgcgcagagaccctgccgggacccgccctccagccggcgcccggggagccgccggccggctctacctcccgcccgggagccgggcagggcgagaaggcagcgcgagtggcggtggcgacccccgccggggttcctgcgacgagcggtgaccagcagcgcccgcagccgcggtcccgctctccactcggacgtggccaagcggcggcggccacgacgtccggcttcccgggatcgtccggctgcgccctgggcgcatctgcgcgcctggccccgcgccccgcggagagggcgatgggtcccggtcaggactgagccccccttcccctctccccagtcccgcctggcaccccctcctctgccccgagggcgagccacggtctgcgccgccgccttcccctccggtgcccccggctcgccgtcctcccgcgccctccctccccggacccgttcccggggccaccatggccgcggccatcgctagcggcttgatccgccagaagcggcaggcgcgggagcagcactgggaccggccgtctgccagcaggaggcggagcagccccagcaagaaccgcgggctctgcaacggcaacctggtggatatcttctccaaagtgcgcatcttcggcctcaagaagcgcaggttgcggcgccaaggtctgtgggggtcatggtcgggagatgcgccccgggtcgccccctccccgcctaaacggagcttctccaggctccttccctccctcggttttcccggcccaccccggccccggcctcccttctgagcactctgggtgccgtcgcggggaccctggagtccgctgtcgggcaacctgtagccgccgagaagtgcagccgccagagatggcaagttggctgctcctcgccggcggctcctgccctccgcgtccctgcaggctgggctctgggaaacctgttccccctgagtctcggcttcccgggaggatagggactggcactggctctggaacgcggggcaccccttcctgccacacccggggtcgagccaccgctcg

SEQ ID NO: 7853 - DNA, 395 bp, Homo sapiens
cggcggtctttcgccctccccccactctccccgcccccacccccatcccttggccgctcgaacccccgaccgggagcccagagccctgccagcgccgcactgtgcgccgcgcaagtcgctcgatctccccagcggtaccggctctaagcagtaaacatctgtgcgcttctgagccagggacgcgcgtggggggtgggcgtgcacgcgggtgggccagcgcagagtgggagcttgtgggtgctttccgtcgggatttccaactcagctgcctccgagagcctaagctgagcgccgcacgtgctcgtgccatctgctgtactggacgcagtctaatagcgcagagaggtttccatccggcatccagttcgatgtgggccgtttttcccttcccagcg

SEQ ID NO: 7854 - DNA, 265 bp, Homo sapiens
cgccggactcgcggaaaaggccgctggaagccccccctgaagccggcagcaccaagaggaccaatacgggcggtgggtatcgcttccacctccccgctggccccatcccccgccgcccgcccctgcctccctccctcgccgtcctccctccctccttccctccctccctcccgcggcccggacacctccagcccgaacccggcggcccctgcgcccctgccccgcgccccctcccctgcacctgccccgcgcctaggtgtccccg

SEQ ID NO: 7855 - DNA, 1169 bp, Homo sapiens
cgagcccgcgccaagagctacgccgagacgcgccgtcggtggggccacgcgagatgcaaccggagagtttaaaactagcccaggaccaaccccccagggatccgctcaactctccccgcagaagagtttaagtggggcagtggccgccacaggctgaggatgatttccggacgcgccccaggcgcgaccgcactactcgtcctcagttcaaagcctgagtgacttggcaccacttccccaattgttttttatttccttcgcatccctgttgtgtctaccgctttcacgtatttgagagcctaaatcatgttaagacgacttggagaaacgcccgatttgcctcccaagccacgcaaggatccacccagacgcacgcccgcgcggagacgcacgctggcacacgcgctcacacacgcgagcacacacacgcgcacactacccggttcgtgcgcgcgggtcgctgttcctgttgcattatgcaaaggtggctgggaaagcgcgttgacttacatttacatagcccatcttctccccacagtatgtgactaatacgtatcccggggaggagggagcgcggctgggggtgctaatcggaagggaacagacagtgagtgccatcttgctgggaggttccagaagcaaagcgccaacgacgacagtagcggtggcctcagctccaccagtaactgccgctggcaggagcaccacacgctctaggagtttcccgggtatcaagtatgggtccagcccgtcccagttatcctcttcccctatggcttcattcccgttgtcagtaccccgacctcagcttgcaaccttgatcttgggcttgattataaatgacgaaagaccgcggcagccttcaaagtgcgggagcgagccccgtactggtcagcgcggcggagggatctttccaggaggccccaagcccccaagcctgtggagagacttggtaacagctggcaaggcctgctccagccaccctcgctggctccttgcccctgcattcagcgcctgagggcgttattcgccctctccctgcgtcccacgcaagcggctcaaggaactcactcgatccggattccgcctcgtatgctctccaagccttcgccacctccgcaggcgctctagaaaggcgtgatggccccagctcagtgcccgccagcccg

SEQ ID NO: 7856 - DNA, 1743 bp, Homo sapiens
cgtcctcgcggttgccctcctcccagggccgccggtggtccaggatctggccatcggggaggggcgtggtcttgccgaagtcgatgagccacacgccggcgcgatggcagtgatcgtgcacaaagaggagcgagctgccgatcacctgcgagccccgcaccgtcaggccgcggccctgcccagagacgcccttgccgggttcccgccctagccctcgcggcccgggcacccgggcagccgccgcttacctcgtgcctcctgaagaactcggatacctccagggtgtcccggatctgctgcaggcggttcagataccgcctctgcagagggtggggtgggagaggagggcaaattaactaaacgccaaatgagcccctgctaacgatgaggagccgggacccacgctgtgcttggcaaatgccgccaggaggaggacccagggccccgcccagcgtggcccagaagggaaggagcgtagagcagttgcgagccagcgcggtgagggccatggtggggacacagccgagggcactgggccagatgacaggggcagtcctcggcttcaggctccccaacacctcagggtttgggatcccgctctcaccagcacttcctcatctccttgcacaaactcttcaaagacgcgaagcacctgctctcggcttcgcgtagtcttgaagtcggtgctgcaggagccgtccgctttctggatgtgggacaggagtgtcaggggccccgggcccgccagtggggaagaggacagcgtagagcagcggtacctcccagttgcaggggacggcgaggcggtgggagagggcggaggggcaggcggggcgggagcgggggatcgggaaagacagcgcgcagtggggctgcggcggtgccagcgaagcgcgcctgcctcaccttgatgccctcgatgcggaagccgagggtggtgctggagctgatgccttcccgccactgcatgtagcgcggcttggtgacggcgcgctgcgcgtgctcctcctccgtgggagcttcaggatccaccgccagcattttcttgtacatgtccttccgcagcttgggccgctcacgggccttggtcagctcctcctctaggtaagtcctgtgggggcgcaggcagcggccagggcatgagggggcgcacacggagaccccttcgagcactcgccccgggtccccctcaagcagctgtcccggccccggacccctacttgatccccccaaccgacctggcagggcacgcatacctgacgcccattttgcagtcgagcacacaaggtccgtcgaagccatcgagcaggtcctgcagctgcaggtagctttcgccgtcgcgctccaccacgccgtggaaggcaggcacgcagccgcgcagcgcgtcagccatcagccgcgccaggcagtagcgctccggctccgagcagcgcttcaggatcagcccgctggtgcccgccgccttaaaactccctgaggaccggcatccgtcagcgccgcccagccccttcccgtcgcgggcacccgcccacccgccccactgctcaccagtgtgccctgccagctgcacccaggcgtagcgcttcttgaaagggcttatgaccggcagattgaccatggtccggatcttctgccagtggtttttctgaaagcgacagggtcaaggtctgataatcggcgtctcggcaatgcataagccctccctccactgaaacagggtctcgccacgcccccgacccaccg

SEQ ID NO: 7857 - DNA, 2405 bp, Homo sapiens
cgggggaggggtatacgcagtttccgtgcggaaagatggtgtctttccttcacagggctgcgcgggcacccatccccgctgcaaagcgcccgggccaggcgcggcttgctccgggtcggggcgagctcgctgccctctgcggcagacagcgatgcgcgctccccgccccagctcccggctcgcccggcggcccgcgcgccctcccggtgcagcatgcgggcgctgtgacgttctcggataaatgccgtgtaactgtgtaggcgaatgagagctaaaaataagaacggaaaatctatcattaaggtatcattgcgccagcgcagctatttgaaggctcccatggtccccggcgcctgcgtttgaagcccgccttcaggctttggggggtatttgcagaaaactcccagcagcggctcgccaaccagacctcagggtgcacggggggtggcgccggtaattatggcaactctcaaaataaaataatataaaataaagtaaccaacgttcaccaaccaccaccccatctcaccccctgtactgtcctcaggtagctggggaagccgccgggagtgcagccggatgctggaattcaatgtgacccggctgactatgcaaagactaggactggacgcttttgcagctctatttcgccacccaccttcctccttccacctcgtattagaaataaagtggggggggggggcgagcctttggaggagaaaatgacaactggcacttaaccccaggtctacagtgcgccgcggtggggcgcaaagacgcaaactcccgggatggcgagccttcggggtttcattgggttaaacgaaaattgatctgatttgctttttaacatccgagggagagaaggggagatgaggggagggagggcagggtttgagtgtgtgcgtgtgcgtgtgcgtgtgtgtgtgtctggggagggggaggaggcaccaagttgcagcctgcgcgcggctctgcgcctcggcggggctgcgtgcgtgtgtccctgtccgcgctgctgaaacgggctcttcgagggatcggcgtcacatgactccgcctgcccctcgccagcgcgcagatcgccagtccctcagtttgcccggcaccggaggagggtcgggcggcatcttccgggtactggggctctgcggagcggagaagaggttccagcggggaatggtatatctggattcaagaagccgcggctcggcgccagatcctggagtgtagatatttggggggaggggagagctagagggagcgagcgagcgagcgccagagagaggcagcgcgcagcgcgcacggacggggggctgctgcgcggagaagatgtaagcgcgtggggtctcgctggcctctgagcaccatgcagaaggggatccggctgaatgatggccacgtcgcgtccctgggactgctggcgcgcaaggacggcacgcgcaaaggctacctgagcaagcggagttcggacaacacaaaatggcaaaccaagtggttcgcgctgctgcagaacctgctcttctacttcgagagcgactcgagctcgcggccctcggggctttacctgctggagggctgcgtctgcgaccgcgcgccctcccccaagccggcgctgtcggccaaggagccgctggagaaacaggtgaggcgagcgtcgcgtcctgacctccctgcgtcccggccgcggccctgggggctcagggccttcggctggctgatggcgcttgaactttggcccctctactcttggcgccctaggcgctctctgcaccctcagcgagaggggaggcttgctcccagccaggcgagtgactgcggcgggcagagggggcagggattgagggcggggagtagatgtgggctgcggctgcccttcgccggacgagccccgtgggaggcgggtacagaggggccgacacctggagatgcagaggaagatggggtcctaaggaccagagacgatgagtctggacacacgtccagccaaaaatggtgctcccaacccccactcccaccgcccagccctaatagccccgatcgtctgttctacaccgggaacgtgtaattccccgcgcttaggcatgggaagggcaagacggaggcgtccgagcgctgccagcccttgcctcgccgcagctgagggcggagagcggtctgcgctagctcctcggagttgggctggggttatggggctacacgggtcggttcggtaccatcgagcggtggtgggctcccagctggcggccgccggagcaacaagcccaaagattcccaaggaccgctctgatgcgccggggctagggccagggctgctgcggaggcagcgggacgaagtgggcgcttctctcctcccccgccccctgcgccgccgccgccgccgcagtcgcggctatagcgctgcg

SEQ ID NO: 7858 - DNA, 1920 bp, Homo sapiens
cgggcgctgccccctgcggccccctccgccgaggcctgtgcgtggcggggttcccaggagcggcagtccgtgcggcctgggggcggccccctccccgcatcgcagcggggcgtgcaaagcgtctgcggctgtagtgtgggcgctcacttcacgtgctcggcggcgtgcgaggagcagtaatacttcttgtgggcgatgaaggtggacaggctgctgaacttgatgttgcaaagacggcagtaccggtggttgccgttgggcagcggcgccggcgtgcccttgctgggagtctggacgcccttgtccgagtaggaggggggcgccggcgggggcggcacggcctcgggcgcggcggccggggacgggggcgggccgggcggcggctcctggggctccgggccgaggccgtcccgggggccacgggacccgggctgcggggaggcggcgggggcgggagcgggcgaggggccgcggtcggccggcgtccgggcctcgacccccgggccggccaggggcgcgccgagcagcaggccgtgcgccaggcggaaatgctccagcaggtccccgcgcaccgggccgttcggggggcagtaggggcaggcggcggcgggcaggccgagcgcgccgggcggtggcgcagcggggcacgagtacttcttgtgcgccaggtaggcctcgaggctgtggaagctcacgcggcaggccgtgcactcgtggtagtcggccagcgccggtgccggggctccggggagcgggcgccgcggcttcttgctcaggtcgatggggccgtcggccgcggggccgggcgagcgcgcaggggcgaggccggggccgcttccgcttccgcttccgggccgcggcgactcgggcgcgggggcgtggccgggcggcggggggggcggggcgccggccgcgtgcagctcgtagagcttgcggcgtctgcgcgtgcgcacaggcgcggcgggagagggggccgggggcgcggccggcccagggggtcccgggggcgcggccggtcggcgcggcggcgggtcgtggcgcgaggcgcagtagtaccgcttgtgcacggtgtaggtctcgtggcggctgaagcggatgttgcaggcctcgcacagcgtgcggctggggtcgtcctccgcgtcgtccacggagctacccgggctctggctgccctcgctgccccggccgcccgcgccgtcctcgggcgtggccgcgcccccagccccctcctcgcgcgctccggggcccggggacgagcgcggcgcgtcgggttcggcgggctggccggggggcgcgcgggccgggccggggggcgccttgggcctgcgcgcggcaggcgcgtcctcgggcgcacggcggcctgaacagtagaggcgcttgtgcacgtagtagttgttgacgttgctgaaggtgatctcgcactcgaagcacgtagcgcccttgggggccccggggaagagcccggtctgcgcgccgccggcgcccgcgcccgcgccctgctgcagccggctgtgcaccagctcggacatcttggccaggatctccgaggcggggggcgccgcgtcgggcccgaacacgtactgcggaaggaacagggccccggccaggcccagctcgccgggcaccgggctggagcccggcgtggggctggacagctcggccttgaccctggccggggcggggctgcgcggcgacggcgtccgcgacggggcctggggcccaggctctccggggcccaggatgggggccgcctccggctcctccaccgcctccaccttgatgctcctgggggccgccgggggctcgctgctgcctccattctgggccagaggctccgctctggcctctccgttggtggcctcggccagggcctttctgtccagtcctggcgatggggtgggcgccaggcccaggtccgcg

SEQ ID NO: 7859 - DNA, 1403 bp, Homo sapiens
cgcccgtccctcccaggcccggtgggaccagacccgaagccaaccctcgccaggcgtcaggtgtagaccccaggccaggccagagcagttcctgggtcttcggaccgggatgcccgccctgcccctcctcctggccccgcccggtctgtcacagggggaggcctcggcctcgcattccgggcagcgaacttcgccggccgaggttagccccgtgcgggggcctcccgcgggaccgaccgccaagcggcattgtccgtcccgggcgcccgcccggttccagacgcaggtcctgcggccgccccgtgacaagcacactgacgggccactgtcctttgacgagtgctaaaaagttcgtttgttttgaacgtcaattttcaagtgatcttcacgaggtttcccctcccggttccttcgctgctgcctcgcccgcactcggtccccagtaggtgctcaagaaacgtccagcaaacggcagcgcaggcgagtctgctctgcgcgctggcgcgtttcactgcccacggatggcgggcgacctcacgggatccccggttcgcaggatccccgcccccgaggctgcctctgggccgggaggggttaccccagaggggcgtccactctcgacggcgggggccggggcgccgcgggcaggggagggcgcagcctccaagcagccccagcctggcctagaccccgcgcctagcgagccggccggccaggcccacaccccccacctgccgcccgccccaggggaagggtccccccgacgacgcccgagcccccctcttcctcggagggccggaggccggcgcccattggccggccctgggcgacgccccgcccctccgacgccacgggccaatgagcgcgcgctgtcagctcatcagccgggctggctgggcggctcgggagcccgagcggtggcggagcggcgagcagcgagcagcgcctgcgggagcggccggtcggtcgggtccccgcgccccgcacgcccgcacgcccagcggggcccgcattgagcatgggcgcggcggccgtgcgctggcacttgtgcgtgctgctggccctgggcacacgcgggcggctggccgggggcagcgggctcccaggtaagcccccgaccgaggtggggggcggcgggcgcggggggctcgggcggccgaggcgcggtcccggagggcttcttccccgcggatcccgagctcgccccgcgcggccccgcgccccctgcctctttgcaaagtaacttctagggccggcccggggcgccccctccccgcagcccgggcggccggggctcctgagtccggcggggccgcaccaggggtgggtgggccggggccccgggaggggaagcgcgagcgcgggagcgaggaagaaaggcggcggttcccggggaccccgcg

SEQ ID NO: 7860 - DNA, 1088 bp, Homo sapiens
cgctgaggggccgcactcacccgcgcaggtaccagcaggcagccctggcgtccgcgggaggcggccgggggcgggggtccctcggtgcccatcgccgcccctgcggctgggtccgcgctccgggccggccgagctcaacgccaggaccccgtccgagcctcccagggccccgccaggcgccgcgtccgcgcccgcgcccctctgccggctccggctcgggctccaccggggcgcagggctggggaaccggagctccgcccgccgacccggagcaccgcccacgcagacccgccccgggcgagggaggggccgggcgcgcacccgcggggagggcggcgagcggggatcagccgaagtcgggagaggggcgcttccacggggcgggaaactggcgcgcgactctgggggaagtgcaggatggggggacaggggcgctcccgcgggggtggatgggggaccatagcggggctggcggggcaggggccggcgcacgaggctggaggaggggagcgcgcgcttctacccgggctgggtcgccgaggtccgcggcgcatcgtggcggcggtgggcggaggggggcggggggcacctcttctcccttgtggcgcaggtgggcgcgctctggaccggcttgacgacccctccccgccgccccacctccctggccaaaggttctcagcttctaatcagggacatttctagtccacagcctcgaagccatgggttctccccggccctctgaagccgccacacctgtgccagccggccgcgtcctcagacctttccccgcggagtcttcccagcacttggagacgcagcgcagggccccgaggacggcctggcccggagaaaagataccgaagctccaactttccccaaccccgctcccctcctccttccaccctcccttcccgcccccaaagctcgggggtcctatccctcctccggtccgcggagtctcccgaaccctgcggggacccggcgctcggcggtgccctcctggggcgcacggggctggggcgggagcgaggagaccaggtggggaggggaccccagatctcagacgccaggggagacggcgtttcccg

SEQ ID NO: 7861 - DNA, 1812 bp, Homo sapiens
cggggtcgctgcgtcttcctgaccactgacggccaggacggccccagccccgctttacctgcaagccccactccaggctcgagcccccgagggcagggatagcttcccgggtcccgaggcttgaccagagcctgaaagctcctgccgggggttgctccgactcagcgaggcgccaggctgcccggcgcggctgggggcgctcagcgccgggaccccagccctgccccggccgcccgctggcccagtgcgcacgctccggcagctcagctccccctcccacggcggcaggagagctcccggcatctgcccggggcgggggcgggggcggggcggggcgggcgccgcgccctcctgcctgactggcaggaagacagaccaatcggaggggctccccggggggaggggcggtgccgtgcctgagccgggcgcgggcgaccgagggagctgcagccacccgcgtgcggcacgcgccggccgcctgcccggatcgcggccaccagtgccgcggcctctcgactcccgccccgccgagccgcgcgcgcgactgccatcctcctcaattgctttttacgattttttttgtgcatgcattcattttctgttccgttttgtcctttttaaggcggtggcggcggcgacagcggcgtaagctcgcagcggggagggggcggccggaggatgcggcgcggggctgcgctcgctacgtccgctgctgctgcccggctcgggcctgagcgccgagcaggtgggtacaggtgcgccggggggcgggaggcgagcgctggccagagggaacccgtggacccggcgaccgaggggcggacctggcggcaagggacgcggcgaccggtgccgccccgccccatcgtccatctccccctcctccggccatcgcgccccctctgggtcccccttccactctcgcatcccacctcagtggtcccccacccttccatacccatcccccactcctcttcagacccccttgcaaaatctcccagccgctgcgtcgcttcccccaacaccccctcccggtcccgcccccagcccccagctctccttcacgccacccctatttccactcttctccggattccgccctcaagccaaggagcgggagggggacccacccggtgcctgccggagtggcgcggggggtgtggccggcccgtcccctccgtgtcttccgcagggtaggtcacagtcccccagatctccgcccaggtggcaaagaagatggagctgggggccgcgccccggcggcgcggggcccgaaggcgaggccgcccagcccgcaccccaccccacgcacggcacacgccgccgcggcccctgccacgcacaccctcgcgctgctccgcccacgtgggcgccggggaggaggctcgagagatgggaagaaaggctggcacccaccctcctgccgggccggcgcgccctgggcgcactggcctccggagatggcgcgcaaggattgactctcgtggtgccagacaccttgccgggcgccctgcgtcggggccagcggcctcgctggcctgcgtcagtgcgctgcggcctcgcctcccagcccctcggtccttcgctccatcccccctgctgtgggctcctgagcatccggcctgggcagcccagatagaggccgcttacgaggctggcgcttcttttcgccttagaagcatcccgctcccacacaccccagctcgccggtctcctgaaggctgggccagcctcggctctccgccagcctctgcccggctctctgagctccagcgatactgtatctaaccgccagccctcctccgccgcccg

SEQ ID NO: 7862 - DNA, 5819 bp, Homo sapiens
cggagggaaaccgggccgacgacaagggtggctatttccgggctcttcgcgcccggcccaagcgtccctgggtggggcagcccaaacggggagaggggccccgtgggccgagggcccgaggccgcagcgagcttagcgtttggccaaatctggctcgcgcgccttcccactgtcctgttagggctgtgtgacctcccggagccctacgtccccgcccaaacagctcccagcgcccctgctggcacccggggcgccctcaccccagctcctgcacccggcgcgccgcgcgcagaccggacggaggggaaagttggcaagagcgcggcgcccgcgggagaaagcgttaatgggcggccgggtgggagcagcgcgctcgctcgcccacgtcacgccggtgcgggctcggctgacgaccgcggcgcctggggacgccggcgcgctccgctcgccaggtgctccgcctggaaatgtctccattagttgtcgccggctccccgctggagcgcgcgcgccgagcttccgcgcggagccctcgcgggctgccgggagcggcccagcgccaccgcaggtaggtgaggtcccccgctcccgcccccgccccggggttccgagacccctccccccttccgaggaggcggaggctccgcgcggccgccgaggggagcgggcggcggcggctgcggcgactccccggtgcgtcccgggctgcgagctgctccccgcggccccggcagccacacggcgcgggcgggagcttccccagctcaggtagggagtgggctccgccgcacaaactttgcgaggattgctcttgcgcttaaggggacaaagtttgctacccgtcgctaggctctccagaggccgctgcgtttgctgcaagttgcgggaagcagggtgcgcgggccggcgcggggcggggggtggggggctcggagtggccaggcctgagtcctggacgcccggacggcgctccgtccagcctcaggccgtacccagggagcaagcggcgggggcgcagcgggagagaggagggagagggccgcgggcccccatggagggcggttgggaatccagagattcaccgcttgtccctgtggctccttctcctaccactggctccgagggggcctcggggctgtgaggaaatgacctgccaacctcgaggttcgccagtgcggcgtcagcgaccgtgaggcctctcaaacccacaccccagccgggtgtcccgagcggtgggcgggcacaggcgcccccaaggtctctggccccaggtctcagaaagaaaggcccttgcctggtgccccgggctcccggcttcgcctttggctggagttaacttctctgggctggaaggagctccctccggacgagctcttggtgcggggaactggtggcccccagggtaactcctgaagcaccagggctaggctggccgaagaagggtcagggcccggcctgtctccccggaggccttccatggttccgacggccaacggtaaccccgtcaaaataggcgacccgcctgcgcttcgcgttaggggctgaccatcccctgcctcccctgcggcctgctccggccctggtcctccgctcttcggagcgctccaggccagcgggagcacctcatctccccgaagctgagccggtgctgtgtactccgggagccggctgacttctggcccacctgctcacgggtgtatttagtaccgggggtccctagagggaggaaggctcagcactccgagtctatgcagacgcgttcagctgatacctgagatgctgagcgtcctatcgttggtgaaagggacactgggtgcctccgctccaggcttggccttttggtgaaggcacttggaaaatattccagtattatctatgggagaagggtggcccagtgagaatccccggtttgggcaggcgggcctaggccaggctacagggtttcagtgagatgtcccggtggtcgccaatccacaggctggattgaccctgtgtcctggaatgagtagtggggcctgggtgaggccgggcgggtcaggaggcctcctgggcagttgcgagcttcccgaggcagggtgactgtgactgggcccggaccccaggcgctggggcctgctggcgggcaggaagtggagcgtgtgtgtgcggcggcctgggaaagccgattcagaggccaggtttctgggtcacggagaaagggtcgcccgctggtggggactggagcgtcgatttatgcacacaggctggaaaggcaaaagagaacaggagaaggtggcggtggtggtcaaaggaagcccccgaaagggcccccacgtactggctgccctgggaagtggaggctgcttctcccagactctgctcagaagatgaatggccgcctgttctggggcttcggctccagttaagccccgccgggtctggaaggaaggaaatgcaccagcctcaggtctgggtgggctgagctgttgcactagagcccagaggtgcagggcataggtggctgggcccctgggccctggctctccccctcagccggcggagtgctcacagtcgccgaggccaggtccccgagtataggtgaggaaaggacaagccacagctgaatgcctcccctctgggggtctctactccccatcccagcccttggcccggctgggctcacacccctccttcagccgggcctcattacctggagagagcgagtagtttgtaaacaataaataatgggaagtagaaggatgctcgggaaaaaccagaaaactgcaaggagtggggaggagggagggtgggagaggggaggaaggagggtgggggaggggaggagcaggaggagagggaaaggggttgagagattcatttctagcgagaaaccccggtggctagtttcttattatttacaggaaggtgatattagcgattcaggtgagaaagaaagaaacgcggcctgccgcgaaatcaatacagaattcagaaacaattattaatgtcatttgactcgtgttctttatatatttctcgcggctaccgacgctaaactgtctgaataatttgcatggagcggctattcattatttccgatggtttccctctgcaagcagctcggacgtggcccgctccggtccaacgcgatcggagaactcgtattttcatctgtaaattaaagcaattacgcagcagatattatatgatgtgtactgtggtctccagatagtcatcaatcaccttcaaccgagctgtcaaaagagcaggcagatttcgtttctgggaggcaggcttgcagctggggagagggcgaggacgtcatcattaattagagggtgaccctggggcgattcacaggtctgaacccaggaatctttctgagcaagtctgcacaacgctgccttgcacggcttccttcccaacttaccacgggaggccggcccagggggcgagggcaaccggggcgagtcccggtcccggagggcgatggcgcagaaggcggggaacgggttcgggatggcccgggcgcccccttgccgcccccttgccgcctgctcactggcctccgctttgaacttgggcaaggtcccagggagggtactggccgagggagtcctggggtgggcgctcggtcccctcttccgattgctccgtgcgccccagacagaaagctgggcaaaatggacaggggagggcgcctccgccaggcacccaacgccccctccctcgcagccagccctgcggggcgccgggagggacgagcttagcgggaggggccggggcctgggttgaggaacctgctcttccgagcgcgcagggccgcccggcagtccccggcttagccgcgaggggcagggggaagccggcggagcacggccggcggaaaggggatcggggaggaaagtcggggaggcgaggtgggggcggtgggctgagcgggaacttaaaagaccgcggtggagaagatggggcgttctccgcgacactcggctgcccagaggtgcaaagccggtgggcgcacgcccggggcggccctacagccctcgggccgccagtctcagggtgtcgggctccaactaaggccccgaagcccccacgcacctgagggcattttgaccagctcttgcgggctgtcttgcggccgcagtgggttctgaaagtccattccggcgtagggtggaaaccggcgggaggcgttgctgattctcgattaaacaatagtgacgagacgcgtgcggggcgcctgcgagccccttcctgccactcggagcagagcgcgccagcgcgaggccgggccggccgcctgcgcagcgccgggctaattttaactgttgattacatcttcagcgtgtcctttcataggtctcatttgtaattgagacgaatgattacagtggggcgggaaggagcagctgctcattaattaatttctaattaaaagtgcctctcgttctcgggtgactaaagagaaacaccgttcgctgggcgatattgactcggatggaatttatttgctaacgcccggaggaatggcccctccgtccaccgcgcggccgggactgtcctggcccctcccggcctgagccgccggcgagtgaccggcgagtctgcggccaggccgggctgcgcgaggtggggctgacgtcagagcctcctccgcttcaagccgcgcacatctgacttgacgggttcgcgcgactcgtttttttttttttctttttcgtaaaatatgtatttctgtcgccgctgcgaggccgctcggtcccagagccccctcgagcctccggaatgcgaagttaaaggaatcgcggcggccaccgctgctcactttgttacccggttagaaaagtttgcggagcgcggggatggactaaccggctctcctgcttcgccctcccagcgcctagaagcctgcagctccggagcagtggccgcgccacgccggccccagcgcgcagaaccctgcaggccccgcccgtccgccccgggccgcgcccgccatgtcctacccgcagtttggatacccctactcctcggctccccaggtaagcggagccccgccccgcccaggccaccgcaggtgccggtagggcggatggggcggggacggggggtggggagtgtccgacctacgactgcctgcggcttccgagctagcaaggcctgggtcgcgcgcccctcacgcccaacccctgctccccaaacccccggggaaaggccgaggcgctaagaaaatccgacgggccgggcccgggttccctgatgtttgaaccacaaggctcaggctgtgccccaggggagtcctaggaccccaaggaacccctggggaaggaggcttggcgcgcaaatggcgtcagaggccttggaaaccctccggggaagggtgtaggtgctcggctgggccccacgtggcggaggaggccagacgcgcacaagctagtggaaaggggcgagcatcctggtgtggacggcgggaggcccgggggtactcggggcacgccctcgtgggcggcgcgcgggattggcaaggcccagggccccagcctccagcccggcttcccgccagtcctcgcggcctctctctgcagttcttgatggccaccaactccctgagcacgtgctgcgagtccggaggccgcacgctggcggactccgggcccgccgcctcggcccaggcgccggtctactgcccggtctacgagagccggctgctggccaccgcgcgccacgagctcaactcggccgcggcgctgggcgtctatgggggtccctatggcggatcgcagggctatggcaactacgtgacctacggctcggaggcgtccgccttctactcg

SEQ ID NO: 7863 - DNA, 2001 bp, Homo sapiens
cgcccccgccccgtgccaagcgggcccaaggcccgaggctcccccgctcacaaccccggtgcccggaacacgtcttcgaggggccgtgctgtcggggttattactcgcgactggacctcgcgccgtgttgctctcctcgggccccgagcccgcccagcggtctgcacggcccaggcctgagctgcgggcttctcctgtggggcgcgctgggagtgagctctatccccaaagcccatttcaacgtcccaggtatgactacgacggcagaggccggccgcccaccctcgcccccttccccggccagagcgcctttgccgggagccgacgaccgcggcctgaccccgggccccaccgcctactcccggctcccgcccttcctccacggtcaggggtcacacacagcggacgccccgttctcagccgcccctctgatctctgaatttgggagccagcgtgtccgctggggcatgcactgccacgggcactgggacccctttgctgctgcggggaggagccccgacggcaggtgggaagacctagcctgcccgcgtccccgctccccagctcctgcgacccgggccgaggctctcagcccctgggcttccccgctccgggtttgagggaggggccgggccttcgggcctgcagacccgccaccgcgcgtgcgcatgcgtcggccgcgagcccccgggtgcaggcctgggcggctccggcccgcgcacttgtccaggcgctgcggctcagcgcgccccaacctccagctcgggcggagagcgggggcgggactgaagcaccgtgttcctcaaagtatcctctcgccgtcggcagccctggcctcgcaaatgctccagcgcgctcaggcgcacgcagagactggcgcggcagcctccgggccaacggcacgcgagcaaagctggttggcgacctgggacacgcagtagaagttgaggctgcaccgactcccgccgcttcgggggaggcatgggcccgggcaggcctaggaggaagctgcacagcccgaggcccgggcgggagtggcgggccgcgggcaagggaacgtatatttggaaggggtcaggacctcggctggagtctggctttttatggcgaggaagccgactgggaagggccctctggcgaggctttcctgttgtgccacttttccccggcagcgccgggcgcggggaacgcggggctgcaccggggcgggggagggggctttacccggcggctccgaggactcgactctggggtcgggcccggcgggtaggcctgcccaggagccagctggcaaatgcagcggactgtcacgttattccactgtcaccacttactgtaaatcactgtcctaagcctccgggagaatccgtcgaacctgagaggggggagggggatgggggtgggcgcgcaggaagccccacaggcaccagggactggtgacccaggacatcagcccctcgagttctctctgggaatttctagcacccagactgtccctgactgtagggaccacggtggggcgtcttccttctaagctctccccgggacaccgggcgcgcccccctcgcccctgggttagcgcacactcctccacgcgatgaccagcacagccactgtgaggcccggccttggccgcgtttgtcctttgcgagtgataataataaaaatcattggaattgcaaggaagcccctggccccggctccccagccgctgctgtcctgggtgtcccggctgcggaaagaccccgcagccgggcccgacccacgagtggaacaccgggctgcggacccagccgggcctacaggactggcgcggggctccggggacaggcctcgcagggccctcctgcgcaccgtctgggacgccgattttgccaacttggaggacaatttttgttttcactctaccagcagatttttaaaaatccagtcgccgctgaaacgtgcttcccacccgtccggtttgtttgtagcctttgacgagccccggcacagcctccg

SEQ ID NO: 7864 - DNA, 1265 bp, Homo sapiens
cggctcgggcgccaggtagaactccagctcgatgctgccgccgtcgggggagagggaatccgttgggagggacagtcgggggctggggaaggaagagcgggtgctgggagggttcaacactggcggagccccaggtggcgacgcgggcggcgagagctgctccgaggcgggggcctcgggcaggtcgctctccacgcagtacacggagcagaagacttgtctcttggcgagggacgggcgccgctgacccagcacgtccaggaccagtccgtcggcggcccccacgcgggtcctgggctccagctcttcgccggggggcgcctcctgctgttcatcccctccctcttttcgatccccagcttcctcctcttcctcctccagctccaactgcagtggcaaggtctggggattgagaggcccggtgagtgccagtcccgcaggctgcgccggtgctcggctcttactccagcccgggggccccaggctcctcgcgggctctggggcgctggtgtccgcgcagccccagtcgcttccgcagccaccgccgctcggctccgcggaggcggcgcgcagcgggggcgcccgggcgctgtccccctgaggcctcgggggctcagggtggcccgcagtgccactggccagggtctgcgactcctggggcccgccgccgccgctcaccgtgctctgctcctcgcccatcgccgcccgcggcccgcgccgccgctgcccatccagccgccgggacccccacccggcgcccgcgggcagcgggggcagtggctcggctcgactcgcggctccgcttctgcttccgggtccttcctcctgggctgggacgccccaagtcccctccggggagcccgtgctccgaggctgcggcgcgtggggagcctggcccggcccgccgctcctcctcgtactctggcgcggcggggcaccgcctcgggggcgccgagggccgctcgctctgggctcgggcgcgcccgccccacatgcagctcggggcggcgccgcagccccagcgagccccaggcgggacagaggggtctgggaggagacggccgtcagtcccgcgccatcaccggtcccggctgccggacgcgcggcccgagggcggtggtcaaagggtcgaggggcctgtggcgccgccgcggcgcgcaccaggaggtgcagccggagcgctggccagccgcagggcccctgggggagaggccggagcgggcgacctccctctccccgcgcttcacctacagccctcctcgccg

SEQ ID NO: 7865 - DNA, 1360 bp, Homo sapiens
cgccgaggatgtggcctccgccccccgcagccgccgcaggagcttctgcctctaaagcggcaggcaggggtctcagcgggcccacttcaacctgggaaggccggtgcgtttccccacagaccccgcagggcgtttcttctggggaccactgaagccctggcatccccaaccccagcccctccgcgccacgggaaacgaagacgacactcttttgaacaatcccggatgtgtcaccacagaggggcattctacactggcccctaccccaacccccacctagcacattgcttgcccacccctcaaaccccgtgcggattgcggtacctagccccgggggaccctccagccctgccttcccgatccgcgtaggtgcgtccgtccacctaagggtagggaggcatgtccctccgggtccctccggccgcatggcttgcctgcccccctggtctcccttctccgcatcaggaggggcgtgagatagctaggtcgacccccaccccggcagtctgcggcgatcggccgccccgagcgcagcgccagacacttgggttggggggtgtcagcctgacgcgcaggaagggcgcagcggcgggagggggcttcatttcagatctgggaggcttgcctggcgccggccctcgcccgctctccgtcggtggaggtcgcggctggcggagaccgccaagccagaggaggggatccgaggtcccggctgggcgaaggttctggagggggagaagacggccgaggcgtggaggggcagccgcggcggggcgacccttacctgctcactgcggggcctgtccgtggggccggggcagactccgcaaaggacgcgcagcctgcaagtccgcggcccgcgcggcgcggggatggggagcgtgtgcgccgaggagcgcgcgccgagccgggtctccgcgcctgtgtggccggctggcggccggggtccgtgtgtccctgcgcggcggcgtgtgcgtgtgcgcacgcggggaccacgctcgcccggagccgccgccgccgccgtcactccctgcccggggccgagcgcagcgccccctttgcccgccccgcgcggcgcggcagtccagcttggctccgtcctgcgggagaggcgccgcctccgccgcgaagccaggctgggcgctggagggaggcgaccgaccaccgcctccccctgctcacttcacaggctggggagggggtgctgcaggccaatgagcgcccgggggcggggttagatcgagggcggtgcggtggggggcgcggtggggggcgccgggctgctcaacccgaccccacccgcagcacagactggagcaggagctgcggcgggaaatcccagcggcgggggtcgggggcg

SEQ ID NO: 7866 - DNA, 362 bp, Homo sapiens
cgcgggggtcaccgcgcccgcgaacgcagagtccacacgtggattcccgcgcctgtgatgccccgacccgtcccgggtccccgcacagacaatgccgcgcgtccttcccgcagccactccgggacccgcgccccgcgccgcccggacgtccccctgcgtctgccggggacactcaccgacaccaggaactccagcgtgcccacatagtcccgctcggtcttctggagctcgctgagcacgcacacgcgcaggcgaagctgcttctccaggtccttggcgctctcggcgcggctgtctccgcggctgtcctcgctcatggtcggcggcggtgcgcagcgcggcgctgcccgccgtgctgagcg

SEQ ID NO: 7867 - DNA, 2566 bp, Artificial Sequence
  Description of Artificial Sequence: Synthetic polynucleotide
ygttgggygatgagggatygttgggtaattgggggtataggatygggtttygttgggttyggggtagaagygtygaagtttygattyggaaygyggtgattttattaaygtagaagttygygtagtygagtagaggagtttttygtaggygattttyggatagaygtttttgygyggttygygtggtttagtttygttttaggaaatttttygygtagttttygttttatgygtttttatttagttttttttyggggtygttttttttttaaagtagtttttygggtttattgggygttttygtaatygggtyggaatttygaayggtttygygtgttattyggttattttggtaatattattyggyggygttyggyggtttaattttagtttgyggtttttttygagtttttygtaaggtggggatygggaygygatyggggatggggaagggggttgtaggaggtttygtttgygttgtygtttttgttgggtatagygttttttattattygyggygatttyggttttygtaaggtggggyggygagtaggagtyggggttaggttaggggttygagttttygttygaggggyggggaaggygggtgaygtgagtygggtygggygggyggagttgggatyggtttygggaggygggggygagygygyggagaggtagaygygaggagggaggyggttgagtagygygggyggttttgyggygggygyggtgggygygggyggyggggtttygggattttygygygtttttttygygyggygtygtygtygygygtttttaygtttygygttttayggygttttygtttygygygtttttygtgttygttttttgttagttttygggtygyggtygtttgtagagygagygtttagayggagttttygggtaatttgagtggygtygatyggyggyggagtttttggtagagtttttygattyggtagygyggaggggattygygttygttygygtygygttattttaaattttaagtagygtygttttatyggygyggagtttyggttggaggtaagagtygygygtygggagataygtatygtgagyggtagygtygtyggttttttttttygtygtttyggagggygaagtygyggttttttagttttttgttgygtygygatagygtyggaataygtttygtttygttgtygttttygttgtgtygtyggyggagggggtygygagtttygygtttyggtyggaggatgtgygttttygygggtygtttagtttgagttatgygttttaayggyggyggygygtyggtyggtatggagtttygygyggtygygttttgattygttgtgygtttygyggtyggygggyggygggaggyggyggatygagagtyggagatyggygtygygggayggaagygagygggygygggygtygygtagatggtttgggygagttaggtttgaggtttygtttttygaaaygtgattatgtggatttaatagtttttaggatttaggtgagygattyggtyggygtygggtgygtgtgggygygtgggtgttaggttgggyggaagyggygtttttttttatgttgtaaattaagggattttttttygtttttygtaagygggtaayggggtgtatyggtagtyggaaaggggygttygttyggagtttggagtagtatygyggttttggyggggagyggtygggtttttagggtttygygygttyggggtyggggtagyggygttygttttagtaattygggaagtggggtyggttaggygygttygtagttttaggagttagtagygtagtgttttggtyggttgtttyggygygtttttttttyggggttyggggygaggygtyggtygttgggygyggygggygygggggtyggggttgtyggggaaagttaaagtttygggtttttagygagagtttygtaggyggagttggaggaaattatagttaaatagttatttygttttttttttttttttttyggggtttyggggttgagtaggggttttttaggtttttagttgtygatttagttgtttgygggtgattttygggttygaygggygtttatagttggygggtagttggggygggagagttggggtttttggggagtttyggyggttatttygttgtaaatatataygtatataygttygtyggygygttyggggtttgtttgtgtttgggattttagggttagatggaagagggggttygagtttagagttygtggtgggggtgtttagaaagatttttttyggtaaattttgttagttygtyggggttttygggtttttttggtttttgtttggggtggtttagggtttattagagtatagttgtygtttttgttgggtaggttgtttttgagttttygtttttttgtyggggtatttatygagttygtgtatttgggtttygggttggaatygygagyggggaggatagaggtggaggyggagagtagygtgyggttttygagtttgtttattgggatgtattgygttttygygttggggayg

SEQ ID NO: 7868 - DNA, 572 bp, Artificial Sequence
  Description of Artificial Sequence: Synthetic polynucleotide
ygtttaagaagtyggggttttttttggttaygygttttygggggygttygygttttttaggttttggttgtttgggygtygattttygggaygygtyggtygatagtaggggaggyggtagtagggatygtagtagttttygttttygtayggttygtygggtygyggtgagtaaggygggtaggygyggygggaggygttygaygtttatttygggtttggygttttttttyggttattaygyggygtygtttttygggattttttagttttyggagtttygygygtttagagtygttyggagygygggyggggttagtttgggtagtygygggtygttgttgygtyggaagttttygtygttagggagttttttgggygttaggttttgggtttttgggygaagtygaygttagaatatgtttggtttygtatttagtttatygtatttttagygygygtgggtggggggygtyggttgaggtggggagggtatagtttagttttaggttatagtgtttygggyggggtagygyggtgyggggtgaaygttatyggttyggyggatagyg

SEQ ID NO: 7869 - DNA, 989 bp, Artificial Sequence
  Description of Artificial Sequence: Synthetic polynucleotide
ygtggtgtgtgtgtgygygygygagtgtgtgagygttaggggtygttygttygtygyggtttttygtgggttggtygggttaatgagygygyggttgtaggggyggygggyggggagggggygtygagttttgyggatggaggygygggtagygyggygygtttatttygygygggygttgttggyggggggyggygtagttattggattyggatyggggtygygattyggggtggygggtggygtgggyggygttyggggttgggatgygtygggggtttagtggyggyggyggygttggyggtggygtyggyggttgtagggggaygagttagygtygyggygttgggagttagttgagttyggtyggygagyggaggyggtagygtaggtagagyggyggyggtagygggagttygagygttgygygtttattatggtygtttagggagagttyggttatttggyggygtagtyggatttyggttttaatagygagygtagtatygattttttagtgttyggtttygaggaygatttggtygtyggggygattttgtatagttyggagtggagygaggagygttttygygtggataggaagaaatttgaggttatgttataaggtaggtatttttygtgttttyggatttttygattgagtttttaattttttttyggatatttttatygygygtttyggygttygttattttagtttayggtyggtyggtttagttttaggttygttttttygyggagtyggaggatatttagggattggagatttygygggattttttatttttttaygttttttagatttttaggygttgggggttttgtgygaatttgattggttttagaaaagtygaaggtygagtttgtattggygygtttaagttgygttttggattttggagatgttaattttagttyggatatttgggttgtgttattyggattattygggtygtatagagtatgyg

SEQ ID NO: 7870 - DNA, 2400 bp, Artificial Sequence
  Description of Artificial Sequence: Synthetic polynucleotide
ygaaggtgtygttagttttagtgtyggtgggygtttgtattaggaatagttaaagtygaygatatttagttatttygagygttagggaagaygtttygygtaaaatygyggttttaggyggattttygttttagtttygygttgttggtggtattttyggggatttaaagtgggtggtttgggggtaaaggaatagaggtygaagaatttggggtatgttttattagagtatttaagggayggagtgggaggttatattagatatgygatttygatatattttaaaagtggtagtttygtgggttatttttaatagtgggatggatttttttaatttttttygtttttygaagtttttttgttatttygggttatgtttttttttygggatttttttgtgtaaaattatttttttttttgtttaaaggattttttttttttttttgattttaygaatttatttttttaataggtttttaaagtatgggyggatgtgttttttttygtttatygttaggagtygagtttyggtaggtgagyggtgtaaaataygtatttagttgtttttagtttttttygttttygttgagttggttgtttttatttygtattayggtattygagtttgtgagttttygatttyggttttagtygtagtygttaataattttataataaataagaggataggattgagygttygygtttyggagygtattggttgggggtaattttttattttyggygygtygttygttgtttygattygagagtatygggagagtygagggaagggaaggyggygaggggaaggtaggyggggatggagggaggtayggygyggygyggagygaggaggtgggttgtaggggaygtygagaagyggtggggttggygtagagggygggygttyggggygygygttattttygttttgttttygtagtggtagtatayggtttataggtatttgagygttygttagagtaagatgatgaagaggttttygaagaaagttattatggaggaggttaggaaagtttattatatgygttggtttyggttgtygtayggtatttttatggttatygggatgatgagygtatttattttgggttygtggattgaggaygaggaggaagaggaggaggaagaagaagaagaggaagaggaggaggaggaggaggaggaygygtttaggttgagatggttygygtggatattgttatttattttaagattgttgttttygtygtygtygtygtygtygttgttgtygtygtygtygtygttattatttgttatagttagtaaygggtagtyggygtaggggttygggggagtttttttygtygttagygttattttaaatatttattaatagttatattgttgttattgttgtygtygtygtygtygtygtggagygygggaggggggyggggaggygtttgggttyggggygttgtgygygatttggyggggtgygtygagatatatatagygagtygtygtygttygttygggggggagggggatggagtgygygggtagtttttttttttyggttygygtttygttygtttygggttgygttggtttygagygtygagagttagggggygtygygggtygttygygttyggggtttgygtygttttygggttygtttyggtttygygygyggtttygggtgttttyggygtygygtygttygtygtgygttaygggtgtgygttgygttyggtyggtgattttttttttygagygtttttygygyggttaaygagtygtttttygtttattaggtggtaattygttaataatggataatyggtttttttygttygggygtttttgygttagtttttttttttyggttgygttyggtttyggttygtygygttagtgygygttyggtygyggtaggtttatygygttyggtygtyggttygtggtygtttgttagtttatgttttygggattttttagttttgtygttaygtygttgagtttttyggttttygttygttttttttttttgtygttttygattttttttygttttygttttygtygtttaagttttttyggygygygtttygygtttttygtagtygttagtagtagtagttgtagtaattggagygggygyggatttaggaygatttaggygggaggggaggaggttygtygygttggttygtttgggtttygggttgggtaggggtgggtagggtttttyggtagyggttyggtaagygtttttgatttttagggygtaaggtagagygtttttagtttaggygyggggttaggygtttttttttaaggtgttgygtttttagtygagagyggtggggtatattgggaggayggyggggygtttyggttaggtyg

SEQ ID NO: 7871 - DNA, 1859 bp, Artificial Sequence
  Description of Artificial Sequence: Synthetic polynucleotide
ygygatgttagttayggttygyggyggttayggagttattttagtatttygygatggatagtgattttyggygtggygygagttttttgyggtttttaygygggtttgggyggygggtttttttayggtttygtttagatattyggaggtatttgttaaagttgyggaggtggaygatygggygtttaagtaygaattttttygtygaggtayggttgtygggtttygttttgagggtttggggyggygaggatygtyggggaggagggygygygagtyggaggttagagtygggtygggtagggygygtttaggagtaggggagayggygattygggtygaggygggayggggataygttatttgttygtggagygyggggaaggggtgygyggyggyggyggyggyggagtttggygtagagggtagyggtagtagygggagtatyggttygttyggggtyggttagtyggggagatyggggagtagyggggtygygggyggyggggtygaggygagtagtatygggggaattaygattttygygttgagtyggagtagttyggtygagttyggtattatttagatttagggyggyggyggyggyggttttgygtttatyggttagaggagaggttgtygtygtyggggttgttgttgttgtagttgtygtygtygtygttggaatttggygttygtttgtattttatattttygygttgayggyggyggygggggyggygggygttygagatgttgggtyggyggyggygyggtttyggagygaatttatttggtttygyggygyggtygttygtttygtttttgtttygygygggaagtttttttttttttygttygygtygtygtygttttyggattyggttttygtttyggttttygttygttygygttttttttygtyggatttygtttygttttygygtttttyggttttggtyggggtttttttttygttgygtttttggattygggyggtygyggaggaygtgggtgggagagggtygagggygygttyggttgggttttygtygatgtyggttttttggtggtttttggttttttgggatttagygtatygygagggaggtttygggtttygtatttaagggtaagyggaagtygaggtggyggygtyggagttaggtatgtttygttgtttagygyggggttgagggygtagayggggatygygygagtygttttttatttggttttttyggagtttagggygyggagggtattgggttgyggattyggygtaggyggtttyggaygttgttaggygygggyggatttttgttgtataaatgggttaaataggttygtaaggttttygygggttttttggttyggaagttgagtygygggtgtttggtttgaagtttygygttttatagtggttygygggtttyggyggtttttgttttaygttttttaaggtattaggtaggtggttttagggtttttgtttaygatattttttgggtggggtaggattatttttttgtgaattygttttggatgtttttaggtatagtttgtattttttttttttttagtataygyggtttttgaygttgtaygtygagttttttgggatttaggaygaatygggttttaaggattttygtttygttyggattataygtaggtagygtyggtygagtygagtttgggttygtattggttaygygtagttatygttagayggygttagttttttttygttgtagattttgtttyggaggtygttagttttttttttatttygggtttatagttttagtgtagtttttggygaygygygttgatagttgggtagagattttygtgyg

SEQ ID NO: 7872 - DNA, 902 bp, Artificial Sequence
  Description of Artificial Sequence: Synthetic polynucleotide
ygattttagaattygttttttatttygagttygtttttygtygttttttygtttttgggagggyggttttattaattttygygattygggtygtttttggyggttttgatttygttatttygtttygyggygggggtttgggggtgaggggygygttttggggtagaggattgygyggtagggtttgttatagggtagaggttagggtttttygggaaaaaggtaggygtatatatgtttttttttttgggaaaagayggggaggggggttttttttgggagattttaggtttygaaatttttygttttttatttttyggttttygtattttttttttttttygttaygtatttttttttttttttagttatttgttttatttygtagygtygygataaatayggttttagttygttttygtttttgtttagttttttttttaagtttyggggagtgggggagtgagtagaygttttttttttaggaggtyggaatttttgtttttattttttatyggggttyggttggttagaggtaagtttygagattttttattaattattattatygttgygagggtyggtgaggttgtagataaygtttgtaaggaygggagtyggggagggtgtagggygagtttaaaggaygggtagagtaagtttygggaagaggtaggggttttttttttygggtygtygtttttygtattttyggagttagtygtagttaygtagygtygtttgtygggtatattaaggatttggygygtaygtggygtttatttttattttygggttygtttttggttygygtttagtttttttagattattygtaaattgaggatttyggatatagagtgtagagatttyggtaagtttattgaaagttagtygaattyg

SEQ ID NO: 7873 - DNA, 2044 bp, Artificial Sequence
  Description of Artificial Sequence: Synthetic polynucleotide
ygaaayggtagaggtyggtagttygyggtttaygtgtatttgtttagggaatygttttagygaaatttgattyggatyggaattttttygtagtatagyggtygtgtttatyggaatggaaygttataagttgttatttgtattttttttttagttttgatagggaataygygttgtttttaygtttatatygatattyggatttttatttagttyggttagagttttaggggttagggattagtgtagggagaaggttttttattttagtttttaggatttttaattatagtttattygtttttattttgttyggttttaggtttagtygaatttatatgttttygtagtgtygagygttattatttatagtygttttttaaattgtgatttttatttgggagattyggaattatttaggattttggtgtggggggtagtattttttatatttgtttttygaaaattgttatggagtagtygygtttyggygggtaggtgagggggtygagtttattagygtygtagtttygttgtttattttttttagygtyggttgtygttttygggtagatatygtyggttttgattttggggttgatatygttaaagggtagttagtgttygtttaggttatttygggaggtttaggggtayggygaggggtyggggaaaggygatygtttattatagttygygygtttagattgagggaggagtygggttgtagaatyggyggyggatggagaygggagggaggttgygaggtygttygaggagagattaaggttttagaaayggagaagygggygttttgygggaggyggyggygttgtygttggtygttaagggygggaagtgttttgggatttttattaggggtygygagtttygagygttaaattttygyggygttygtttagygygttgttgtggygggygyggagggygygygtyggtagtgggggttgyggyggyggagggtaygggttttygtttagygtttttatttttttggtgtagttgtttttygygagtygagatatttttgttagggaagaggagygtttyggttgtttttttagagttttttgttggggggatatygtttttatgaagaaaatttttaaataaattttagtttaggaggaggttataygattatgttygygggttgtyggtyggaggggygaggaygygygggyggaggygyggttgtygtgtttaggtagggagtygagtttygggtgttygtygygygtttttygtyggggttatgtattttygtttgygttygatatygygggttggaggygagtgtagyggygatagttygttagygtygyggttygtttygtttygggttygtttttttygtttygggygttttgygtyggggttygttttygtagttttttttagtttttttttagtttgggtttttttagtttygttttagtttgtggygygtttggygggygtttttttatatatgttagtatatyggttatyggttgattttttyggtttgtgatttygygtgggtgtagttygtaggagtttatyggtttgtgttaygtaygggggtttttagtgtayggataygygtttttttygttatttgtttatttttattagattttattttttttygygtygtgttygyggyggaaggygtttttgtagygygtgtattygyggagyggtggygattttagtttgagtagaggagttgtagtgatttttgtttygtttttagyggattgyggagggaattttttattttattttattggggatagggtggtaygtygtagagtgtygtagttgtataaatttggaagtttatagtatygtttgattttttgtgtaatttygaaygttagtttgttygggtaattttgagtgggtttttgtagtyggttatgttagyggtttttgtatatttgtattygyggttttygttgtttgtaggttgtagagaygggggtattttaaaygtgaaagagtaatgaaggaaaatgtagatagagygaggaygtyg

SEQ ID NO: 7874 - DNA, 1152 bp, Artificial Sequence
  Description of Artificial Sequence: Synthetic polynucleotide
ygtttttttygtagagatygttagttgaggttgtaatatttgtttyggtaaagygttttygtagttttttyggtttgttygattyggtttttttygtttttgtttyggttgyggtattattttttggagttaygtttyggygagygggggtygyggagygagggggtygttgtgtygttatttattygagtygttygggttggtygygagtygggattygygagggttggygggttttggttttygaggaygtagatatgtggtttgaattttygtttttttagtygttgtttttgtgtatttttttgggygtttttagygaatgygagyggygaggygagggygagygygtygaggaagggygggagaggygyggagtttggtygygtygygttgygtygagygtygggtttttttygygagtttttygggttygygygygygttttttattgttttygtttttygygyggygygtgttttttatttttygtygygygttttygtattygttyggttttaygyggygygygtttgttttggyggtagyggyggyggyggyggygygttttttttygaaygtygtttttagggttgttggttgygttttttattgtttygyggttgttgttyggggtgggyggygaggygggggggaggtgtyggtttggtygtyggggagggtttatygttygggyggatttttattgygagagygatgygggtttaggygyggygygygggggttgtagggygtttagtattgggggttgtyggygygygggggtttttttttggtttttaggtattygttgttgttgggygtttttygtattttyggttattatggatatttygttttttygtygtttttttygygtatttygggaggtygtyggggyggtagtagyggygyggtttygygggtgtttaggtgatyggttyggtagyggtagagtagtggtagtagtygttattgtygttgttattgyggtygtygtygttggagagaggaggaygaggagggtaaggggtagaagtaggttttgttttgtttgttttagaggttatttygggtttttttttattaattaagygatttygtgtttatttygtaggagaygtttyggtagtttttaatttgtgtgygtyg

SEQ ID NO: 7875 - DNA, 872 bp, Artificial Sequence
  Description of Artificial Sequence: Synthetic polynucleotide
yggagagttgttatygatttttttaaygttttaagttttagttttgtygttygygtttttttttttttttgggttataattttggttttttygggtyggttttaygtagttgygtaggagttygygggggaagatttttygtggggatttygagtaygaygtgygattttaaatttttatattttttttgtygtttygtaggttatatgtatygggagtygggyggggtaggygyggttygtaaggattttygygatggagaygtaatattgtygygattgtatttggggtagtttygtygygttttagtygtttttyggtaggaagygtaggtgtgtgagtygattyggagygagtygygttttygggttagygtgggtagggygtygtagtttgygtagtttygaggatttygygtygttttttygagttagggtttttaggagygggtygygtaggagaygttagagggggttgttagyggttgttgggagaaygggttayggaaatagttttttttaaagtyggggttatygtggggtgggygagttygtttttttaggtygggggygyggattagaggggaygtgtgtagayggtygyggttagttttatttygttygggyggagaygtatagttggagttggagggtygtygttygttgggtttttaggggtttgaaygtttaggggtygyggygagtttattyggagygagttaggtgagtaggtygttatggygatgyggtttyggagagygtaygtttgtygyggtyggtatggaaaygttttygttaggttygggggygtygttgattggtygatttaatagaygygggtgggtagtttagtygtatygttaagttyggtyg

SEQ ID NO: 7876 - DNA, 1070 bp, Artificial Sequence
  Description of Artificial Sequence: Synthetic polynucleotide
ygagyggtggttygatttygggtgtggtaggaaggggtgtttygygttttagagttagtgttagtttttattttttygggaagtygagatttagggggaataggttttttagagtttagtttgtagggaygyggagggtaggagtygtyggygaggagtagttaatttgttatttttggyggttgtatttttyggyggttataggttgttygatagyggattttagggttttygygayggtatttagagtgtttagaagggaggtyggggtyggggtgggtygggaaaatygagggagggaaggagtttggagaagtttygtttaggyggggagggggygattyggggygtatttttygattatgatttttatagattttggygtygtaatttgygttttttgaggtygaagatgygtattttggagaagatatttattaggttgtygttgtagagttygyggtttttgttggggttgtttygttttttgttggtagayggtyggttttagtgttgttttygygtttgtygtttttggyggattaagtygttagygatggtygyggttatggtggtttygggaaygggttyggggagggagggygygggaggayggygagtygggggtatyggaggggaaggyggyggygtagatygtggttygttttyggggtagaggagggggtgttaggygggattggggagaggggaaggggggtttagttttgatygggatttatygtttttttygyggggygyggggttaggygygtagatgygtttagggygtagtyggaygatttygggaagtyggaygtygtggtygtygtygtttggttaygttygagtggagagygggatygyggttgygggygttgttggttatygttygtygtaggaatttyggygggggtygttatygttattygygttgttttttygttttgttyggttttygggygggaggtagagtyggtyggyggtttttygggygtyggttggagggygggtttyggtagggtttttgygygttygtyggttygggtygygttgggtaggatttagygtyg

SEQ ID NO: 7877 - DNA, 395 bp, Artificial Sequence
  Description of Artificial Sequence: Synthetic polynucleotide
ygttgggaagggaaaaayggtttatatygaattggatgtyggatggaaatttttttgygttattagattgygtttagtatagtagatggtaygagtaygtgyggygtttagtttaggttttyggaggtagttgagttggaaatttygayggaaagtatttataagtttttattttgygttggtttattygygtgtaygtttattttttaygygygtttttggtttagaagygtatagatgtttattgtttagagtyggtatygttggggagatygagygatttgygyggygtatagtgyggygttggtagggttttgggttttyggtygggggttygagyggttaagggatgggggtgggggyggggagagtggggggagggygaaagatygtyg

SEQ ID NO: 7878 - DNA, 265 bp, Artificial Sequence
  Description of Artificial Sequence: Synthetic polynucleotide
yggggatatttaggygyggggtaggtgtaggggagggggygyggggtaggggygtaggggtygtygggttygggttggaggtgttygggtygtgggagggagggagggaaggagggagggaggayggygagggagggaggtaggggygggyggygggggatggggttagyggggaggtggaagygatatttatygttygtattggtttttttggtgttgtyggttttagggggggtttttagyggtttttttygygagttyggyg

SEQ ID NO: 7879 - DNA, 1169 bp, Artificial Sequence
  Description of Artificial Sequence: Synthetic polynucleotide
ygggttggygggtattgagttggggttattaygtttttttagagygtttgyggaggtggygaaggtttggagagtataygaggyggaattyggatygagtgagttttttgagtygtttgygtgggaygtagggagagggygaataaygtttttaggygttgaatgtaggggtaaggagttagygagggtggttggagtaggttttgttagttgttattaagtttttttataggtttgggggtttggggttttttggaaagattttttygtygygttgattagtayggggttygttttygtattttgaaggttgtygyggtttttygttatttataattaagtttaagattaaggttgtaagttgaggtyggggtattgataaygggaatgaagttataggggaagaggataattgggaygggttggatttatatttgatattygggaaatttttagagygtgtggtgtttttgttagyggtagttattggtggagttgaggttatygttattgtygtygttggygttttgtttttggaattttttagtaagatggtatttattgtttgttttttttygattagtatttttagtygygttttttttttttygggataygtattagttatatattgtggggagaagatgggttatgtaaatgtaagttaaygygtttttttagttatttttgtataatgtaataggaatagygattygygygtaygaatygggtagtgtgygygtgtgtgtgttygygtgtgtgagygygtgtgttagygtgygttttygygygggygtgygtttgggtggatttttgygtggtttgggaggtaaatygggygtttttttaagtygttttaatatgatttaggtttttaaataygtgaaagyggtagatataatagggatgygaaggaaataaaaaataattggggaagtggtgttaagttatttaggttttgaattgaggaygagtagtgyggtygygtttggggygygttyggaaattatttttagtttgtggyggttattgttttatttaaatttttttgyggggagagttgagyggatttttggggggttggttttgggttagttttaaatttttyggttgtatttygygtggttttatygayggygygtttyggygtagtttttggygygggttyg

SEQ ID NO: 7880 - DNA, 1743 bp, Artificial Sequence
  Description of Artificial Sequence: Synthetic polynucleotide
yggtgggtygggggygtggygagattttgttttagtggagggagggtttatgtattgtygagaygtygattattagattttgattttgtygtttttagaaaaattattggtagaagattyggattatggttaatttgtyggttataagtttttttaagaagygttaygtttgggtgtagttggtagggtatattggtgagtagtggggygggtgggygggtgttygygaygggaaggggttgggyggygttgayggatgtyggtttttagggagttttaaggyggygggtattagygggttgattttgaagygttgttyggagtyggagygttattgtttggygyggttgatggttgaygygttgygyggttgygtgtttgttttttayggygtggtggagygygayggygaaagttatttgtagttgtaggatttgttygatggtttygayggattttgtgtgttygattgtaaaatgggygttaggtatgygtgttttgttaggtyggttggggggattaagtaggggttyggggtygggatagttgtttgagggggattyggggygagtgttygaaggggttttygtgtgygtttttttatgttttggtygttgtttgygtttttataggatttatttagaggaggagttgattaaggttygtgagyggtttaagttgyggaaggatatgtataagaaaatgttggyggtggattttgaagtttttayggaggaggagtaygygtagygygtygttattaagtygygttatatgtagtggygggaaggtattagttttagtattattttyggttttygtatygagggtattaaggtgaggtaggygygtttygttggtatygtygtagttttattgygygttgtttttttygatttttygttttygtttygtttgttttttygtttttttttatygtttygtygttttttgtaattgggaggtatygttgttttaygttgtttttttttttattggygggttyggggtttttgatatttttgttttatatttagaaagyggayggtttttgtagtatygattttaagattaygygaagtygagagtaggtgtttygygtttttgaagagtttgtgtaaggagatgaggaagtgttggtgagagygggattttaaattttgaggtgttggggagtttgaagtygaggattgtttttgttatttggtttagtgttttyggttgtgtttttattatggtttttatygygttggttygtaattgttttaygtttttttttttttgggttaygttgggyggggttttgggttttttttttggyggtatttgttaagtatagygtgggtttyggttttttatygttagtaggggtttatttggygtttagttaatttgttttttttttttattttattttttgtagaggyggtatttgaatygtttgtagtagattygggatattttggaggtattygagttttttaggaggtaygaggtaagyggyggttgttygggtgttygggtygygagggttagggygggaattyggtaagggygtttttgggtagggtygyggtttgayggtgyggggttygtaggtgatyggtagttygtttttttttgtgtaygattattgttatygygtyggygtgtggtttatygatttyggtaagattaygttttttttygatggttagattttggattatyggyggttttgggaggagggtaatygygaggayg

SEQ ID NO: 7881 - DNA, 2405 bp, Artificial Sequence
  Description of Artificial Sequence: Synthetic polynucleotide
ygtagygttatagtygygattgyggyggyggyggyggygtagggggygggggaggagagaagygtttatttygtttygttgttttygtagtagttttggttttagtttyggygtattagagyggtttttgggaatttttgggtttgttgtttyggyggtygttagttgggagtttattatygttygatggtatygaatygattygtgtagttttataattttagtttaatttygaggagttagygtagatygtttttygtttttagttgyggygaggtaagggttggtagygttyggaygttttygttttgttttttttatgtttaagygyggggaattataygttttyggtgtagaatagaygatyggggttattagggttgggyggtgggagtgggggttgggagtattatttttggttggaygtgtgtttagatttatygtttttggtttttaggattttatttttttttgtatttttaggtgtyggtttttttgtattygttttttayggggttygttyggygaagggtagtygtagtttatatttatttttygtttttaatttttgttttttttgttygtygtagttattygtttggttgggagtaagttttttttttygttgagggtgtagagagygtttagggygttaagagtagaggggttaaagtttaagygttattagttagtygaaggttttgagtttttagggtygyggtygggaygtagggaggttaggaygygaygttygttttatttgtttttttagyggttttttggtygatagygtyggtttgggggagggygygyggtygtagaygtagttttttagtaggtaaagtttygagggtygygagttygagtygttttygaagtagaagagtaggttttgtagtagygygaattatttggtttgttattttgtgttgttygaatttygtttgtttaggtagtttttgygygtgtygtttttgygygttagtagttttagggaygygaygtggttattatttagtyggatttttttttgtatggtgtttagaggttagygagattttaygygtttatatttttttygygtagtagtttttygttygtgygygttgygygttgtttttttttggygttygttygttygttttttttagtttttttttttttttaaatatttatattttaggatttggygtygagtygyggttttttgaatttagatatattatttttygttggaatttttttttygtttygtagagttttagtattyggaagatgtygttygattttttttyggtgtygggtaaattgagggattggygatttgygygttggygaggggtaggyggagttatgtgaygtygatttttygaagagttygttttagtagygyggatagggatataygtaygtagtttygtygaggygtagagtygygygtaggttgtaatttggtgttttttttttttttttagatatatatataygtataygtataygtatatatttaaattttgttttttttttttttatttttttttttttttttyggatgttaaaaagtaaattagattaattttygtttaatttaatgaaatttygaaggttygttatttygggagtttgygtttttgygttttatygyggygtattgtagatttggggttaagtgttagttgttatttttttttttaaaggttygttttttttttttattttatttttaataygaggtggaaggaggaaggtgggtggygaaatagagttgtaaaagygtttagttttagtttttgtatagttagtygggttatattgaattttagtattyggttgtattttyggyggtttttttagttatttgaggatagtatagggggtgagatggggtggtggttggtgaaygttggttattttattttatattattttattttgagagttgttataattatyggygttatttttygtgtattttgaggtttggttggygagtygttgttgggagttttttgtaaatattttttaaagtttgaaggygggttttaaaygtaggygtyggggattatgggagtttttaaatagttgygttggygtaatgatattttaatgatagatttttygtttttatttttagtttttattygtttatatagttatayggtatttattygagaaygttatagygttygtatgttgtatygggagggygygygggtygtygggygagtygggagttggggyggggagygygtatygttgtttgtygtagagggtagygagttygtttygattyggagtaagtygygtttggttygggygttttgtagyggggatgggtgttygygtagttttgtgaaggaaagatattattttttygtayggaaattgygtatatttttttttyg

SEQ ID NO: 7882 - DNA, 1920 bp, Artificial Sequence
  Description of Artificial Sequence: Synthetic polynucleotide
ygyggatttgggtttggygtttattttatygttaggattggatagaaaggttttggtygaggttattaayggagaggttagagyggagtttttggtttagaatggaggtagtagygagttttyggyggtttttaggagtattaaggtggaggyggtggaggagtyggaggyggtttttattttgggtttyggagagtttgggttttaggtttygtygyggaygtygtygtygygtagtttygtttyggttagggttaaggtygagttgtttagttttaygtygggttttagttyggtgttyggygagttgggtttggtyggggttttgtttttttygtagtaygtgttygggttygaygyggygtttttygtttyggagattttggttaagatgttygagttggtgtatagtyggttgtagtagggygygggygygggygtyggyggygygtagatygggttttttttyggggtttttaagggygttaygtgtttygagtgygagattatttttagtaaygttaataattattaygtgtataagygtttttattgtttaggtygtygtgygttygaggaygygtttgtygygygtaggtttaaggygtttttyggttyggttygygygtttttyggttagttygtygaattygaygygtygygttygttttygggtttyggagygygygaggagggggttgggggygyggttaygttygaggayggygygggyggtyggggtagygagggtagttagagttygggtagtttygtggaygaygyggaggaygattttagtygtaygttgtgygaggtttgtaatattygttttagtygttaygagatttatatygtgtataagyggtattattgygtttygygttaygattygtygtygygtygatyggtygygttttygggattttttgggtyggtygygttttyggttttttttttygtygygtttgtgygtaygygtagaygtygtaagttttaygagttgtaygyggtyggygtttygtttttttygtygttyggttaygttttygygttygagtygtygyggttyggaagyggaagyggaagyggtttyggtttygtttttgygygttygttyggtttygyggtygayggttttatygatttgagtaagaagtygyggygttygtttttyggagtttyggtatyggygttggtygattattaygagtgtayggtttgtygygtgagtttttatagtttygaggtttatttggygtataagaagtattygtgtttygttgygttatygttyggygygttyggtttgttygtygtygtttgtttttattgtttttygaayggttyggtgygyggggatttgttggagtattttygtttggygtayggtttgttgttyggygygtttttggtyggttygggggtygaggttyggaygtyggtygatygyggtttttygttygttttygttttygtygttttttygtagttygggtttygtggttttygggayggtttyggttyggagttttaggagtygtygttyggttygttttygttttyggtygtygygttygaggtygtgtygttttygtyggygttttttttttattyggataagggygtttagatttttagtaagggtaygtyggygtygttgtttaayggtaattatyggtattgtygtttttgtaatattaagtttagtagtttgtttatttttatygtttataagaagtattattgtttttygtaygtygtygagtaygtgaagtgagygtttatattatagtygtagaygttttgtaygtttygttgygatgyggggagggggtygtttttaggtygtayggattgtygtttttgggaatttygttaygtataggtttyggyggagggggtygtagggggtagygttyg

SEQ ID NO: 7883 - DNA, 1403 bp, Artificial Sequence
  Description of Artificial Sequence: Synthetic polynucleotide
ygyggggttttygggaatygtygtttttttttttygttttygygttygygttttttttttyggggtttyggtttatttatttttggtgyggtttygtyggatttaggagtttyggtygttygggttgyggggagggggygtttygggtyggttttagaagttattttgtaaagaggtagggggygyggggtygygyggggygagttygggattygyggggaagaagtttttygggatygygtttyggtygttygagtttttygygttygtygttttttatttyggtygggggtttatttgggagttygttgttttyggttagtygttygygtgtgtttagggttagtagtaygtataagtgttagygtayggtygtygygtttatgtttaatgygggtttygttgggygtgygggygtgyggggygyggggattygatygatyggtygttttygtaggygttgttygttgttygtygtttygttatygttygggttttygagtygtttagttagttyggttgatgagttgatagygygygtttattggttygtggygtyggaggggyggggygtygtttagggtyggttaatgggygtyggttttyggtttttygaggaagaggggggttygggygtygtyggggggattttttttttggggygggyggtaggtggggggtgtgggtttggtyggtyggttygttaggygyggggtttaggttaggttggggttgtttggaggttgygtttttttttgttygyggygtttyggttttygtygtygagagtggaygtttttttggggtaatttttttyggtttagaggtagtttygggggyggggattttgygaatyggggatttygtgaggtygttygttattygtgggtagtgaaaygygttagygygtagagtagattygtttgygttgtygtttgttggaygttttttgagtatttattggggatygagtgygggygaggtagtagygaaggaatygggaggggaaatttygtgaagattatttgaaaattgaygtttaaaataaaygaattttttagtattygttaaaggatagtggttygttagtgtgtttgttayggggyggtygtaggatttgygtttggaatygggygggygttygggayggataatgtygtttggyggtyggtttygygggaggttttygtayggggttaatttyggtyggygaagttygttgttyggaatgygaggtygaggtttttttttgtgatagatygggyggggttaggaggaggggtagggygggtatttyggttygaagatttaggaattgttttggtttggtttggggtttatatttgaygtttggygagggttggtttygggtttggttttatygggtttgggagggaygggyg

SEQ ID NO: 7884 - DNA, 1088 bp, Artificial Sequence
  Description of Artificial Sequence: Synthetic polynucleotide
ygggaaaygtygttttttttggygtttgagatttggggttttttttttatttggttttttygttttygttttagtttygtgygttttaggagggtatygtygagygtygggttttygtagggttygggagatttygyggatyggaggagggataggattttygagttttgggggygggaagggagggtggaaggaggaggggagyggggttggggaaagttggagtttyggtatttttttttygggttaggtygttttyggggttttgygttgygtttttaagtgttgggaagatttygyggggaaaggtttgaggaygyggtyggttggtataggtgtggyggttttagagggtyggggagaatttatggtttygaggttgtggattagaaatgtttttgattagaagttgagaatttttggttagggaggtggggyggyggggaggggtygttaagtyggtttagagygygtttatttgygttataagggagaagaggtgtttttygttttttttygtttatygtygttaygatgygtygyggatttyggygatttagttygggtagaagygygygttttttttttttagtttygtgygtyggtttttgtttygttagtttygttatggttttttatttattttygygggagygtttttgtttttttattttgtattttttttagagtygygygttagtttttygtttygtggaagygtttttttttygatttyggttgattttygttygtygtttttttygygggtgygygttyggtttttttttygttyggggygggtttgygtgggyggtgtttygggtyggygggyggagtttyggttttttagttttgygtttyggtggagttygagtyggagtyggtagaggggygygggygyggaygyggygtttggyggggttttgggaggttyggayggggttttggygttgagttyggtyggttyggagygyggatttagtygtaggggyggygatgggtatygagggattttygttttyggtygtttttygyggaygttagggttgtttgttggtatttgygygggtgagtgyggttttttagyg

SEQ ID NO: 7885 - DNA, 1812 bp, Artificial Sequence
  Description of Artificial Sequence: Synthetic polynucleotide
ygggyggyggaggagggttggyggttagatatagtatygttggagtttagagagtygggtagaggttggyggagagtygaggttggtttagtttttaggagatyggygagttggggtgtgtgggagygggatgtttttaaggygaaaagaagygttagtttygtaagyggtttttatttgggttgtttaggtyggatgtttaggagtttatagtaggggggatggagygaaggatygaggggttgggaggygaggtygtagygtattgaygtaggttagygaggtygttggtttygaygtagggygttyggtaaggtgtttggtattaygagagttaatttttgygygttattttyggaggttagtgygtttagggygygtyggttyggtaggagggtgggtgttagtttttttttttatttttygagtttttttttyggygtttaygtgggyggagtagygygagggtgtgygtggtaggggtygyggyggygtgtgtygtgygtggggtggggtgygggttgggyggtttygttttygggtttygygtygtyggggygyggtttttagttttattttttttgttatttgggyggagatttgggggattgtgatttattttgyggaagatayggaggggaygggtyggttatatttttygygttatttyggtaggtatygggtgggtttttttttygttttttggtttgagggyggaattyggagaagagtggaaataggggtggygtgaaggagagttgggggttgggggygggatygggagggggtgttgggggaagygaygtagyggttgggagattttgtaagggggtttgaagaggagtgggggatgggtatggaagggtgggggattattgaggtgggatgygagagtggaagggggatttagagggggygygatggtyggaggagggggagatggaygatggggyggggyggtatyggtygtygygttttttgtygttaggttygtttttyggtygtygggtttaygggttttttttggttagygttygtttttygtttttyggygtatttgtatttatttgttyggygtttaggttygagtygggtagtagtagyggaygtagygagygtagtttygygtygtatttttyggtygtttttttttygttgygagtttaygtygttgtygtygtygttatygttttaaaaaggataaaayggaatagaaaatgaatgtatgtataaaaaaaatygtaaaaagtaattgaggaggatggtagtygygygygyggttyggyggggygggagtygagaggtygyggtattggtggtygygattygggtaggyggtyggygygtgtygtaygygggtggttgtagttttttyggtygttygygttyggtttaggtayggtatygttttttttttyggggagttttttygattggtttgtttttttgttagttaggtaggagggygyggygttygtttygtttygttttygttttygttttgggtagatgtygggagtttttttgtygtygtgggagggggagttgagttgtyggagygtgygtattgggttagygggyggtyggggtagggttggggtttyggygttgagygtttttagtygygtygggtagtttggygtttygttgagtyggagtaattttyggtaggagtttttaggttttggttaagtttygggattygggaagttatttttgttttygggggttygagtttggagtggggtttgtaggtaaagyggggttggggtygttttggtygttagtggttaggaagaygtagygatttyg

SEQ ID NO: 7886 - DNA, 5819 bp, Artificial Sequence
  Description of Artificial Sequence: Synthetic polynucleotide
ygagtagaaggyggaygttttygagtygtaggttaygtagttgttatagttttgygattygttatagggatttttatagaygtttagygtygyggtygagttgagttygtggygygyggtggttagtagtyggttttygtagatygggtagtagatyggygtttgggtygaggyggygggttyggagttygttagygtgyggttttyggattygtagtaygtgtttagggagttggtggttattaagaattgtagagagaggtygygaggattggygggaagtygggttggaggttggggttttgggttttgttaatttygygygtygtttaygagggygtgtttygagtattttygggtttttygtygtttatattaggatgttygtttttttttattagtttgtgygygtttggtttttttygttaygtggggtttagtygagtatttatattttttttyggagggtttttaaggtttttgaygttatttgygygttaagtttttttttttaggggttttttggggttttaggatttttttggggtatagtttgagttttgtggtttaaatattagggaattygggttyggttygtyggatttttttagygtttyggttttttttygggggtttggggagtaggggttgggygtgaggggygygygatttaggttttgttagttyggaagtygtaggtagtygtaggtyggatattttttatttttygttttygttttattygttttatyggtatttgyggtggtttgggyggggyggggtttygtttatttggggagtygaggagtaggggtatttaaattgygggtaggatatggygggygyggttyggggyggaygggyggggtttgtagggttttgygygttggggtyggygtggygyggttattgtttyggagttgtaggtttttaggygttgggagggygaagtaggagagtyggttagtttattttygygtttygtaaatttttttaatygggtaataaagtgagtagyggtggtygtygygatttttttaatttygtatttyggaggttygagggggttttgggatygagyggtttygtagyggygatagaaatatatattttaygaaaaagaaaaaaaaaaaaaygagtygygygaattygttaagttagatgtgygyggtttgaagyggaggaggttttgaygttagttttatttygygtagttyggtttggtygtagattygtyggttattygtyggyggtttaggtygggaggggttaggatagtttyggtygygyggtggayggaggggttattttttygggygttagtaaataaattttattygagttaatatygtttagygaayggtgtttttttttagttattygagaaygagaggtatttttaattagaaattaattaatgagtagttgttttttttygttttattgtaattattygttttaattataaatgagatttatgaaaggataygttgaagatgtaattaatagttaaaattagttyggygttgygtaggyggtyggttyggtttygygttggygygttttgtttygagtggtaggaaggggttygtaggygtttygtaygygtttygttattattgtttaatygagaattagtaaygtttttygtyggtttttattttaygtyggaatggatttttagaatttattgyggtygtaagatagttygtaagagttggttaaaatgtttttaggtgygtgggggtttyggggttttagttggagttygatattttgagattggyggttygagggttgtagggtygtttygggygtgygtttatyggttttgtatttttgggtagtygagtgtygyggagaaygttttattttttttatygyggttttttaagttttygtttagtttatygtttttatttygttttttygattttttttttygatttttttttygtyggtygtgtttygtyggtttttttttgtttttygyggttaagtyggggattgtygggyggttttgygygttyggaagagtaggttttttaatttaggtttyggtttttttygttaagttygtttttttyggygtttygtagggttggttgygagggagggggygttgggtgtttggyggaggygtttttttttgtttattttgtttagttttttgtttggggygtayggagtaatyggaagaggggatygagygtttattttaggattttttyggttagtattttttttgggattttgtttaagtttaaagyggaggttagtgagtaggyggtaagggggyggtaagggggygttygggttatttygaattygtttttygttttttgygttatygtttttygggatygggattygtttyggttgttttygttttttgggtyggtttttygtggtaagttgggaaggaagtygtgtaaggtagygttgtgtagatttgtttagaaagatttttgggtttagatttgtgaatygttttagggttattttttaattaatgatgaygttttygttttttttttagttgtaagtttgttttttagaaaygaaatttgtttgtttttttgatagttyggttgaaggtgattgatgattatttggagattatagtatatattatataatatttgttgygtaattgttttaatttatagatgaaaataygagtttttygatygygttggatyggagygggttaygttygagttgtttgtagagggaaattatyggaaataatgaatagtygttttatgtaaattatttagatagtttagygtyggtagtygygagaaatatataaagaataygagttaaatgatattaataattgtttttgaattttgtattgatttygyggtaggtygygttttttttttttttatttgaatygttaatattatttttttgtaaataataagaaattagttatyggggtttttygttagaaatgaattttttaatttttttttttttttttttgtttttttttttttttatttttttttttttttttttttatttttttttttttttattttttgtagttttttggtttttttygagtatttttttattttttattatttattgtttataaattattygttttttttaggtaatgaggttyggttgaaggaggggtgtgagtttagtygggttaagggttgggatggggagtagagatttttagaggggaggtatttagttgtggtttgttttttttttatttatattyggggatttggtttyggygattgtgagtatttygtyggttgagggggagagttagggtttaggggtttagttatttatgttttgtatttttgggttttagtgtaatagtttagtttatttagatttgaggttggtgtatttttttttttttagattyggyggggtttaattggagtygaagttttagaataggyggttatttattttttgagtagagtttgggagaagtagtttttattttttagggtagttagtaygtgggggttttttygggggttttttttgattattatygttatttttttttgtttttttttgtttttttagtttgtgtgtataaatygaygttttagtttttattagygggygatttttttttygtgatttagaaatttggtttttgaatyggtttttttaggtygtygtatatataygttttattttttgttygttagtaggttttagygtttggggttygggtttagttatagttattttgtttygggaagttygtaattgtttaggaggttttttgattygttyggttttatttaggttttattatttattttaggatatagggttaatttagtttgtggattggygattatygggatattttattgaaattttgtagtttggtttaggttygtttgtttaaatyggggatttttattgggttattttttttttatagataatattggaatattttttaagtgtttttattaaaaggttaagtttggagyggaggtatttagtgttttttttattaaygataggaygtttagtattttaggtattagttgaaygygtttgtatagattyggagtgttgagtttttttttttttagggattttyggtattaaatatattygtgagtaggtgggttagaagttagtyggttttyggagtatatagtatyggtttagtttyggggagatgaggtgttttygttggtttggagygtttygaagagyggaggattagggtyggagtaggtygtaggggaggtaggggatggttagtttttaaygygaagygtaggygggtygtttattttgayggggttatygttggtygtyggaattatggaaggttttyggggagataggtygggttttgattttttttyggttagtttagttttggtgttttaggagttattttgggggttattagtttttygtattaagagttygttyggagggagttttttttagtttagagaagttaattttagttaaaggygaagtygggagttyggggtattaggtaagggtttttttttttgagatttggggttagagattttgggggygtttgtgttygtttatygttygggatattyggttggggtgtgggtttgagaggttttayggtygttgaygtygtattggygaatttygaggttggtaggttatttttttatagtttygaggttttttyggagttagtggtaggagaaggagttatagggataagyggtgaatttttggatttttaatygttttttatgggggttygyggtttttttttttttttttttygttgygttttygtygtttgttttttgggtayggtttgaggttggayggagygtygttygggygtttaggatttaggtttggttatttygagttttttatttttygtttygygtyggttygygtattttgtttttygtaatttgtagtaaaygtagyggtttttggagagtttagygaygggtagtaaattttgtttttttaagygtaagagtaattttygtaaagtttgtgyggyggagtttattttttatttgagttggggaagttttygttygygtygtgtggttgtyggggtygyggggagtagttygtagttygggaygtatyggggagtygtygtagtygtygtygttygtttttttyggyggtygygyggagttttygttttttyggaaggggggaggggtttyggaatttyggggygggggygggagygggggattttatttatttgyggtggygttgggtygttttyggtagttygygagggtttygygyggaagttyggygygygygttttagyggggagtyggygataattaatggagatatttttaggyggagtatttggygagyggagygygtyggygtttttaggygtygyggtygttagtygagttygtatyggygtgaygtgggygagygagygygttgtttttattyggtygtttattaaygttttttttygygggygtygygtttttgttaattttttttttygttyggtttgygygyggygygtygggtgtaggagttggggtgagggygtttygggtgttagtaggggygttgggagttgtttgggyggggaygtagggtttygggaggttatatagttttaataggatagtgggaaggygygygagttagatttggttaaaygttaagttygttgyggtttygggttttyggtttayggggttttttttttygtttgggttgttttatttagggaygtttgggtygggygygaagagttyggaaatagttatttttgtygtyggttyggttttttttyg

SEQ ID NO: 7887 - DNA, 2001 bp, Artificial Sequence
  Description of Artificial Sequence: Synthetic polynucleotide
yggaggttgtgtyggggttygttaaaggttataaataaatyggaygggtgggaagtaygttttagyggygattggatttttaaaaatttgttggtagagtgaaaataaaaattgttttttaagttggtaaaatyggygttttagayggtgygtaggagggttttgygaggtttgttttyggagtttygygttagttttgtaggttyggttgggttygtagttyggtgttttattygtgggtygggttyggttgyggggttttttygtagtygggatatttaggatagtagyggttggggagtyggggttaggggtttttttgtaattttaatgatttttattattattattygtaaaggataaaygyggttaaggtygggttttatagtggttgtgttggttatygygtggaggagtgtgygttaatttaggggygaggggggygygttyggtgtttyggggagagtttagaaggaagaygttttatygtggtttttatagttagggatagtttgggtgttagaaatttttagagagaattygaggggttgatgttttgggttattagtttttggtgtttgtggggttttttgygygtttatttttatttttttttttttttttaggttygayggattttttyggaggtttaggatagtgatttatagtaagtggtgatagtggaataaygtgatagttygttgtatttgttagttggtttttgggtaggtttattygtygggttygattttagagtygagttttyggagtygtygggtaaagttttttttttygtttyggtgtagtttygygtttttygygttyggygttgtyggggaaaagtggtataataggaaagtttygttagagggttttttttagtyggttttttygttataaaaagttagattttagtygaggttttgattttttttaaatataygtttttttgttygyggttygttattttygttygggtttygggttgtgtagtttttttttaggtttgttygggtttatgtttttttygaagyggygggagtyggtgtagttttaatttttattgygtgttttaggtygttaattagttttgttygygtgtygttggttyggaggttgtygygttagtttttgygtgygtttgagygygttggagtatttgygaggttagggttgtygayggygagaggatattttgaggaatayggtgttttagtttygttttygtttttygttygagttggaggttggggygygttgagtygtagygtttggataagtgygygggtyggagtygtttaggtttgtattygggggttygyggtygaygtatgygtaygygyggtggygggtttgtaggttygaaggttyggttttttttttaaattyggagyggggaagtttaggggttgagagtttyggttygggtygtaggagttggggagyggggaygygggtaggttaggtttttttatttgtygtyggggttttttttygtagtagtaaaggggttttagtgttygtggtagtgtatgttttagyggataygttggtttttaaatttagagattagaggggyggttgagaayggggygttygttgtgtgtgatttttgatygtggaggaagggygggagtygggagtaggyggtggggttyggggttaggtygyggtygtyggttttyggtaaaggygttttggtyggggaagggggygagggtgggyggtyggtttttgtygtygtagttatatttgggaygttgaaatgggttttggggatagagtttatttttagygygttttataggagaagttygtagtttaggtttgggtygtgtagatygttgggygggttyggggttygaggagagtaatayggygygaggtttagtygygagtaataatttygatagtayggtttttygaagaygtgtttygggtatyggggttgtgagygggggagtttygggttttgggttygtttggtayggggygggggyg

SEQ ID NO: 7888 - DNA, 1265 bp, Artificial Sequence
  Description of Artificial Sequence: Synthetic polynucleotide
yggygaggagggttgtaggtgaagygyggggagagggaggtygttygtttyggttttttttttaggggttttgyggttggttagygtttyggttgtattttttggtgygygtygyggyggygttataggtttttygattttttgattatygttttygggtygygygttyggtagtygggatyggtgatggygygggattgayggtygtttttttttagatttttttgtttygtttggggttygttggggttgyggygtygtttygagttgtatgtggggygggygygttygagtttagagygagyggttttyggygttttygaggyggtgtttygtygygttagagtaygaggaggagyggygggtygggttaggttttttaygygtygtagtttyggagtaygggtttttyggaggggatttggggygttttagtttaggaggaaggattyggaagtagaagyggagtygygagtygagtygagttattgttttygttgttygygggygtygggtgggggtttyggyggttggatgggtagyggyggygygggtygygggyggygatgggygaggagtagagtayggtgagyggyggyggygggttttaggagtygtagattttggttagtggtattgygggttattttgagttttygaggttttagggggatagygttygggygttttygttgygygtygttttygyggagtygagyggyggtggttgyggaagygattggggttgygyggatattagygttttagagttygygaggagtttggggttttygggttggagtaagagtygagtatyggygtagtttgygggattggtatttatygggttttttaatttttagattttgttattgtagttggagttggaggaggaagaggaggaagttggggatygaaaagagggaggggatgaatagtaggaggygtttttyggygaagagttggagtttaggattygygtgggggtygtygayggattggttttggaygtgttgggttagyggygttygtttttygttaagagataagttttttgtttygtgtattgygtggagagygatttgttygaggttttygtttyggagtagttttygtygttygygtygttatttggggtttygttagtgttgaatttttttagtattygtttttttttttttagttttygattgttttttttaayggattttttttttttygayggyggtagtatygagttggagttttatttggygttygagtyg

SEQ ID NO: 7889 - DNA, 1360 bp, Artificial Sequence
  Description of Artificial Sequence: Synthetic polynucleotide
ygttttygattttygtygttgggatttttygtygtagtttttgttttagtttgtgttgygggtggggtygggttgagtagttyggygttttttatygygttttttatygtatygttttygatttaatttygttttygggygtttattggtttgtagtattttttttttagtttgtgaagtgagtagggggaggyggtggtyggtygtttttttttagygtttagtttggtttygyggyggaggyggygtttttttygtaggayggagttaagttggattgtygygtygygyggggygggtaaagggggygttgygttyggtttygggtagggagtgayggyggyggyggyggtttygggygagygtggttttygygtgygtataygtataygtygtygygtagggatatayggatttyggtygttagtyggttatataggygyggagattyggttyggygygygtttttyggygtataygttttttattttygygtygygygggtygyggatttgtaggttgygygttttttgyggagtttgtttyggttttayggataggtttygtagtgagtaggtaagggtygtttygtygyggttgtttttttaygtttyggtygttttttttttttttagaattttygtttagtygggatttyggatttttttttttggtttggyggttttygttagtygygatttttatygayggagagygggygagggtyggygttaggtaagttttttagatttgaaatgaagttttttttygtygttgygttttttttgygygttaggttgatattttttaatttaagtgtttggygttgygttyggggyggtygatygtygtagattgtyggggtgggggtygatttagttattttaygttttttttgatgyggagaagggagattaggggggtaggtaagttatgyggtyggagggattyggagggatatgtttttttatttttaggtggayggaygtatttaygyggatygggaaggtagggttggagggtttttyggggttaggtatygtaattygtayggggtttgaggggtgggtaagtaatgtgttaggtgggggttggggtaggggttagtgtagaatgtttttttgtggtgatatattygggattgtttaaaagagtgtygttttygtttttygtggygyggaggggttggggttggggatgttagggttttagtggtttttagaagaaaygttttgyggggtttgtggggaaaygtatyggtttttttaggttgaagtgggttygttgagatttttgtttgtygttttagaggtagaagtttttgyggyggttgyggggggyggaggttatattttyggyg

SEQ ID NO: 7890 - DNA, 362 bp, Artificial Sequence
  Description of Artificial Sequence: Synthetic polynucleotide
ygtttagtayggygggtagygtygygttgygtatygtygtygattatgagygaggatagtygyggagatagtygygtygagagygttaaggatttggagaagtagtttygtttgygygtgtgygtgtttagygagttttagaagatygagygggattatgtgggtaygttggagtttttggtgtyggtgagtgttttyggtagaygtagggggaygttygggyggygyggggygygggtttyggagtggttgygggaaggaygygyggtattgtttgtgyggggattygggaygggtyggggtattataggygygggaatttaygtgtggattttgygttygygggygyggtgattttygyg

SEQ ID NO: 7891 - DNA, 2566 bp, Artificial Sequence
  Description of Artificial Sequence: Synthetic polynucleotide
cgttgggcgatgagggatcgttgggtaattgggggtataggatcgggtttcgttgggttcggggtagaagcgtcgaagtttcgattcggaacgcggtgattttattaacgtagaagttcgcgtagtcgagtagaggagtttttcgtaggcgattttcggatagacgtttttgcgcggttcgcgtggtttagtttcgttttaggaaatttttcgcgtagttttcgttttatgcgtttttatttagttttttttcggggtcgttttttttttaaagtagtttttcgggtttattgggcgttttcgtaatcgggtcggaatttcgaacggtttcgcgtgttattcggttattttggtaatattattcggcggcgttcggcggtttaattttagtttgcggtttttttcgagtttttcgtaaggtggggatcgggacgcgatcggggatggggaagggggttgtaggaggtttcgtttgcgttgtcgtttttgttgggtatagcgttttttattattcgcggcgatttcggttttcgtaaggtggggcggcgagtaggagtcggggttaggttaggggttcgagttttcgttcgaggggcggggaaggcgggtgacgtgagtcgggtcgggcgggcggagttgggatcggtttcgggaggcgggggcgagcgcgcggagaggtagacgcgaggagggaggcggttgagtagcgcgggcggttttgcggcgggcgcggtgggcgcgggcggcggggtttcgggattttcgcgcgtttttttcgcgcggcgtcgtcgtcgcgcgtttttacgtttcgcgttttacggcgttttcgtttcgcgcgtttttcgtgttcgttttttgttagttttcgggtcgcggtcgtttgtagagcgagcgtttagacggagttttcgggtaatttgagtggcgtcgatcggcggcggagtttttggtagagtttttcgattcggtagcgcggaggggattcgcgttcgttcgcgtcgcgttattttaaattttaagtagcgtcgttttatcggcgcggagtttcggttggaggtaagagtcgcgcgtcgggagatacgtatcgtgagcggtagcgtcgtcggttttttttttcgtcgtttcggagggcgaagtcgcggttttttagttttttgttgcgtcgcgatagcgtcggaatacgtttcgtttcgttgtcgttttcgttgtgtcgtcggcggagggggtcgcgagtttcgcgtttcggtcggaggatgtgcgttttcgcgggtcgtttagtttgagttatgcgttttaacggcggcggcgcgtcggtcggtatggagtttcgcgcggtcgcgttttgattcgttgtgcgtttcgcggtcggcgggcggcgggaggcggcggatcgagagtcggagatcggcgtcgcgggacggaagcgagcgggcgcgggcgtcgcgtagatggtttgggcgagttaggtttgaggtttcgtttttcgaaacgtgattatgtggatttaatagtttttaggatttaggtgagcgattcggtcggcgtcgggtgcgtgtgggcgcgtgggtgttaggttgggcggaagcggcgtttttttttatgttgtaaattaagggattttttttcgtttttcgtaagcgggtaacggggtgtatcggtagtcggaaaggggcgttcgttcggagtttggagtagtatcgcggttttggcggggagcggtcgggtttttagggtttcgcgcgttcggggtcggggtagcggcgttcgttttagtaattcgggaagtggggtcggttaggcgcgttcgtagttttaggagttagtagcgtagtgttttggtcggttgtttcggcgcgtttttttttcggggttcggggcgaggcgtcggtcgttgggcgcggcgggcgcgggggtcggggttgtcggggaaagttaaagtttcgggtttttagcgagagtttcgtaggcggagttggaggaaattatagttaaatagttatttcgttttttttttttttttttcggggtttcggggttgagtaggggttttttaggtttttagttgtcgatttagttgtttgcgggtgattttcgggttcgacgggcgtttatagttggcgggtagttggggcgggagagttggggtttttggggagtttcggcggttatttcgttgtaaatatatacgtatatacgttcgtcggcgcgttcggggtttgtttgtgtttgggattttagggttagatggaagagggggttcgagtttagagttcgtggtgggggtgtttagaaagatttttttcggtaaattttgttagttcgtcggggttttcgggtttttttggtttttgtttggggtggtttagggtttattagagtatagttgtcgtttttgttgggtaggttgtttttgagttttcgtttttttgtcggggtatttatcgagttcgtgtatttgggtttcgggttggaatcgcgagcggggaggatagaggtggaggcggagagtagcgtgcggttttcgagtttgtttattgggatgtattgcgttttcgcgttggggacg

SEQ ID NO: 7892 - DNA, 572 bp, Artificial Sequence
  Description of Artificial Sequence: Synthetic polynucleotide
cgtttaagaagtcggggttttttttggttacgcgttttcgggggcgttcgcgttttttaggttttggttgtttgggcgtcgattttcgggacgcgtcggtcgatagtaggggaggcggtagtagggatcgtagtagttttcgttttcgtacggttcgtcgggtcgcggtgagtaaggcgggtaggcgcggcgggaggcgttcgacgtttatttcgggtttggcgttttttttcggttattacgcggcgtcgtttttcgggattttttagttttcggagtttcgcgcgtttagagtcgttcggagcgcgggcggggttagtttgggtagtcgcgggtcgttgttgcgtcggaagttttcgtcgttagggagttttttgggcgttaggttttgggtttttgggcgaagtcgacgttagaatatgtttggtttcgtatttagtttatcgtatttttagcgcgcgtgggtggggggcgtcggttgaggtggggagggtatagtttagttttaggttatagtgtttcgggcggggtagcgcggtgcggggtgaacgttatcggttcggcggatagcg

SEQ ID NO: 7893 - DNA, 989 bp, Artificial Sequence
  Description of Artificial Sequence: Synthetic polynucleotide
cgtggtgtgtgtgtgcgcgcgcgagtgtgtgagcgttaggggtcgttcgttcgtcgcggtttttcgtgggttggtcgggttaatgagcgcgcggttgtaggggcggcgggcggggagggggcgtcgagttttgcggatggaggcgcgggtagcgcggcgcgtttatttcgcgcgggcgttgttggcggggggcggcgtagttattggattcggatcggggtcgcgattcggggtggcgggtggcgtgggcggcgttcggggttgggatgcgtcgggggtttagtggcggcggcggcgttggcggtggcgtcggcggttgtagggggacgagttagcgtcgcggcgttgggagttagttgagttcggtcggcgagcggaggcggtagcgtaggtagagcggcggcggtagcgggagttcgagcgttgcgcgtttattatggtcgtttagggagagttcggttatttggcggcgtagtcggatttcggttttaatagcgagcgtagtatcgattttttagtgttcggtttcgaggacgatttggtcgtcggggcgattttgtatagttcggagtggagcgaggagcgttttcgcgtggataggaagaaatttgaggttatgttataaggtaggtatttttcgtgttttcggatttttcgattgagtttttaattttttttcggatatttttatcgcgcgtttcggcgttcgttattttagtttacggtcggtcggtttagttttaggttcgttttttcgcggagtcggaggatatttagggattggagatttcgcgggattttttatttttttacgttttttagatttttaggcgttgggggttttgtgcgaatttgattggttttagaaaagtcgaaggtcgagtttgtattggcgcgtttaagttgcgttttggattttggagatgttaattttagttcggatatttgggttgtgttattcggattattcgggtcgtatagagtatgcg

SEQ ID NO: 7894 - DNA, 2400 bp, Artificial Sequence
  Description of Artificial Sequence: Synthetic polynucleotide
cgaaggtgtcgttagttttagtgtcggtgggcgtttgtattaggaatagttaaagtcgacgatatttagttatttcgagcgttagggaagacgtttcgcgtaaaatcgcggttttaggcggattttcgttttagtttcgcgttgttggtggtattttcggggatttaaagtgggtggtttgggggtaaaggaatagaggtcgaagaatttggggtatgttttattagagtatttaagggacggagtgggaggttatattagatatgcgatttcgatatattttaaaagtggtagtttcgtgggttatttttaatagtgggatggatttttttaatttttttcgtttttcgaagtttttttgttatttcgggttatgtttttttttcgggatttttttgtgtaaaattatttttttttttgtttaaaggattttttttttttttttgattttacgaatttatttttttaataggtttttaaagtatgggcggatgtgttttttttcgtttatcgttaggagtcgagtttcggtaggtgagcggtgtaaaatacgtatttagttgtttttagtttttttcgttttcgttgagttggttgtttttatttcgtattacggtattcgagtttgtgagttttcgatttcggttttagtcgtagtcgttaataattttataataaataagaggataggattgagcgttcgcgtttcggagcgtattggttgggggtaattttttattttcggcgcgtcgttcgttgtttcgattcgagagtatcgggagagtcgagggaagggaaggcggcgaggggaaggtaggcggggatggagggaggtacggcgcggcgcggagcgaggaggtgggttgtaggggacgtcgagaagcggtggggttggcgtagagggcgggcgttcggggcgcgcgttattttcgttttgttttcgtagtggtagtatacggtttataggtatttgagcgttcgttagagtaagatgatgaagaggttttcgaagaaagttattatggaggaggttaggaaagtttattatatgcgttggtttcggttgtcgtacggtatttttatggttatcgggatgatgagcgtatttattttgggttcgtggattgaggacgaggaggaagaggaggaggaagaagaagaagaggaagaggaggaggaggaggaggaggacgcgtttaggttgagatggttcgcgtggatattgttatttattttaagattgttgttttcgtcgtcgtcgtcgtcgtcgttgttgtcgtcgtcgtcgtcgttattatttgttatagttagtaacgggtagtcggcgtaggggttcgggggagtttttttcgtcgttagcgttattttaaatatttattaatagttatattgttgttattgttgtcgtcgtcgtcgtcgtcgtggagcgcgggaggggggcggggaggcgtttgggttcggggcgttgtgcgcgatttggcggggtgcgtcgagatatatatagcgagtcgtcgtcgttcgttcgggggggagggggatggagtgcgcgggtagtttttttttttcggttcgcgtttcgttcgtttcgggttgcgttggtttcgagcgtcgagagttagggggcgtcgcgggtcgttcgcgttcggggtttgcgtcgttttcgggttcgtttcggtttcgcgcgcggtttcgggtgttttcggcgtcgcgtcgttcgtcgtgcgttacgggtgtgcgttgcgttcggtcggtgattttttttttcgagcgtttttcgcgcggttaacgagtcgtttttcgtttattaggtggtaattcgttaataatggataatcggtttttttcgttcgggcgtttttgcgttagtttttttttttcggttgcgttcggtttcggttcgtcgcgttagtgcgcgttcggtcgcggtaggtttatcgcgttcggtcgtcggttcgtggtcgtttgttagtttatgttttcgggattttttagttttgtcgttacgtcgttgagtttttcggttttcgttcgttttttttttttgtcgttttcgattttttttcgttttcgttttcgtcgtttaagttttttcggcgcgcgtttcgcgtttttcgtagtcgttagtagtagtagttgtagtaattggagcgggcgcggatttaggacgatttaggcgggaggggaggaggttcgtcgcgttggttcgtttgggtttcgggttgggtaggggtgggtagggtttttcggtagcggttcggtaagcgtttttgatttttagggcgtaaggtagagcgtttttagtttaggcgcggggttaggcgtttttttttaaggtgttgcgtttttagtcgagagcggtggggtatattgggaggacggcggggcgtttcggttaggtcg

SEQ ID NO: 7895 - DNA, 1859 bp, Artificial Sequence
  Description of Artificial Sequence: Synthetic polynucleotide
cgcgatgttagttacggttcgcggcggttacggagttattttagtatttcgcgatggatagtgattttcggcgtggcgcgagttttttgcggtttttacgcgggtttgggcggcgggtttttttacggtttcgtttagatattcggaggtatttgttaaagttgcggaggtggacgatcgggcgtttaagtacgaattttttcgtcgaggtacggttgtcgggtttcgttttgagggtttggggcggcgaggatcgtcggggaggagggcgcgcgagtcggaggttagagtcgggtcgggtagggcgcgtttaggagtaggggagacggcgattcgggtcgaggcgggacggggatacgttatttgttcgtggagcgcggggaaggggtgcgcggcggcggcggcggcggagtttggcgtagagggtagcggtagtagcgggagtatcggttcgttcggggtcggttagtcggggagatcggggagtagcggggtcgcgggcggcggggtcgaggcgagtagtatcgggggaattacgattttcgcgttgagtcggagtagttcggtcgagttcggtattatttagatttagggcggcggcggcggcggttttgcgtttatcggttagaggagaggttgtcgtcgtcggggttgttgttgttgtagttgtcgtcgtcgtcgttggaatttggcgttcgtttgtattttatattttcgcgttgacggcggcggcgggggcggcgggcgttcgagatgttgggtcggcggcggcgcggtttcggagcgaatttatttggtttcgcggcgcggtcgttcgtttcgtttttgtttcgcgcgggaagtttttttttttttcgttcgcgtcgtcgtcgttttcggattcggttttcgtttcggttttcgttcgttcgcgttttttttcgtcggatttcgtttcgttttcgcgtttttcggttttggtcggggtttttttttcgttgcgtttttggattcgggcggtcgcggaggacgtgggtgggagagggtcgagggcgcgttcggttgggttttcgtcgatgtcggttttttggtggtttttggttttttgggatttagcgtatcgcgagggaggtttcgggtttcgtatttaagggtaagcggaagtcgaggtggcggcgtcggagttaggtatgtttcgttgtttagcgcggggttgagggcgtagacggggatcgcgcgagtcgttttttatttggttttttcggagtttagggcgcggagggtattgggttgcggattcggcgtaggcggtttcggacgttgttaggcgcgggcggatttttgttgtataaatgggttaaataggttcgtaaggttttcgcgggttttttggttcggaagttgagtcgcgggtgtttggtttgaagtttcgcgttttatagtggttcgcgggtttcggcggtttttgttttacgttttttaaggtattaggtaggtggttttagggtttttgtttacgatattttttgggtggggtaggattatttttttgtgaattcgttttggatgtttttaggtatagtttgtattttttttttttttagtatacgcggtttttgacgttgtacgtcgagttttttgggatttaggacgaatcgggttttaaggattttcgtttcgttcggattatacgtaggtagcgtcggtcgagtcgagtttgggttcgtattggttacgcgtagttatcgttagacggcgttagttttttttcgttgtagattttgtttcggaggtcgttagttttttttttatttcgggtttatagttttagtgtagtttttggcgacgcgcgttgatagttgggtagagattttcgtgcg

SEQ ID NO: 7896 - DNA, 902 bp, Artificial Sequence
  Description of Artificial Sequence: Synthetic polynucleotide
cgattttagaattcgttttttatttcgagttcgtttttcgtcgttttttcgtttttgggagggcggttttattaattttcgcgattcgggtcgtttttggcggttttgatttcgttatttcgtttcgcggcgggggtttgggggtgaggggcgcgttttggggtagaggattgcgcggtagggtttgttatagggtagaggttagggtttttcgggaaaaaggtaggcgtatatatgtttttttttttgggaaaagacggggaggggggttttttttgggagattttaggtttcgaaatttttcgttttttatttttcggttttcgtattttttttttttttcgttacgtatttttttttttttttagttatttgttttatttcgtagcgtcgcgataaatacggttttagttcgttttcgtttttgtttagttttttttttaagtttcggggagtgggggagtgagtagacgttttttttttaggaggtcggaatttttgtttttattttttatcggggttcggttggttagaggtaagtttcgagattttttattaattattattatcgttgcgagggtcggtgaggttgtagataacgtttgtaaggacgggagtcggggagggtgtagggcgagtttaaaggacgggtagagtaagtttcgggaagaggtaggggttttttttttcgggtcgtcgtttttcgtattttcggagttagtcgtagttacgtagcgtcgtttgtcgggtatattaaggatttggcgcgtacgtggcgtttatttttattttcgggttcgtttttggttcgcgtttagtttttttagattattcgtaaattgaggatttcggatatagagtgtagagatttcggtaagtttattgaaagttagtcgaattcg

SEQ ID NO: 7897 - DNA, 2044 bp, Artificial Sequence
  Description of Artificial Sequence: Synthetic polynucleotide
cgaaacggtagaggtcggtagttcgcggtttacgtgtatttgtttagggaatcgttttagcgaaatttgattcggatcggaattttttcgtagtatagcggtcgtgtttatcggaatggaacgttataagttgttatttgtattttttttttagttttgatagggaatacgcgttgtttttacgtttatatcgatattcggatttttatttagttcggttagagttttaggggttagggattagtgtagggagaaggttttttattttagtttttaggatttttaattatagtttattcgtttttattttgttcggttttaggtttagtcgaatttatatgttttcgtagtgtcgagcgttattatttatagtcgttttttaaattgtgatttttatttgggagattcggaattatttaggattttggtgtggggggtagtattttttatatttgtttttcgaaaattgttatggagtagtcgcgtttcggcgggtaggtgagggggtcgagtttattagcgtcgtagtttcgttgtttattttttttagcgtcggttgtcgttttcgggtagatatcgtcggttttgattttggggttgatatcgttaaagggtagttagtgttcgtttaggttatttcgggaggtttaggggtacggcgaggggtcggggaaaggcgatcgtttattatagttcgcgcgtttagattgagggaggagtcgggttgtagaatcggcggcggatggagacgggagggaggttgcgaggtcgttcgaggagagattaaggttttagaaacggagaagcgggcgttttgcgggaggcggcggcgttgtcgttggtcgttaagggcgggaagtgttttgggatttttattaggggtcgcgagtttcgagcgttaaattttcgcggcgttcgtttagcgcgttgttgtggcgggcgcggagggcgcgcgtcggtagtgggggttgcggcggcggagggtacgggttttcgtttagcgtttttatttttttggtgtagttgtttttcgcgagtcgagatatttttgttagggaagaggagcgtttcggttgtttttttagagttttttgttggggggatatcgtttttatgaagaaaatttttaaataaattttagtttaggaggaggttatacgattatgttcgcgggttgtcggtcggaggggcgaggacgcgcgggcggaggcgcggttgtcgtgtttaggtagggagtcgagtttcgggtgttcgtcgcgcgtttttcgtcggggttatgtattttcgtttgcgttcgatatcgcgggttggaggcgagtgtagcggcgatagttcgttagcgtcgcggttcgtttcgtttcgggttcgtttttttcgtttcgggcgttttgcgtcggggttcgttttcgtagttttttttagtttttttttagtttgggtttttttagtttcgttttagtttgtggcgcgtttggcgggcgtttttttatatatgttagtatatcggttatcggttgattttttcggtttgtgatttcgcgtgggtgtagttcgtaggagtttatcggtttgtgttacgtacgggggtttttagtgtacggatacgcgtttttttcgttatttgtttatttttattagattttattttttttcgcgtcgtgttcgcggcggaaggcgtttttgtagcgcgtgtattcgcggagcggtggcgattttagtttgagtagaggagttgtagtgatttttgtttcgtttttagcggattgcggagggaattttttattttattttattggggatagggtggtacgtcgtagagtgtcgtagttgtataaatttggaagtttatagtatcgtttgattttttgtgtaatttcgaacgttagtttgttcgggtaattttgagtgggtttttgtagtcggttatgttagcggtttttgtatatttgtattcgcggttttcgttgtttgtaggttgtagagacgggggtattttaaacgtgaaagagtaatgaaggaaaatgtagatagagcgaggacgtcg

SEQ ID NO: 7898 - DNA, 1152 bp, Artificial Sequence
  Description of Artificial Sequence: Synthetic polynucleotide
cgtttttttcgtagagatcgttagttgaggttgtaatatttgtttcggtaaagcgttttcgtagttttttcggtttgttcgattcggtttttttcgtttttgtttcggttgcggtattattttttggagttacgtttcggcgagcgggggtcgcggagcgagggggtcgttgtgtcgttatttattcgagtcgttcgggttggtcgcgagtcgggattcgcgagggttggcgggttttggttttcgaggacgtagatatgtggtttgaattttcgtttttttagtcgttgtttttgtgtatttttttgggcgtttttagcgaatgcgagcggcgaggcgagggcgagcgcgtcgaggaagggcgggagaggcgcggagtttggtcgcgtcgcgttgcgtcgagcgtcgggtttttttcgcgagtttttcgggttcgcgcgcgcgttttttattgttttcgtttttcgcgcggcgcgtgttttttatttttcgtcgcgcgttttcgtattcgttcggttttacgcggcgcgcgtttgttttggcggtagcggcggcggcggcggcgcgttttttttcgaacgtcgtttttagggttgttggttgcgttttttattgtttcgcggttgttgttcggggtgggcggcgaggcgggggggaggtgtcggtttggtcgtcggggagggtttatcgttcgggcggatttttattgcgagagcgatgcgggtttaggcgcggcgcgcgggggttgtagggcgtttagtattgggggttgtcggcgcgcgggggtttttttttggtttttaggtattcgttgttgttgggcgtttttcgtattttcggttattatggatatttcgttttttcgtcgtttttttcgcgtatttcgggaggtcgtcggggcggtagtagcggcgcggtttcgcgggtgtttaggtgatcggttcggtagcggtagagtagtggtagtagtcgttattgtcgttgttattgcggtcgtcgtcgttggagagaggaggacgaggagggtaaggggtagaagtaggttttgttttgtttgttttagaggttatttcgggtttttttttattaattaagcgatttcgtgtttatttcgtaggagacgtttcggtagtttttaatttgtgtgcgtcg

SEQ ID NO: 7899 - DNA, 872 bp, Artificial Sequence
  Description of Artificial Sequence: Synthetic polynucleotide
cggagagttgttatcgatttttttaacgttttaagttttagttttgtcgttcgcgtttttttttttttttgggttataattttggttttttcgggtcggttttacgtagttgcgtaggagttcgcgggggaagatttttcgtggggatttcgagtacgacgtgcgattttaaatttttatattttttttgtcgtttcgtaggttatatgtatcgggagtcgggcggggtaggcgcggttcgtaaggattttcgcgatggagacgtaatattgtcgcgattgtatttggggtagtttcgtcgcgttttagtcgtttttcggtaggaagcgtaggtgtgtgagtcgattcggagcgagtcgcgttttcgggttagcgtgggtagggcgtcgtagtttgcgtagtttcgaggatttcgcgtcgttttttcgagttagggtttttaggagcgggtcgcgtaggagacgttagagggggttgttagcggttgttgggagaacgggttacggaaatagttttttttaaagtcggggttatcgtggggtgggcgagttcgtttttttaggtcgggggcgcggattagaggggacgtgtgtagacggtcgcggttagttttatttcgttcgggcggagacgtatagttggagttggagggtcgtcgttcgttgggtttttaggggtttgaacgtttaggggtcgcggcgagtttattcggagcgagttaggtgagtaggtcgttatggcgatgcggtttcggagagcgtacgtttgtcgcggtcggtatggaaacgttttcgttaggttcgggggcgtcgttgattggtcgatttaatagacgcgggtgggtagtttagtcgtatcgttaagttcggtcg

SEQ ID NO: 7900 - DNA, 1070 bp, Artificial Sequence
  Description of Artificial Sequence: Synthetic polynucleotide
cgagcggtggttcgatttcgggtgtggtaggaaggggtgtttcgcgttttagagttagtgttagtttttattttttcgggaagtcgagatttagggggaataggttttttagagtttagtttgtagggacgcggagggtaggagtcgtcggcgaggagtagttaatttgttatttttggcggttgtatttttcggcggttataggttgttcgatagcggattttagggttttcgcgacggtatttagagtgtttagaagggaggtcggggtcggggtgggtcgggaaaatcgagggagggaaggagtttggagaagtttcgtttaggcggggagggggcgattcggggcgtatttttcgattatgatttttatagattttggcgtcgtaatttgcgttttttgaggtcgaagatgcgtattttggagaagatatttattaggttgtcgttgtagagttcgcggtttttgttggggttgtttcgttttttgttggtagacggtcggttttagtgttgttttcgcgtttgtcgtttttggcggattaagtcgttagcgatggtcgcggttatggtggtttcgggaacgggttcggggagggagggcgcgggaggacggcgagtcgggggtatcggaggggaaggcggcggcgtagatcgtggttcgttttcggggtagaggagggggtgttaggcgggattggggagaggggaaggggggtttagttttgatcgggatttatcgtttttttcgcggggcgcggggttaggcgcgtagatgcgtttagggcgtagtcggacgatttcgggaagtcggacgtcgtggtcgtcgtcgtttggttacgttcgagtggagagcgggatcgcggttgcgggcgttgttggttatcgttcgtcgtaggaatttcggcgggggtcgttatcgttattcgcgttgttttttcgttttgttcggttttcgggcgggaggtagagtcggtcggcggtttttcgggcgtcggttggagggcgggtttcggtagggtttttgcgcgttcgtcggttcgggtcgcgttgggtaggatttagcgtcg

SEQ ID NO: 7901 - DNA, 395 bp, Artificial Sequence
  Description of Artificial Sequence: Synthetic polynucleotide
cgttgggaagggaaaaacggtttatatcgaattggatgtcggatggaaatttttttgcgttattagattgcgtttagtatagtagatggtacgagtacgtgcggcgtttagtttaggttttcggaggtagttgagttggaaatttcgacggaaagtatttataagtttttattttgcgttggtttattcgcgtgtacgtttattttttacgcgcgtttttggtttagaagcgtatagatgtttattgtttagagtcggtatcgttggggagatcgagcgatttgcgcggcgtatagtgcggcgttggtagggttttgggttttcggtcgggggttcgagcggttaagggatgggggtgggggcggggagagtggggggagggcgaaagatcgtcg

SEQ ID NO: 7902 - DNA, 265 bp, Artificial Sequence
  Description of Artificial Sequence: Synthetic polynucleotide
cggggatatttaggcgcggggtaggtgtaggggagggggcgcggggtaggggcgtaggggtcgtcgggttcgggttggaggtgttcgggtcgtgggagggagggagggaaggagggagggaggacggcgagggagggaggtaggggcgggcggcgggggatggggttagcggggaggtggaagcgatatttatcgttcgtattggtttttttggtgttgtcggttttagggggggtttttagcggtttttttcgcgagttcggcg

SEQ ID NO: 7903 - DNA, 1169 bp, Artificial Sequence
  Description of Artificial Sequence: Synthetic polynucleotide
cgggttggcgggtattgagttggggttattacgtttttttagagcgtttgcggaggtggcgaaggtttggagagtatacgaggcggaattcggatcgagtgagttttttgagtcgtttgcgtgggacgtagggagagggcgaataacgtttttaggcgttgaatgtaggggtaaggagttagcgagggtggttggagtaggttttgttagttgttattaagtttttttataggtttgggggtttggggttttttggaaagattttttcgtcgcgttgattagtacggggttcgttttcgtattttgaaggttgtcgcggtttttcgttatttataattaagtttaagattaaggttgtaagttgaggtcggggtattgataacgggaatgaagttataggggaagaggataattgggacgggttggatttatatttgatattcgggaaatttttagagcgtgtggtgtttttgttagcggtagttattggtggagttgaggttatcgttattgtcgtcgttggcgttttgtttttggaattttttagtaagatggtatttattgtttgttttttttcgattagtatttttagtcgcgttttttttttttcgggatacgtattagttatatattgtggggagaagatgggttatgtaaatgtaagttaacgcgtttttttagttatttttgtataatgtaataggaatagcgattcgcgcgtacgaatcgggtagtgtgcgcgtgtgtgtgttcgcgtgtgtgagcgcgtgtgttagcgtgcgttttcgcgcgggcgtgcgtttgggtggatttttgcgtggtttgggaggtaaatcgggcgtttttttaagtcgttttaatatgatttaggtttttaaatacgtgaaagcggtagatataatagggatgcgaaggaaataaaaaataattggggaagtggtgttaagttatttaggttttgaattgaggacgagtagtgcggtcgcgtttggggcgcgttcggaaattatttttagtttgtggcggttattgttttatttaaatttttttgcggggagagttgagcggatttttggggggttggttttgggttagttttaaatttttcggttgtatttcgcgtggttttatcgacggcgcgtttcggcgtagtttttggcgcgggttcg

SEQ ID NO: 7904 - DNA, 1743 bp, Artificial Sequence
  Description of Artificial Sequence: Synthetic polynucleotide
cggtgggtcgggggcgtggcgagattttgttttagtggagggagggtttatgtattgtcgagacgtcgattattagattttgattttgtcgtttttagaaaaattattggtagaagattcggattatggttaatttgtcggttataagtttttttaagaagcgttacgtttgggtgtagttggtagggtatattggtgagtagtggggcgggtgggcgggtgttcgcgacgggaaggggttgggcggcgttgacggatgtcggtttttagggagttttaaggcggcgggtattagcgggttgattttgaagcgttgttcggagtcggagcgttattgtttggcgcggttgatggttgacgcgttgcgcggttgcgtgtttgttttttacggcgtggtggagcgcgacggcgaaagttatttgtagttgtaggatttgttcgatggtttcgacggattttgtgtgttcgattgtaaaatgggcgttaggtatgcgtgttttgttaggtcggttggggggattaagtaggggttcggggtcgggatagttgtttgagggggattcggggcgagtgttcgaaggggttttcgtgtgcgtttttttatgttttggtcgttgtttgcgtttttataggatttatttagaggaggagttgattaaggttcgtgagcggtttaagttgcggaaggatatgtataagaaaatgttggcggtggattttgaagtttttacggaggaggagtacgcgtagcgcgtcgttattaagtcgcgttatatgtagtggcgggaaggtattagttttagtattattttcggttttcgtatcgagggtattaaggtgaggtaggcgcgtttcgttggtatcgtcgtagttttattgcgcgttgtttttttcgatttttcgttttcgtttcgtttgttttttcgtttttttttatcgtttcgtcgttttttgtaattgggaggtatcgttgttttacgttgtttttttttttattggcgggttcggggtttttgatatttttgttttatatttagaaagcggacggtttttgtagtatcgattttaagattacgcgaagtcgagagtaggtgtttcgcgtttttgaagagtttgtgtaaggagatgaggaagtgttggtgagagcgggattttaaattttgaggtgttggggagtttgaagtcgaggattgtttttgttatttggtttagtgttttcggttgtgtttttattatggtttttatcgcgttggttcgtaattgttttacgtttttttttttttgggttacgttgggcggggttttgggttttttttttggcggtatttgttaagtatagcgtgggtttcggttttttatcgttagtaggggtttatttggcgtttagttaatttgttttttttttttattttattttttgtagaggcggtatttgaatcgtttgtagtagattcgggatattttggaggtattcgagttttttaggaggtacgaggtaagcggcggttgttcgggtgttcgggtcgcgagggttagggcgggaattcggtaagggcgtttttgggtagggtcgcggtttgacggtgcggggttcgtaggtgatcggtagttcgtttttttttgtgtacgattattgttatcgcgtcggcgtgtggtttatcgatttcggtaagattacgttttttttcgatggttagattttggattatcggcggttttgggaggagggtaatcgcgaggacg

SEQ ID NO: 7905 - DNA, 2405 bp, Artificial Sequence
  Description of Artificial Sequence: Synthetic polynucleotide
cgtagcgttatagtcgcgattgcggcggcggcggcggcgtagggggcgggggaggagagaagcgtttatttcgtttcgttgttttcgtagtagttttggttttagtttcggcgtattagagcggtttttgggaatttttgggtttgttgtttcggcggtcgttagttgggagtttattatcgttcgatggtatcgaatcgattcgtgtagttttataattttagtttaatttcgaggagttagcgtagatcgtttttcgtttttagttgcggcgaggtaagggttggtagcgttcggacgttttcgttttgttttttttatgtttaagcgcggggaattatacgttttcggtgtagaatagacgatcggggttattagggttgggcggtgggagtgggggttgggagtattatttttggttggacgtgtgtttagatttatcgtttttggtttttaggattttatttttttttgtatttttaggtgtcggtttttttgtattcgttttttacggggttcgttcggcgaagggtagtcgtagtttatatttatttttcgtttttaatttttgttttttttgttcgtcgtagttattcgtttggttgggagtaagttttttttttcgttgagggtgtagagagcgtttagggcgttaagagtagaggggttaaagtttaagcgttattagttagtcgaaggttttgagtttttagggtcgcggtcgggacgtagggaggttaggacgcgacgttcgttttatttgtttttttagcggttttttggtcgatagcgtcggtttgggggagggcgcgcggtcgtagacgtagttttttagtaggtaaagtttcgagggtcgcgagttcgagtcgttttcgaagtagaagagtaggttttgtagtagcgcgaattatttggtttgttattttgtgttgttcgaatttcgtttgtttaggtagtttttgcgcgtgtcgtttttgcgcgttagtagttttagggacgcgacgtggttattatttagtcggatttttttttgtatggtgtttagaggttagcgagattttacgcgtttatatttttttcgcgtagtagtttttcgttcgtgcgcgttgcgcgttgtttttttttggcgttcgttcgttcgttttttttagtttttttttttttttaaatatttatattttaggatttggcgtcgagtcgcggttttttgaatttagatatattatttttcgttggaatttttttttcgtttcgtagagttttagtattcggaagatgtcgttcgattttttttcggtgtcgggtaaattgagggattggcgatttgcgcgttggcgaggggtaggcggagttatgtgacgtcgatttttcgaagagttcgttttagtagcgcggatagggatatacgtacgtagtttcgtcgaggcgtagagtcgcgcgtaggttgtaatttggtgttttttttttttttttagatatatatatacgtatacgtatacgtatatatttaaattttgttttttttttttttatttttttttttttttttcggatgttaaaaagtaaattagattaattttcgtttaatttaatgaaatttcgaaggttcgttatttcgggagtttgcgtttttgcgttttatcgcggcgtattgtagatttggggttaagtgttagttgttatttttttttttaaaggttcgttttttttttttattttatttttaatacgaggtggaaggaggaaggtgggtggcgaaatagagttgtaaaagcgtttagttttagtttttgtatagttagtcgggttatattgaattttagtattcggttgtattttcggcggtttttttagttatttgaggatagtatagggggtgagatggggtggtggttggtgaacgttggttattttattttatattattttattttgagagttgttataattatcggcgttatttttcgtgtattttgaggtttggttggcgagtcgttgttgggagttttttgtaaatattttttaaagtttgaaggcgggttttaaacgtaggcgtcggggattatgggagtttttaaatagttgcgttggcgtaatgatattttaatgatagatttttcgtttttatttttagtttttattcgtttatatagttatacggtatttattcgagaacgttatagcgttcgtatgttgtatcgggagggcgcgcgggtcgtcgggcgagtcgggagttggggcggggagcgcgtatcgttgtttgtcgtagagggtagcgagttcgtttcgattcggagtaagtcgcgtttggttcgggcgttttgtagcggggatgggtgttcgcgtagttttgtgaaggaaagatattattttttcgtacggaaattgcgtatatttttttttcg

SEQ ID NO: 7906 - DNA, 1920 bp, Artificial Sequence
  Description of Artificial Sequence: Synthetic polynucleotide
cgcggatttgggtttggcgtttattttatcgttaggattggatagaaaggttttggtcgaggttattaacggagaggttagagcggagtttttggtttagaatggaggtagtagcgagttttcggcggtttttaggagtattaaggtggaggcggtggaggagtcggaggcggtttttattttgggtttcggagagtttgggttttaggtttcgtcgcggacgtcgtcgtcgcgtagtttcgtttcggttagggttaaggtcgagttgtttagttttacgtcgggttttagttcggtgttcggcgagttgggtttggtcggggttttgtttttttcgtagtacgtgttcgggttcgacgcggcgtttttcgtttcggagattttggttaagatgttcgagttggtgtatagtcggttgtagtagggcgcgggcgcgggcgtcggcggcgcgtagatcgggttttttttcggggtttttaagggcgttacgtgtttcgagtgcgagattatttttagtaacgttaataattattacgtgtataagcgtttttattgtttaggtcgtcgtgcgttcgaggacgcgtttgtcgcgcgtaggtttaaggcgtttttcggttcggttcgcgcgtttttcggttagttcgtcgaattcgacgcgtcgcgttcgttttcgggtttcggagcgcgcgaggagggggttgggggcgcggttacgttcgaggacggcgcgggcggtcggggtagcgagggtagttagagttcgggtagtttcgtggacgacgcggaggacgattttagtcgtacgttgtgcgaggtttgtaatattcgttttagtcgttacgagatttatatcgtgtataagcggtattattgcgtttcgcgttacgattcgtcgtcgcgtcgatcggtcgcgttttcgggattttttgggtcggtcgcgttttcggttttttttttcgtcgcgtttgtgcgtacgcgtagacgtcgtaagttttacgagttgtacgcggtcggcgtttcgtttttttcgtcgttcggttacgttttcgcgttcgagtcgtcgcggttcggaagcggaagcggaagcggtttcggtttcgtttttgcgcgttcgttcggtttcgcggtcgacggttttatcgatttgagtaagaagtcgcggcgttcgtttttcggagtttcggtatcggcgttggtcgattattacgagtgtacggtttgtcgcgtgagtttttatagtttcgaggtttatttggcgtataagaagtattcgtgtttcgttgcgttatcgttcggcgcgttcggtttgttcgtcgtcgtttgtttttattgtttttcgaacggttcggtgcgcggggatttgttggagtattttcgtttggcgtacggtttgttgttcggcgcgtttttggtcggttcgggggtcgaggttcggacgtcggtcgatcgcggtttttcgttcgttttcgttttcgtcgttttttcgtagttcgggtttcgtggttttcgggacggtttcggttcggagttttaggagtcgtcgttcggttcgttttcgttttcggtcgtcgcgttcgaggtcgtgtcgttttcgtcggcgttttttttttattcggataagggcgtttagatttttagtaagggtacgtcggcgtcgttgtttaacggtaattatcggtattgtcgtttttgtaatattaagtttagtagtttgtttatttttatcgtttataagaagtattattgtttttcgtacgtcgtcgagtacgtgaagtgagcgtttatattatagtcgtagacgttttgtacgtttcgttgcgatgcggggagggggtcgtttttaggtcgtacggattgtcgtttttgggaatttcgttacgtataggtttcggcggagggggtcgtagggggtagcgttcg

SEQ ID NO: 7907 - DNA, 1403 bp, Artificial Sequence
  Description of Artificial Sequence: Synthetic polynucleotide
cgcggggttttcgggaatcgtcgtttttttttttcgttttcgcgttcgcgttttttttttcggggtttcggtttatttatttttggtgcggtttcgtcggatttaggagtttcggtcgttcgggttgcggggagggggcgtttcgggtcggttttagaagttattttgtaaagaggtagggggcgcggggtcgcgcggggcgagttcgggattcgcggggaagaagtttttcgggatcgcgtttcggtcgttcgagtttttcgcgttcgtcgttttttatttcggtcgggggtttatttgggagttcgttgttttcggttagtcgttcgcgtgtgtttagggttagtagtacgtataagtgttagcgtacggtcgtcgcgtttatgtttaatgcgggtttcgttgggcgtgcgggcgtgcggggcgcggggattcgatcgatcggtcgttttcgtaggcgttgttcgttgttcgtcgtttcgttatcgttcgggttttcgagtcgtttagttagttcggttgatgagttgatagcgcgcgtttattggttcgtggcgtcggaggggcggggcgtcgtttagggtcggttaatgggcgtcggttttcggtttttcgaggaagaggggggttcgggcgtcgtcggggggattttttttttggggcgggcggtaggtggggggtgtgggtttggtcggtcggttcgttaggcgcggggtttaggttaggttggggttgtttggaggttgcgtttttttttgttcgcggcgtttcggttttcgtcgtcgagagtggacgtttttttggggtaatttttttcggtttagaggtagtttcgggggcggggattttgcgaatcggggatttcgtgaggtcgttcgttattcgtgggtagtgaaacgcgttagcgcgtagagtagattcgtttgcgttgtcgtttgttggacgttttttgagtatttattggggatcgagtgcgggcgaggtagtagcgaaggaatcgggaggggaaatttcgtgaagattatttgaaaattgacgtttaaaataaacgaattttttagtattcgttaaaggatagtggttcgttagtgtgtttgttacggggcggtcgtaggatttgcgtttggaatcgggcgggcgttcgggacggataatgtcgtttggcggtcggtttcgcgggaggttttcgtacggggttaatttcggtcggcgaagttcgttgttcggaatgcgaggtcgaggtttttttttgtgatagatcgggcggggttaggaggaggggtagggcgggtatttcggttcgaagatttaggaattgttttggtttggtttggggtttatatttgacgtttggcgagggttggtttcgggtttggttttatcgggtttgggagggacgggcg

SEQ ID NO: 7908 - DNA, 1088 bp, Artificial Sequence
  Description of Artificial Sequence: Synthetic polynucleotide
cgggaaacgtcgttttttttggcgtttgagatttggggttttttttttatttggttttttcgttttcgttttagtttcgtgcgttttaggagggtatcgtcgagcgtcgggttttcgtagggttcgggagatttcgcggatcggaggagggataggattttcgagttttgggggcgggaagggagggtggaaggaggaggggagcggggttggggaaagttggagtttcggtatttttttttcgggttaggtcgttttcggggttttgcgttgcgtttttaagtgttgggaagatttcgcggggaaaggtttgaggacgcggtcggttggtataggtgtggcggttttagagggtcggggagaatttatggtttcgaggttgtggattagaaatgtttttgattagaagttgagaatttttggttagggaggtggggcggcggggaggggtcgttaagtcggtttagagcgcgtttatttgcgttataagggagaagaggtgtttttcgttttttttcgtttatcgtcgttacgatgcgtcgcggatttcggcgatttagttcgggtagaagcgcgcgttttttttttttagtttcgtgcgtcggtttttgtttcgttagtttcgttatggttttttatttattttcgcgggagcgtttttgtttttttattttgtattttttttagagtcgcgcgttagtttttcgtttcgtggaagcgtttttttttcgatttcggttgattttcgttcgtcgtttttttcgcgggtgcgcgttcggtttttttttcgttcggggcgggtttgcgtgggcggtgtttcgggtcggcgggcggagtttcggttttttagttttgcgtttcggtggagttcgagtcggagtcggtagaggggcgcgggcgcggacgcggcgtttggcggggttttgggaggttcggacggggttttggcgttgagttcggtcggttcggagcgcggatttagtcgtaggggcggcgatgggtatcgagggattttcgttttcggtcgtttttcgcggacgttagggttgtttgttggtatttgcgcgggtgagtgcggttttttagcg

SEQ ID NO: 7909 - DNA, 1812 bp, Artificial Sequence
  Description of Artificial Sequence: Synthetic polynucleotide
cgggcggcggaggagggttggcggttagatatagtatcgttggagtttagagagtcgggtagaggttggcggagagtcgaggttggtttagtttttaggagatcggcgagttggggtgtgtgggagcgggatgtttttaaggcgaaaagaagcgttagtttcgtaagcggtttttatttgggttgtttaggtcggatgtttaggagtttatagtaggggggatggagcgaaggatcgaggggttgggaggcgaggtcgtagcgtattgacgtaggttagcgaggtcgttggtttcgacgtagggcgttcggtaaggtgtttggtattacgagagttaatttttgcgcgttattttcggaggttagtgcgtttagggcgcgtcggttcggtaggagggtgggtgttagtttttttttttatttttcgagtttttttttcggcgtttacgtgggcggagtagcgcgagggtgtgcgtggtaggggtcgcggcggcgtgtgtcgtgcgtggggtggggtgcgggttgggcggtttcgttttcgggtttcgcgtcgtcggggcgcggtttttagttttattttttttgttatttgggcggagatttgggggattgtgatttattttgcggaagatacggaggggacgggtcggttatatttttcgcgttatttcggtaggtatcgggtgggtttttttttcgttttttggtttgagggcggaattcggagaagagtggaaataggggtggcgtgaaggagagttgggggttgggggcgggatcgggagggggtgttgggggaagcgacgtagcggttgggagattttgtaagggggtttgaagaggagtgggggatgggtatggaagggtgggggattattgaggtgggatgcgagagtggaagggggatttagagggggcgcgatggtcggaggagggggagatggacgatggggcggggcggtatcggtcgtcgcgttttttgtcgttaggttcgtttttcggtcgtcgggtttacgggttttttttggttagcgttcgtttttcgtttttcggcgtatttgtatttatttgttcggcgtttaggttcgagtcgggtagtagtagcggacgtagcgagcgtagtttcgcgtcgtatttttcggtcgtttttttttcgttgcgagtttacgtcgttgtcgtcgtcgttatcgttttaaaaaggataaaacggaatagaaaatgaatgtatgtataaaaaaaatcgtaaaaagtaattgaggaggatggtagtcgcgcgcgcggttcggcggggcgggagtcgagaggtcgcggtattggtggtcgcgattcgggtaggcggtcggcgcgtgtcgtacgcgggtggttgtagttttttcggtcgttcgcgttcggtttaggtacggtatcgttttttttttcggggagttttttcgattggtttgtttttttgttagttaggtaggagggcgcggcgttcgtttcgtttcgttttcgttttcgttttgggtagatgtcgggagtttttttgtcgtcgtgggagggggagttgagttgtcggagcgtgcgtattgggttagcgggcggtcggggtagggttggggtttcggcgttgagcgtttttagtcgcgtcgggtagtttggcgtttcgttgagtcggagtaattttcggtaggagtttttaggttttggttaagtttcgggattcgggaagttatttttgttttcgggggttcgagtttggagtggggtttgtaggtaaagcggggttggggtcgttttggtcgttagtggttaggaagacgtagcgatttcg

SEQ ID NO: 7910 - DNA, 5819 bp, Artificial Sequence
  Description of Artificial Sequence: Synthetic polynucleotide
cgagtagaaggcggacgttttcgagtcgtaggttacgtagttgttatagttttgcgattcgttatagggatttttatagacgtttagcgtcgcggtcgagttgagttcgtggcgcgcggtggttagtagtcggttttcgtagatcgggtagtagatcggcgtttgggtcgaggcggcgggttcggagttcgttagcgtgcggttttcggattcgtagtacgtgtttagggagttggtggttattaagaattgtagagagaggtcgcgaggattggcgggaagtcgggttggaggttggggttttgggttttgttaatttcgcgcgtcgtttacgagggcgtgtttcgagtattttcgggtttttcgtcgtttatattaggatgttcgtttttttttattagtttgtgcgcgtttggtttttttcgttacgtggggtttagtcgagtatttatattttttttcggagggtttttaaggtttttgacgttatttgcgcgttaagtttttttttttaggggttttttggggttttaggatttttttggggtatagtttgagttttgtggtttaaatattagggaattcgggttcggttcgtcggatttttttagcgtttcggttttttttcgggggtttggggagtaggggttgggcgtgaggggcgcgcgatttaggttttgttagttcggaagtcgtaggtagtcgtaggtcggatattttttatttttcgttttcgttttattcgttttatcggtatttgcggtggtttgggcggggcggggtttcgtttatttggggagtcgaggagtaggggtatttaaattgcgggtaggatatggcgggcgcggttcggggcggacgggcggggtttgtagggttttgcgcgttggggtcggcgtggcgcggttattgtttcggagttgtaggtttttaggcgttgggagggcgaagtaggagagtcggttagtttattttcgcgtttcgtaaatttttttaatcgggtaataaagtgagtagcggtggtcgtcgcgatttttttaatttcgtatttcggaggttcgagggggttttgggatcgagcggtttcgtagcggcgatagaaatatatattttacgaaaaagaaaaaaaaaaaaacgagtcgcgcgaattcgttaagttagatgtgcgcggtttgaagcggaggaggttttgacgttagttttatttcgcgtagttcggtttggtcgtagattcgtcggttattcgtcggcggtttaggtcgggaggggttaggatagtttcggtcgcgcggtggacggaggggttattttttcgggcgttagtaaataaattttattcgagttaatatcgtttagcgaacggtgtttttttttagttattcgagaacgagaggtatttttaattagaaattaattaatgagtagttgttttttttcgttttattgtaattattcgttttaattataaatgagatttatgaaaggatacgttgaagatgtaattaatagttaaaattagttcggcgttgcgtaggcggtcggttcggtttcgcgttggcgcgttttgtttcgagtggtaggaaggggttcgtaggcgtttcgtacgcgtttcgttattattgtttaatcgagaattagtaacgtttttcgtcggtttttattttacgtcggaatggatttttagaatttattgcggtcgtaagatagttcgtaagagttggttaaaatgtttttaggtgcgtgggggtttcggggttttagttggagttcgatattttgagattggcggttcgagggttgtagggtcgtttcgggcgtgcgtttatcggttttgtatttttgggtagtcgagtgtcgcggagaacgttttattttttttatcgcggttttttaagttttcgtttagtttatcgtttttatttcgttttttcgattttttttttcgatttttttttcgtcggtcgtgtttcgtcggtttttttttgtttttcgcggttaagtcggggattgtcgggcggttttgcgcgttcggaagagtaggttttttaatttaggtttcggtttttttcgttaagttcgtttttttcggcgtttcgtagggttggttgcgagggagggggcgttgggtgtttggcggaggcgtttttttttgtttattttgtttagttttttgtttggggcgtacggagtaatcggaagaggggatcgagcgtttattttaggattttttcggttagtattttttttgggattttgtttaagtttaaagcggaggttagtgagtaggcggtaagggggcggtaagggggcgttcgggttatttcgaattcgtttttcgttttttgcgttatcgtttttcgggatcgggattcgtttcggttgttttcgttttttgggtcggtttttcgtggtaagttgggaaggaagtcgtgtaaggtagcgttgtgtagatttgtttagaaagatttttgggtttagatttgtgaatcgttttagggttattttttaattaatgatgacgttttcgttttttttttagttgtaagtttgttttttagaaacgaaatttgtttgtttttttgatagttcggttgaaggtgattgatgattatttggagattatagtatatattatataatatttgttgcgtaattgttttaatttatagatgaaaatacgagtttttcgatcgcgttggatcggagcgggttacgttcgagttgtttgtagagggaaattatcggaaataatgaatagtcgttttatgtaaattatttagatagtttagcgtcggtagtcgcgagaaatatataaagaatacgagttaaatgatattaataattgtttttgaattttgtattgatttcgcggtaggtcgcgttttttttttttttatttgaatcgttaatattatttttttgtaaataataagaaattagttatcggggtttttcgttagaaatgaattttttaatttttttttttttttttttgtttttttttttttttatttttttttttttttttttttatttttttttttttttattttttgtagttttttggtttttttcgagtatttttttattttttattatttattgtttataaattattcgttttttttaggtaatgaggttcggttgaaggaggggtgtgagtttagtcgggttaagggttgggatggggagtagagatttttagaggggaggtatttagttgtggtttgttttttttttatttatattcggggatttggtttcggcgattgtgagtatttcgtcggttgagggggagagttagggtttaggggtttagttatttatgttttgtatttttgggttttagtgtaatagtttagtttatttagatttgaggttggtgtatttttttttttttagattcggcggggtttaattggagtcgaagttttagaataggcggttatttattttttgagtagagtttgggagaagtagtttttattttttagggtagttagtacgtgggggttttttcgggggttttttttgattattatcgttatttttttttgtttttttttgtttttttagtttgtgtgtataaatcgacgttttagtttttattagcgggcgatttttttttcgtgatttagaaatttggtttttgaatcggtttttttaggtcgtcgtatatatacgttttattttttgttcgttagtaggttttagcgtttggggttcgggtttagttatagttattttgtttcgggaagttcgtaattgtttaggaggttttttgattcgttcggttttatttaggttttattatttattttaggatatagggttaatttagtttgtggattggcgattatcgggatattttattgaaattttgtagtttggtttaggttcgtttgtttaaatcggggatttttattgggttattttttttttatagataatattggaatattttttaagtgtttttattaaaaggttaagtttggagcggaggtatttagtgttttttttattaacgataggacgtttagtattttaggtattagttgaacgcgtttgtatagattcggagtgttgagtttttttttttttagggattttcggtattaaatatattcgtgagtaggtgggttagaagttagtcggttttcggagtatatagtatcggtttagtttcggggagatgaggtgttttcgttggtttggagcgtttcgaagagcggaggattagggtcggagtaggtcgtaggggaggtaggggatggttagtttttaacgcgaagcgtaggcgggtcgtttattttgacggggttatcgttggtcgtcggaattatggaaggttttcggggagataggtcgggttttgattttttttcggttagtttagttttggtgttttaggagttattttgggggttattagtttttcgtattaagagttcgttcggagggagttttttttagtttagagaagttaattttagttaaaggcgaagtcgggagttcggggtattaggtaagggtttttttttttgagatttggggttagagattttgggggcgtttgtgttcgtttatcgttcgggatattcggttggggtgtgggtttgagaggttttacggtcgttgacgtcgtattggcgaatttcgaggttggtaggttatttttttatagtttcgaggttttttcggagttagtggtaggagaaggagttatagggataagcggtgaatttttggatttttaatcgttttttatgggggttcgcggtttttttttttttttttttcgttgcgttttcgtcgtttgttttttgggtacggtttgaggttggacggagcgtcgttcgggcgtttaggatttaggtttggttatttcgagttttttatttttcgtttcgcgtcggttcgcgtattttgtttttcgtaatttgtagtaaacgtagcggtttttggagagtttagcgacgggtagtaaattttgtttttttaagcgtaagagtaattttcgtaaagtttgtgcggcggagtttattttttatttgagttggggaagttttcgttcgcgtcgtgtggttgtcggggtcgcggggagtagttcgtagttcgggacgtatcggggagtcgtcgtagtcgtcgtcgttcgtttttttcggcggtcgcgcggagttttcgttttttcggaaggggggaggggtttcggaatttcggggcgggggcgggagcgggggattttatttatttgcggtggcgttgggtcgttttcggtagttcgcgagggtttcgcgcggaagttcggcgcgcgcgttttagcggggagtcggcgataattaatggagatatttttaggcggagtatttggcgagcggagcgcgtcggcgtttttaggcgtcgcggtcgttagtcgagttcgtatcggcgtgacgtgggcgagcgagcgcgttgtttttattcggtcgtttattaacgttttttttcgcgggcgtcgcgtttttgttaattttttttttcgttcggtttgcgcgcggcgcgtcgggtgtaggagttggggtgagggcgtttcgggtgttagtaggggcgttgggagttgtttgggcggggacgtagggtttcgggaggttatatagttttaataggatagtgggaaggcgcgcgagttagatttggttaaacgttaagttcgttgcggtttcgggttttcggtttacggggttttttttttcgtttgggttgttttatttagggacgtttgggtcgggcgcgaagagttcggaaatagttatttttgtcgtcggttcggttttttttcg

SEQ ID NO: 7911 - DNA, 2001 bp, Artificial Sequence
  Description of Artificial Sequence: Synthetic polynucleotide
cggaggttgtgtcggggttcgttaaaggttataaataaatcggacgggtgggaagtacgttttagcggcgattggatttttaaaaatttgttggtagagtgaaaataaaaattgttttttaagttggtaaaatcggcgttttagacggtgcgtaggagggttttgcgaggtttgttttcggagtttcgcgttagttttgtaggttcggttgggttcgtagttcggtgttttattcgtgggtcgggttcggttgcggggttttttcgtagtcgggatatttaggatagtagcggttggggagtcggggttaggggtttttttgtaattttaatgatttttattattattattcgtaaaggataaacgcggttaaggtcgggttttatagtggttgtgttggttatcgcgtggaggagtgtgcgttaatttaggggcgaggggggcgcgttcggtgtttcggggagagtttagaaggaagacgttttatcgtggtttttatagttagggatagtttgggtgttagaaatttttagagagaattcgaggggttgatgttttgggttattagtttttggtgtttgtggggttttttgcgcgtttatttttatttttttttttttttttaggttcgacggattttttcggaggtttaggatagtgatttatagtaagtggtgatagtggaataacgtgatagttcgttgtatttgttagttggtttttgggtaggtttattcgtcgggttcgattttagagtcgagttttcggagtcgtcgggtaaagttttttttttcgtttcggtgtagtttcgcgtttttcgcgttcggcgttgtcggggaaaagtggtataataggaaagtttcgttagagggttttttttagtcggttttttcgttataaaaagttagattttagtcgaggttttgattttttttaaatatacgtttttttgttcgcggttcgttattttcgttcgggtttcgggttgtgtagtttttttttaggtttgttcgggtttatgtttttttcgaagcggcgggagtcggtgtagttttaatttttattgcgtgttttaggtcgttaattagttttgttcgcgtgtcgttggttcggaggttgtcgcgttagtttttgcgtgcgtttgagcgcgttggagtatttgcgaggttagggttgtcgacggcgagaggatattttgaggaatacggtgttttagtttcgttttcgtttttcgttcgagttggaggttggggcgcgttgagtcgtagcgtttggataagtgcgcgggtcggagtcgtttaggtttgtattcgggggttcgcggtcgacgtatgcgtacgcgcggtggcgggtttgtaggttcgaaggttcggttttttttttaaattcggagcggggaagtttaggggttgagagtttcggttcgggtcgtaggagttggggagcggggacgcgggtaggttaggtttttttatttgtcgtcggggttttttttcgtagtagtaaaggggttttagtgttcgtggtagtgtatgttttagcggatacgttggtttttaaatttagagattagaggggcggttgagaacggggcgttcgttgtgtgtgatttttgatcgtggaggaagggcgggagtcgggagtaggcggtggggttcggggttaggtcgcggtcgtcggttttcggtaaaggcgttttggtcggggaagggggcgagggtgggcggtcggtttttgtcgtcgtagttatatttgggacgttgaaatgggttttggggatagagtttatttttagcgcgttttataggagaagttcgtagtttaggtttgggtcgtgtagatcgttgggcgggttcggggttcgaggagagtaatacggcgcgaggtttagtcgcgagtaataatttcgatagtacggtttttcgaagacgtgtttcgggtatcggggttgtgagcgggggagtttcgggttttgggttcgtttggtacggggcgggggcg

SEQ ID NO: 7912 - DNA, 1265 bp, Artificial Sequence
  Description of Artificial Sequence: Synthetic polynucleotide
cggcgaggagggttgtaggtgaagcgcggggagagggaggtcgttcgtttcggttttttttttaggggttttgcggttggttagcgtttcggttgtattttttggtgcgcgtcgcggcggcgttataggtttttcgattttttgattatcgttttcgggtcgcgcgttcggtagtcgggatcggtgatggcgcgggattgacggtcgtttttttttagatttttttgtttcgtttggggttcgttggggttgcggcgtcgtttcgagttgtatgtggggcgggcgcgttcgagtttagagcgagcggttttcggcgttttcgaggcggtgtttcgtcgcgttagagtacgaggaggagcggcgggtcgggttaggttttttacgcgtcgtagtttcggagtacgggtttttcggaggggatttggggcgttttagtttaggaggaaggattcggaagtagaagcggagtcgcgagtcgagtcgagttattgttttcgttgttcgcgggcgtcgggtgggggtttcggcggttggatgggtagcggcggcgcgggtcgcgggcggcgatgggcgaggagtagagtacggtgagcggcggcggcgggttttaggagtcgtagattttggttagtggtattgcgggttattttgagttttcgaggttttagggggatagcgttcgggcgttttcgttgcgcgtcgttttcgcggagtcgagcggcggtggttgcggaagcgattggggttgcgcggatattagcgttttagagttcgcgaggagtttggggttttcgggttggagtaagagtcgagtatcggcgtagtttgcgggattggtatttatcgggttttttaatttttagattttgttattgtagttggagttggaggaggaagaggaggaagttggggatcgaaaagagggaggggatgaatagtaggaggcgtttttcggcgaagagttggagtttaggattcgcgtgggggtcgtcgacggattggttttggacgtgttgggttagcggcgttcgtttttcgttaagagataagttttttgtttcgtgtattgcgtggagagcgatttgttcgaggttttcgtttcggagtagttttcgtcgttcgcgtcgttatttggggtttcgttagtgttgaatttttttagtattcgtttttttttttttagttttcgattgttttttttaacggattttttttttttcgacggcggtagtatcgagttggagttttatttggcgttcgagtcg

SEQ ID NO: 7913 - DNA, 1360 bp, Artificial Sequence
  Description of Artificial Sequence: Synthetic polynucleotide
cgttttcgattttcgtcgttgggatttttcgtcgtagtttttgttttagtttgtgttgcgggtggggtcgggttgagtagttcggcgttttttatcgcgttttttatcgtatcgttttcgatttaatttcgttttcgggcgtttattggtttgtagtattttttttttagtttgtgaagtgagtagggggaggcggtggtcggtcgtttttttttagcgtttagtttggtttcgcggcggaggcggcgtttttttcgtaggacggagttaagttggattgtcgcgtcgcgcggggcgggtaaagggggcgttgcgttcggtttcgggtagggagtgacggcggcggcggcggtttcgggcgagcgtggttttcgcgtgcgtatacgtatacgtcgtcgcgtagggatatacggatttcggtcgttagtcggttatataggcgcggagattcggttcggcgcgcgtttttcggcgtatacgttttttattttcgcgtcgcgcgggtcgcggatttgtaggttgcgcgttttttgcggagtttgtttcggttttacggataggtttcgtagtgagtaggtaagggtcgtttcgtcgcggttgtttttttacgtttcggtcgttttttttttttttagaattttcgtttagtcgggatttcggatttttttttttggtttggcggttttcgttagtcgcgatttttatcgacggagagcgggcgagggtcggcgttaggtaagttttttagatttgaaatgaagttttttttcgtcgttgcgttttttttgcgcgttaggttgatattttttaatttaagtgtttggcgttgcgttcggggcggtcgatcgtcgtagattgtcggggtgggggtcgatttagttattttacgttttttttgatgcggagaagggagattaggggggtaggtaagttatgcggtcggagggattcggagggatatgtttttttatttttaggtggacggacgtatttacgcggatcgggaaggtagggttggagggtttttcggggttaggtatcgtaattcgtacggggtttgaggggtgggtaagtaatgtgttaggtgggggttggggtaggggttagtgtagaatgtttttttgtggtgatatattcgggattgtttaaaagagtgtcgttttcgtttttcgtggcgcggaggggttggggttggggatgttagggttttagtggtttttagaagaaacgttttgcggggtttgtggggaaacgtatcggtttttttaggttgaagtgggttcgttgagatttttgtttgtcgttttagaggtagaagtttttgcggcggttgcggggggcggaggttatattttcggcg

SEQ ID NO: 7914 - DNA, 362 bp, Artificial Sequence
  Description of Artificial Sequence: Synthetic polynucleotide
cgtttagtacggcgggtagcgtcgcgttgcgtatcgtcgtcgattatgagcgaggatagtcgcggagatagtcgcgtcgagagcgttaaggatttggagaagtagtttcgtttgcgcgtgtgcgtgtttagcgagttttagaagatcgagcgggattatgtgggtacgttggagtttttggtgtcggtgagtgttttcggtagacgtagggggacgttcgggcggcgcggggcgcgggtttcggagtggttgcgggaaggacgcgcggtattgtttgtgcggggattcgggacgggtcggggtattataggcgcgggaatttacgtgtggattttgcgttcgcgggcgcggtgattttcgcg

SEQ ID NO: 7915 - DNA, 2566 bp, Artificial Sequence
  Description of Artificial Sequence: Synthetic polynucleotide
ygtttttaaygygggagygtagtgtattttagtggataaattygagaatygtaygttgtttttygtttttatttttgtttttttygttygyggttttaattygggatttaaatgtaygagttyggtgaatgtttyggtaggagggygagggtttagaggtagtttgtttagtaaaaaygatagttgtgttttggtgggttttgggttattttaggtagaagttagagaagttygagaatttyggygggttggtaaagtttgtygagaagggtttttttggatatttttattaygggttttaggttygaatttttttttttatttggttttggagttttagatatagataagtttygggygygtyggygggygtatgtgygtgtgtgtttatagyggggtggtygtyggagttttttaagaattttagttttttygttttagttgttygttagttgtgagygttygtygggttyggaggttattygtaaatagttgggtyggtagttgggagtttgggaggtttttgtttagtttyggggtttygagaaaggagaagggggagyggagtggttgtttggttgtggttttttttaatttygtttgygaagttttygttgggagttyggagttttagtttttttyggtagtttyggttttygygttygtygygtttagyggtyggygtttygtttygggtttyggggaggaggygygtyggggtagtyggttaggatattgygttgttggtttttagagttgygggygygtttggtyggttttatttttygggttgttggggygggygtygttgtttygatttyggaygygyggaattttggagattyggtygtttttygttagggtygyggtgttgttttaggtttygggygggygttttttttyggttatyggtgtatttygttgttygtttgygggaagygaagaggggttttttgatttgtaatatagaggaaagygtygttttygtttagtttggtatttaygygtttataygtattyggygtyggtygggtygtttatttgagttttaaaagttgttgaatttatatggttaygtttyggggagyggggttttagatttggttygtttaggttatttgygyggygttygygttygttygttttygtttygyggygtyggttttyggttttyggttygtygtttttygtygttygtyggtygyggggygtatagygagttagagygyggtygygyggggttttatgtyggtyggygygtygtygtygttggggygtatggtttaggttgggyggttygygggggygtatatttttyggtyggggygyggggttygyggtttttttygtyggyggtatagygaaggyggtagygaggyggggygtgtttyggygttgtygyggygtagtaaagggttggggagtygyggtttygtttttyggggyggygaggagggaggtyggyggygttgtygtttayggtgygtgtttttyggygygyggtttttgtttttagtyggagtttygygtygatggggyggygttgtttagggtttggggtgaygygaygyggayggaygygagtttttttygygttgtygggtyggggggttttgttagaggtttygtygtygatyggygttatttaagttgttygggggtttygtttgagygttygttttgtagayggtygyggttyggagattggtaggaggygggtaygagaggygygyggggygagggygtygtggagygyggggygtggggaygygyggyggyggygtygygyggaggaggygygyggggatttyggggtttygtygttygygtttatygygttygtygtagagtygttygygttgtttagtygttttttttttygygtttgttttttygygygttygttttygtttttyggagtyggttttaatttygttygttyggttyggtttaygttattygtttttttygtttttygaaygggagttygagtttttggtttggtttyggtttttgttygtygttttattttgygggggtyggggtygtygygggtggtggggggygttgtgtttagtaggggygatagygtaggyggggttttttgtagtttttttttttattttyggtygygtttyggtttttattttgygaaaggttygagagaggtygtaggttaggattggatygtygggygtygtyggatggtgttgttagggtaatyggatggtaygygaagtygttygaggtttygattyggttaygggggygtttagtggattyggagagttattttggggagggggyggtttygaagaaggattgggtgggggygtatggagygggggttgygygaaaagttttttggggyggagttgagttaygygggtygygtaggagygtttgttygagggtygtttaygagggatttttttgttyggttgygygggtttttgygttgatgaagttatygygtttygggtyggagtttyggygtttttgtttygaatttagygaagttyggttttatgtttttaattatttaayggttttttatygtttagyg

SEQ ID NO: 7916 - DNA, 572 bp, Artificial Sequence
  Description of Artificial Sequence: Synthetic polynucleotide
ygttgttygtygggtyggtggygtttatttygtatygygttgtttygttyggggtattatggtttggggttggattatgttttttttattttagtyggygttttttatttaygygygttgagggtgyggtgagttgagtgyggggttaagtatgttttggygtygatttygtttaggggtttaggatttggygtttaaggggttttttggygayggagattttygaygtagtagygattygyggttgtttaagttgatttygttygygtttygagyggttttgggygygyggggtttyggggattggaggatttyggggggyggygtygygtggtggtyggaaggggaygttaagttyggggtgggygtyggaygtttttygtygygtttgttygttttgtttatygygattyggygggtygtgyggaagygggggttgttgyggtttttgttgtygttttttttgttgtyggtyggygygtttygggaatyggygtttaggtagttagggtttggagagygygagygttttyggaggygygtggttagggaggatttygattttttgggyg

SEQ ID NO: 7917 - DNA, 989 bp, Artificial Sequence
  Description of Artificial Sequence: Synthetic polynucleotide
ygtatattttgtgyggttygagtggttyggatggtatagtttaggtgttygggttaaagttggtatttttaaagtttagaaygtaatttgggygygttagtataaattyggttttyggtttttttgaagttagttaagttygtatagggtttttagygtttggaaatttgagaggygtggaagggtggggagtttygygaagtttttagtttttgggtgtttttyggtttygygggggagygggtttggagttaaatyggtyggtygtaggttggagtagygggygtyggagygygyggtggggatgttygaaaaggagttagaggtttagtyggagagttygagaataygagggatgtttattttgtaatatggttttaagtttttttttgtttaygyggaagygtttttygttttatttygggttgtgtagggtygtttyggygattaagtygttttyggagtygggtattggggagtyggtgttgygttygttgttggagtyggggttygattgygtygttaggtagtygggttttttttgggyggttatggtgggygygtagygttygggttttygttgtygtygtygttttgtttgygttgtygttttygttygtyggtygggtttaattggtttttagygtygyggygttagttygtttttttgtagtygtygaygttatygttaaygtygtygtygttattgagttttyggygtattttagtttygggygtygtttaygttattygttatttygggtygyggtttyggttygggtttagtggttgygtygtttttygttagtaaygttygygyggaatgagygygtygygttgttygygtttttattygtagggttyggygtttttttttygttygtygtttttatagtygygygtttattggttyggttagtttayggggagtygyggygggygggyggtttttggygtttatatattygygygygtatatatatattayg

SEQ ID NO: 7918 - DNA, 2400 bp, Artificial Sequence
  Description of Artificial Sequence: Synthetic polynucleotide
yggtttgatyggggygtttygtygtttttttagtgtattttatygttttyggttgggggygtagtattttggagagaggygtttggtttygygtttgggttgggggygttttattttgygttttgggggttaggggygtttgtygggtygttgtygaggggttttgtttatttttgtttagttyggagtttaggygagttagygyggygagtttttttttttttygtttgggtygttttgagttygygttygttttagttgttgtagttgttgttgttggyggttgyggggagygyggggygygygtygaagaggtttgggyggygaggayggggaygaggaggagtyggaggyggtaaggaggaagagygagyggaggtygaggggtttagyggygtggygataggattagggggtttygagaatatgggttagtaggyggttaygggtyggyggtyggaygyggtgaatttgtygyggtygggygygtattggygyggygagtyggagtygagygtagtygggggaggagggttggygtaggggygttygggyggagggggtygattatttattattaaygagttattatttaataagyggagagyggttygttagtygygygggaggygttyggggaagggggttatyggtygagygtagygtatattygtggygtayggygggyggygyggygtygaggatattygggatygygygyggagtyggggygggttygggggyggygtagatttygggygygggyggttygyggygttttttggttttyggygttyggggttagygtagttyggggygagyggggygygggtyggggagggggagttgttygygtattttatttttttttttttygggygggyggyggyggttygttgtatatatttyggygtatttygttaggtygygtatagygtttygagtttaggygttttttygtttttttttygygttttgyggyggyggyggyggyggtagtagtagtagtaatatggttgttgatgggtgtttggggtggygttggyggygggaggagttttttygagtttttgygtyggttgttygttgttagttatggtaaatggtggyggyggyggyggyggtagtagyggyggyggyggyggyggyggaggtagtagttttagaatgagtagtaatatttaygygaattattttagtttagaygygttttttttttttttttttttttttttttttttttttttttttttttttttttttttttygtttttggtttaygagtttaagatggatgygtttattatttyggtgattatggaggtgtygtgygatagtyggggttaaygtatgtggtgggtttttttggttttttttatggtgatttttttygggggtttttttattattttgttttggyggaygtttaagtatttgtggatygtgtgttgttattgygggggtaagaygaaggtaaygygygtttygggygttygttttttgygttagttttatygtttttyggygttttttgtagtttattttttygtttygygtygygtygtgtttttttttattttygtttgtttttttttygtygtttttttttttttyggttttttyggtgttttyggatyggggtagygggyggygygtygggggtgaggagttgtttttagttagtgygtttygggaygyggaygtttaattttgtttttttgtttattgtagggttgttggyggttgyggttggggtyggggtyggggatttataggttygggtgtygtggtgyggggtggggatagttaatttagyggggayggaggaagttgggggtagttgggtgygtgttttgtatygtttatttgtyggggttyggtttttggyggtgggygagagggagtatattygtttatattttaggaatttgttggggagatgagttygtggggttagaaagaagggaaaaattttttgggtaagggagagaataattttgtataagggaatttygggggaggagtatggttygagataatagggggatttygaggggygagagaagttggggagatttattttattattgggggtagtttayggggttgttatttttggaatgtgtygaggtygtatatttgatgtaattttttatttygttttttaggtgttttagtggaatatattttaagtttttyggtttttgtttttttgtttttaggttatttattttgggttttyggaaatgttattagtagygyggagttggagygggagttygtttgaggtygyggttttaygyggagygttttttttggygttygaggtggttagatgtygtyggttttagttatttttggtgtagaygtttatyggtattgaggttggygatattttyg

SEQ ID NO: 7919 - DNA, 1859 bp, Artificial Sequence
  Description of Artificial Sequence: Synthetic polynucleotide
ygtayggaagtttttgtttagttgttagygygygtygttaggggttgtattgaagttgtggattygggatggggaggaggttggyggttttygaagtagggtttatagygggggagggttagygtygtttggyggtggttgygygtggttagtgyggatttaggttyggttyggtyggygttgtttgygtgtggttygggyggagygagggtttttggagttyggttygttttgggttttaggaagttyggygtgtagygttagaggtygygtgtgttgggggagggaggagtatagattgtgtttgggggtatttaggaygaatttatagaggggtggttttgttttatttagggggtgtygtgggtaaaggttttggggttatttgtttggtgttttggagggygtagggtaggagtygtygaggttygygggttattgtggggygyggaattttagattaggtattygyggtttaattttygggttaggggattygygggggttttaygaatttgtttggtttatttgtgtaatagaaattygttygygtttagtagygttyggggtygtttgygtyggattygtagtttagtatttttygygttttggatttygaggaggttaggtagagagyggttygygyggttttygtttgygtttttagtttygygttgggtagygggatatgtttggtttyggygtygttatttyggttttygtttgtttttgagtgyggagttyggagtttttttygyggtgygttgggttttagagggttagaggttattagggggtyggtatyggygggagtttagtygggygygttttyggtttttttttatttaygtttttygyggtygttygggtttaggggygtagyggggaggagatttyggttagggtyggggagygygagggyggggyggggttyggyggggaggggygygggygggyggggatyggggygggggtygggttygggggyggyggyggygygggygggaggaggaggagtttttygygyggggtaggggyggagygagyggtygygtygyggagttaagtgagttygtttyggagtygygtygtygtyggtttagtatttygggygttygtygttttygtygtygtygttagygyggggatgtaggatgtaggygggygttaggttttagyggyggyggyggtagttgtagtagtagtagtttyggyggyggtagttttttttttggtygatggaygtagagtygtygtygtygtygttttgggtttggatggtgtygggttyggtygggttgtttyggtttagygygggggtygtggttttttyggtgttgttygtttyggtttygtygttygyggtttygttgtttttyggttttttyggttggtyggtttygagygagtyggtgttttygttgttgtygttgttttttgygttagatttygtygtygtygtygtygygtatttttttttygygttttaygggtaggtaaygtgttttygtttygtttyggttygggtygtygttttttttgtttttgggygygttttgttyggttyggttttggttttyggttygygygttttttttttyggyggttttygtygttttaaatttttaggayggagttyggtagtygtgtttyggygagaaagttygtgtttggaygttyggtygtttattttygtagttttggtaggtgttttygggtgtttggayggagtygtggagggattygtygtttaggttygygtggggatygtagggaattygygttaygtygggggttattgtttatygygaggtgttgaagtggtttygtgatygtygygggtygtggttgatatygyg

SEQ ID NO: 7920 - DNA, 902 bp, Artificial Sequence
  Description of Artificial Sequence: Synthetic polynucleotide
ygggttyggttggtttttagtaggtttgtyggggtttttgtattttgtgttygggatttttaatttgygaatagtttggggaggttgagygygagttaggagyggattygggggtgggggtaagygttaygtgygygttaggtttttggtgtgttyggtaggyggygttgygtggttgyggttggtttygagggtgyggggggyggygattygggagggaaaatttttgttttttttyggggtttgttttgttygttttttaaattygttttatatttttttygattttygtttttgtaagygttatttgtagttttatyggttttygtaayggtggtggtggttggtggggggtttygaagtttgtttttggttagtyggatttyggtgggagatggaggtagaaatttyggttttttaggagaagggygtttgtttatttttttatttttyggggtttggggagggggttgggtaggggyggaagygagttggagtygtgtttgtygyggygttgyggagtggaatagatggttggggaggggagagggtgygtggyggggaggaggaggggtgygggggtyggaggatagggaaygaggaatttygaagtttggagttttttaggagaagttttttttttygtttttttttagaaaggggggtatatatgygtttgtttttttttyggagagttttggtttttgttttgtggtagattttgtygygtaattttttgttttagggygygttttttatttttaaattttygtygygggayggggtggyggggttaggatygttaggagyggttygggtygygagggttaatggggtygtttttttaggggygaggaggyggygggaaaygggttyggggtggggaaygagttttgggatyg

SEQ ID NO: 7921 - DNA, 2044 bp, Artificial Sequence
  Description of Artificial Sequence: Synthetic polynucleotide
yggygttttygttttgtttgtatttttttttattgtttttttaygtttggaatgttttygtttttgtagtttgtagatagyggaaatygygggtgtaaatgtgtaggggtygttgatatgatyggttgtagaagtttatttagggttattygaataggttagygttygggattgtataagaggttaggygatgttgtgggtttttaaatttgtatagttgygatattttgygaygtgttattttatttttagtggggtggggtgggggatttttttygtagttygttgaaagygaggtaggaattattgtaatttttttgtttaggttgaggtygttatygtttygyggatgtaygygttgtaggggygtttttygtygygggtayggygygggaagggatggggtttggtgggagtgggtaggtggygggagaggygygtgttygtgtattagaggttttygtgygtgatataggtygatgagtttttgygggttgtatttaygyggagttatagatygaaaaggttagtyggtggtyggtgtgttaatatatatagagagaygttygttaggygygttgtaggttgggaygaggttaggagggtttaggttggaggagggttgaggagggttgygggggygggtttyggygtagggygttyggagyggagggggygggttygaggyggggygggtygyggygttgaygggttgtygtygttgtattygtttttagttygyggtgtygagygtaggyggaggtatatggtttygaygggaggygygyggygagtattyggagttyggttttttgtttgagtayggtagtygygttttygttygygygttttygttttttyggtyggtagttygyggatatgatygtgtagtttttttttgggttgggatttgtttgaagattttttttatggaagygatgtttttttagtaggagattttagggggatagtyggggygttttttttttttgataggagtgtttyggttygygggaggtagttgtattaagaaggtgaggaygttgagygggggttygtgtttttygtygtygtagtttttattgtyggygygygtttttygygttygttatagtagygygttaggyggaygtygygggaatttgaygttygaggttygyggtttttaatgagagttttagaatatttttygtttttgayggttagyggtagygtygtygtttttygtagagygttygttttttygtttttagagttttagttttttttygagygatttygtagtttttttttygtttttattygtygtyggttttgtagttyggttttttttttagtttaggygygygggttgtagtgggygatygttttttttygatttttygtygtgtttttgggtttttygaagtggtttgggygagtattgattgttttttggyggtgttagttttaaagttagggtyggygatgtttgttygggagyggtagtyggygttgaagaaggtaggtagyggggttgyggygttggtgggttyggtttttttatttgttygtygaggygyggttgttttatagtagttttyggggggtagatatggggagtattgttttttatattagggttttggatgatttygggttttttaggtgggggttatagtttgaggggygattgtggatgataaygttygatattayggggatatgtaggttyggttgggtttagaatygagtagggtgggggygggtgggttgtggttgggggttttgagggttgaggtgggggattttttttttgtattggtttttggtttttgggattttggtygggttggatagggattygggtgtyggtgtgggygtgggggtagygygtgttttttgttaaagttgggagagggatgtaggtgataatttgtagygttttatttygataaatayggtygttgtgttgygggaggatttygattygggttaggtttygttggaayggttttttgagtaagtgtaygtgggtygygggttgtyggtttttgtygtttyg

SEQ ID NO: 7922 - DNA, 1152 bp, Artificial Sequence
  Description of Artificial Sequence: Synthetic polynucleotide
yggygtatataagttgaggattgtygaggygttttttgygaggtaaataygaagtygtttggttagtgagaagaaattygaggtggtttttggggtagatagagtaggatttgtttttgttttttgtttttttygtttttttttttttagyggyggygatygtagtaatagyggtagtggyggttgttgttattgttttgtygttgtygagtyggttatttgggtattygyggagtygygtygttgttatygtttyggyggtttttyggagtgygyggagggggyggyggaggagygagatatttatagtaatygaggatgygaggggygtttagtagtagygagtgtttgggagttaggaggaggttttygygygtyggtaatttttagtgttaggygttttgtagttttygygygtygygtttgggttygtatygttttygtagtgagggttygttygagyggtaagtttttttyggyggttaagtygatatttttttttygtttygtygtttatttygggtagtagtygyggaataatggagagygtagttagtagttttggagayggygttygggggaggaygygtygtygtygtygtygttgtygttagggtaggygygygtygygtggagtygggygggtgygagggygygyggyggggggtggggggtaygygtygygyggggggygggggtagtggggggygygygygygggttyggggagttygyggggagagttyggygttyggygtagygyggygyggttaagtttygygtttttttygttttttttyggygygttygttttygtttygtygttygtattygttgggggygtttagaaagatgtatagaggtaayggttaggggagyggaggtttaagttatatgtttgygttttygggggttagagttygttagttttygyggatttyggttygyggttagttygagyggttygggtgagtagyggtatagyggttttttygtttygyggttttygttygtygagaygtggttttaagaagtggtgtygtagtyggggtagaggyggaggaagtygagtygggtaagtygggaaggttgyggagaygttttgtyggggtaggtgttgtagttttagttagyggtttttayggagggggyg

SEQ ID NO: 7923 - DNA, 872 bp, Artificial Sequence
  Description of Artificial Sequence: Synthetic polynucleotide
yggtygggtttagygatgyggttgagttgtttattygygtttgttgaatyggttaattagyggygttttyggatttagygggagygtttttatgtygatygyggtaggygtgygtttttyggggtygtatygttatggygatttgtttatttgattygtttygggtggattygtygygatttttgggygtttaggtttttgagggtttaaygggygayggttttttagttttagttgtgygttttygttygggygaggtggggttgatygyggtygtttgtataygttttttttggttygygttttyggtttgggagggyggattygtttattttaygatggtttyggttttggaagggattgttttygtgattygtttttttaatagtygttaataattttttttaaygttttttgygyggttygtttttgagaattttggttygggagagygaygyggggttttyggggttgygtaggttgyggygttttgtttaygttggttygagggygyggttygtttygggtyggtttatatatttaygttttttgtygggaggyggttgggaygyggyggggttgttttaagtgtagtygyggtagtgttgygtttttatygygggggtttttgygggtygygtttgtttygttyggttttyggtgtatgtggtttgygaggyggtagaggagatgtggggatttagggtygtaygtygtgttygaggtttttaygagaggttttttttygygggtttttgygtaattgygtgaagtyggttygggaaagttaagattgtggtttaggaagaggaaggaaygygggygatagagttggggtttgggaygttgagggggtyggtggtagtttttyg

SEQ ID NO: 7924 - DNA, 1070 bp, Artificial Sequence
  Description of Artificial Sequence: Synthetic polynucleotide
yggygttgagttttgtttagygygattyggatygayggaygygtagagattttgtygggattygttttttagtyggygttyggggagtygtyggtyggttttatttttygttygggagtygggtagggygagaaggtagygygagtggyggtggygattttygtyggggtttttgygaygagyggtgattagtagygttygtagtygyggtttygttttttattyggaygtggttaagyggyggyggttaygaygttyggtttttygggatygttyggttgygttttgggygtatttgygygtttggtttygygtttygyggagagggygatgggtttyggttaggattgagtttttttttttttttttttagtttygtttggtatttttttttttgtttygagggygagttayggtttgygtygtygttttttttttyggtgttttyggttygtygttttttygygtttttttttttyggattygttttyggggttattatggtygyggttatygttagyggtttgattygttagaagyggtaggygygggagtagtattgggatyggtygtttgttagtaggaggyggagtagttttagtaagaatygygggttttgtaayggtaatttggtggatattttttttaaagtgygtattttyggttttaagaagygtaggttgyggygttaaggtttgtgggggttatggtygggagatgygtttygggtygtttttttttygtttaaayggagtttttttaggttttttttttttttyggttttttyggtttatttyggtttyggttttttttttgagtattttgggtgtygtygyggggattttggagttygttgtygggtaatttgtagtygtygagaagtgtagtygttagagatggtaagttggttgtttttygtyggyggtttttgtttttygygtttttgtaggttgggttttgggaaatttgttttttttgagtttyggtttttygggaggatagggattggtattggttttggaaygyggggtatttttttttgttatattyggggtygagttatygttyg

SEQ ID NO: 7925 - DNA, 395 bp, Artificial Sequence
  Description of Artificial Sequence: Synthetic polynucleotide
yggyggtttttygttttttttttatttttttygtttttatttttattttttggtygttygaattttygatygggagtttagagttttgttagygtygtattgtgygtygygtaagtygttygatttttttagyggtatyggttttaagtagtaaatatttgtgygtttttgagttagggaygygygtggggggtgggygtgtaygygggtgggttagygtagagtgggagtttgtgggtgtttttygtygggatttttaatttagttgttttygagagtttaagttgagygtygtaygtgttygtgttatttgttgtattggaygtagtttaatagygtagagaggtttttattyggtatttagttygatgtgggtygtttttttttttttagyg

SEQ ID NO: 7926 - DNA, 265 bp, Artificial Sequence
  Description of Artificial Sequence: Synthetic polynucleotide
ygtyggattygyggaaaaggtygttggaagttttttttgaagtyggtagtattaagaggattaataygggyggtgggtatygtttttattttttygttggttttatttttygtygttygtttttgtttttttttttygtygtttttttttttttttttttttttttttttttgyggttyggatatttttagttygaattyggyggtttttgygtttttgtttygygtttttttttttgtatttgtttygygtttaggtgttttyg

SEQ ID NO: 7927 - DNA, 1169 bp, Artificial Sequence
  Description of Artificial Sequence: Synthetic polynucleotide
ygagttygygttaagagttaygtygagaygygtygtyggtggggttaygygagatgtaatyggagagtttaaaattagtttaggattaattttttagggattygtttaatttttttygtagaagagtttaagtggggtagtggtygttataggttgaggatgattttyggaygygttttaggygygatygtattattygtttttagtttaaagtttgagtgatttggtattatttttttaattgttttttatttttttygtatttttgttgtgtttatygtttttaygtatttgagagtttaaattatgttaagaygatttggagaaaygttygatttgttttttaagttaygtaaggatttatttagaygtaygttygygyggagaygtaygttggtataygygtttatataygygagtatatataygygtatattattyggttygtgygygygggtygttgtttttgttgtattatgtaaaggtggttgggaaagygygttgatttatatttatatagtttattttttttttatagtatgtgattaataygtatttyggggaggagggagygyggttgggggtgttaatyggaagggaatagatagtgagtgttattttgttgggaggttttagaagtaaagygttaaygaygatagtagyggtggttttagttttattagtaattgtygttggtaggagtattataygttttaggagtttttygggtattaagtatgggtttagttygttttagttattttttttttttatggttttattttygttgttagtatttygattttagtttgtaattttgattttgggtttgattataaatgaygaaagatygyggtagtttttaaagtgygggagygagtttygtattggttagygyggyggagggatttttttaggaggttttaagtttttaagtttgtggagagatttggtaatagttggtaaggtttgttttagttattttygttggttttttgtttttgtatttagygtttgagggygttattygttttttttttgygttttaygtaagyggtttaaggaatttattygattyggatttygtttygtatgttttttaagttttygttattttygtaggygttttagaaaggygtgatggttttagtttagtgttygttagttyg

SEQ ID NO: 7928 - DNA, 1743 bp, Artificial Sequence
  Description of Artificial Sequence: Synthetic polynucleotide
ygttttygyggttgttttttttttagggtygtyggtggtttaggatttggttatyggggaggggygtggttttgtygaagtygatgagttataygtyggygygatggtagtgatygtgtataaagaggagygagttgtygattatttgygagtttygtatygttaggtygyggttttgtttagagaygtttttgtygggttttygttttagttttygyggttygggtattygggtagtygtygtttatttygtgttttttgaagaattyggatatttttagggtgtttyggatttgttgtaggyggtttagatatygtttttgtagagggtggggtgggagaggagggtaaattaattaaaygttaaatgagtttttgttaaygatgaggagtygggatttaygttgtgtttggtaaatgtygttaggaggaggatttagggtttygtttagygtggtttagaagggaaggagygtagagtagttgygagttagygyggtgagggttatggtggggatatagtygagggtattgggttagatgataggggtagttttyggttttaggttttttaatattttagggtttgggatttygtttttattagtatttttttatttttttgtataaattttttaaagaygygaagtatttgttttyggtttygygtagttttgaagtyggtgttgtaggagtygttygttttttggatgtgggataggagtgttaggggtttygggttygttagtggggaagaggatagygtagagtagyggtattttttagttgtaggggayggygaggyggtgggagagggyggaggggtaggyggggygggagygggggatygggaaagatagygygtagtggggttgyggyggtgttagygaagygygtttgttttattttgatgttttygatgyggaagtygagggtggtgttggagttgatgttttttygttattgtatgtagygyggtttggtgayggygygttgygygtgtttttttttygtgggagttttaggatttatygttagtatttttttgtatatgttttttygtagtttgggtygtttaygggttttggttagttttttttttaggtaagttttgtgggggygtaggtagyggttagggtatgagggggygtatayggagattttttygagtattygtttygggttttttttaagtagttgtttyggtttyggatttttatttgatttttttaatygatttggtagggtaygtatatttgaygtttattttgtagtygagtatataaggttygtygaagttatygagtaggttttgtagttgtaggtagttttygtygtygygttttattaygtygtggaaggtaggtaygtagtygygtagygygttagttattagtygygttaggtagtagygtttyggtttygagtagygttttaggattagttygttggtgttygtygttttaaaattttttgaggatyggtattygttagygtygtttagttttttttygtygygggtattygtttattygttttattgtttattagtgtgttttgttagttgtatttaggygtagygttttttgaaagggtttatgatyggtagattgattatggttyggattttttgttagtggtttttttgaaagygatagggttaaggtttgataatyggygtttyggtaatgtataagttttttttttattgaaatagggtttygttaygttttygatttatyg

SEQ ID NO: 7929 - DNA, 2405 bp, Artificial Sequence
  Description of Artificial Sequence: Synthetic polynucleotide
ygggggaggggtataygtagttttygtgyggaaagatggtgttttttttttatagggttgygygggtatttattttygttgtaaagygttygggttaggygyggtttgtttygggtyggggygagttygttgttttttgyggtagatagygatgygygtttttygttttagttttyggttygttyggyggttygygygttttttyggtgtagtatgygggygttgtgaygttttyggataaatgtygtgtaattgtgtaggygaatgagagttaaaaataagaayggaaaatttattattaaggtattattgygttagygtagttatttgaaggtttttatggttttyggygtttgygtttgaagttygtttttaggttttggggggtatttgtagaaaatttttagtagyggttygttaattagattttagggtgtayggggggtggygtyggtaattatggtaatttttaaaataaaataatataaaataaagtaattaaygtttattaattattattttattttattttttgtattgtttttaggtagttggggaagtygtygggagtgtagtyggatgttggaatttaatgtgattyggttgattatgtaaagattaggattggaygtttttgtagttttatttygttatttatttttttttttttatttygtattagaaataaagtggggggggggggygagtttttggaggagaaaatgataattggtatttaattttaggtttatagtgygtygyggtggggygtaaagaygtaaattttygggatggygagttttyggggttttattgggttaaaygaaaattgatttgatttgttttttaatattygagggagagaaggggagatgaggggagggagggtagggtttgagtgtgtgygtgtgygtgtgygtgtgtgtgtgtttggggagggggaggaggtattaagttgtagtttgygygyggttttgygtttyggyggggttgygtgygtgtgtttttgttygygttgttgaaaygggtttttygagggatyggygttatatgatttygtttgtttttygttagygygtagatygttagttttttagtttgttyggtatyggaggagggtygggyggtatttttygggtattggggttttgyggagyggagaagaggttttagyggggaatggtatatttggatttaagaagtygyggttyggygttagattttggagtgtagatatttggggggaggggagagttagagggagygagygagygagygttagagagaggtagygygtagygygtayggayggggggttgttgygyggagaagatgtaagygygtggggtttygttggtttttgagtattatgtagaaggggattyggttgaatgatggttaygtygygtttttgggattgttggygygtaaggayggtaygygtaaaggttatttgagtaagyggagttyggataatataaaatggtaaattaagtggttygygttgttgtagaatttgtttttttatttygagagygattygagttygyggttttyggggttttatttgttggagggttgygtttgygatygygygtttttttttaagtyggygttgtyggttaaggagtygttggagaaataggtgaggygagygtygygttttgatttttttgygtttyggtygyggttttgggggtttagggttttyggttggttgatggygtttgaattttggtttttttatttttggygttttaggygttttttgtatttttagygagaggggaggtttgtttttagttaggygagtgattgyggygggtagagggggtagggattgagggyggggagtagatgtgggttgyggttgtttttygtyggaygagtttygtgggaggygggtatagaggggtygatatttggagatgtagaggaagatggggttttaaggattagagaygatgagtttggatataygtttagttaaaaatggtgtttttaatttttatttttatygtttagttttaatagtttygatygtttgttttatatygggaaygtgtaatttttygygtttaggtatgggaagggtaagayggaggygttygagygttgttagtttttgtttygtygtagttgagggyggagagyggtttgygttagtttttyggagttgggttggggttatggggttataygggtyggttyggtattatygagyggtggtgggtttttagttggyggtygtyggagtaataagtttaaagatttttaaggatygttttgatgygtyggggttagggttagggttgttgyggaggtagygggaygaagtgggygttttttttttttttygttttttgygtygtygtygtygtygtagtygyggttatagygttgyg

SEQ ID NO: 7930 - DNA, 1920 bp, Artificial Sequence
  Description of Artificial Sequence: Synthetic polynucleotide
ygggygttgttttttgyggtttttttygtygaggtttgtgygtggyggggtttttaggagyggtagttygtgyggtttgggggyggtttttttttygtatygtagyggggygtgtaaagygtttgyggttgtagtgtgggygtttattttaygtgttyggyggygtgygaggagtagtaatattttttgtgggygatgaaggtggataggttgttgaatttgatgttgtaaagayggtagtatyggtggttgtygttgggtagyggygtyggygtgtttttgttgggagtttggaygtttttgttygagtaggaggggggygtyggygggggyggtayggtttygggygyggyggtyggggaygggggygggtygggyggyggtttttggggtttygggtygaggtygtttygggggttaygggattygggttgyggggaggyggygggggygggagygggygaggggtygyggtyggtyggygttygggtttygattttygggtyggttaggggygygtygagtagtaggtygtgygttaggyggaaatgttttagtaggttttygygtatygggtygttyggggggtagtaggggtaggyggyggygggtaggtygagygygtygggyggtggygtagyggggtaygagtattttttgtgygttaggtaggtttygaggttgtggaagtttaygyggtaggtygtgtattygtggtagtyggttagygtyggtgtyggggtttyggggagygggygtygyggttttttgtttaggtygatggggtygtyggtygyggggtygggygagygygtaggggygaggtyggggtygttttygttttygttttygggtygyggygattygggygygggggygtggtygggyggyggggggggyggggygtyggtygygtgtagttygtagagtttgyggygtttgygygtgygtataggygyggygggagagggggtygggggygyggtyggtttagggggtttygggggygyggtyggtyggygyggyggygggtygtggygygaggygtagtagtatygtttgtgtayggtgtaggtttygtggyggttgaagyggatgttgtaggtttygtatagygtgyggttggggtygtttttygygtygtttayggagttattygggttttggttgttttygttgtttyggtygttygygtygttttygggygtggtygygtttttagtttttttttygygygtttyggggttyggggaygagygyggygygtygggttyggygggttggtyggggggygygygggtygggtyggggggygttttgggtttgygygyggtaggygygttttygggygtayggyggtttgaatagtagaggygtttgtgtaygtagtagttgttgaygttgttgaaggtgatttygtattygaagtaygtagygtttttgggggtttyggggaagagttyggtttgygygtygtyggygttygygttygygttttgttgtagtyggttgtgtattagttyggatattttggttaggattttygaggyggggggygtygygtygggttygaataygtattgyggaaggaatagggtttyggttaggtttagttygtygggtatygggttggagttyggygtggggttggatagttyggttttgattttggtyggggyggggttgygyggygayggygttygygayggggtttggggtttaggtttttyggggtttaggatgggggtygttttyggtttttttatygtttttattttgatgtttttgggggtygtygggggttygttgttgtttttattttgggttagaggtttygttttggttttttygttggtggtttyggttagggtttttttgtttagttttggygatggggtgggygttaggtttaggttygyg

SEQ ID NO: 7931 - DNA, 1403 bp, Artificial Sequence
  Description of Artificial Sequence: Synthetic polynucleotide
ygttygttttttttaggttyggtgggattagattygaagttaattttygttaggygttaggtgtagattttaggttaggttagagtagtttttgggttttyggatygggatgttygttttgtttttttttttggtttygttyggtttgttatagggggaggtttyggtttygtatttygggtagygaatttygtyggtygaggttagtttygtgygggggtttttygygggatygatygttaagyggtattgttygtttygggygttygttyggttttagaygtaggttttgyggtygtttygtgataagtatattgaygggttattgttttttgaygagtgttaaaaagttygtttgttttgaaygttaatttttaagtgatttttaygaggttttttttttyggttttttygttgttgtttygttygtattyggtttttagtaggtgtttaagaaaygtttagtaaayggtagygtaggygagtttgttttgygygttggygygttttattgtttayggatggygggygattttaygggattttyggttygtaggattttygttttygaggttgtttttgggtygggaggggttattttagaggggygtttattttygayggygggggtyggggygtygygggtaggggagggygtagtttttaagtagttttagtttggtttagatttygygtttagygagtyggtyggttaggtttatattttttatttgtygttygttttaggggaagggttttttygaygaygttygagtttttttttttttyggagggtyggaggtyggygtttattggtyggttttgggygaygtttygttttttygaygttaygggttaatgagygygygttgttagtttattagtygggttggttgggyggttygggagttygagyggtggyggagyggygagtagygagtagygtttgygggagyggtyggtyggtygggttttygygtttygtaygttygtaygtttagyggggttygtattgagtatgggygyggyggtygtgygttggtatttgtgygtgttgttggttttgggtataygygggyggttggtygggggtagygggtttttaggtaagttttygatygaggtggggggyggygggygyggggggttygggyggtygaggygyggtttyggagggtttttttttygyggatttygagttygtttygygyggtttygygttttttgtttttttgtaaagtaatttttagggtyggttyggggygtttttttttygtagttygggyggtyggggtttttgagttyggyggggtygtattaggggtgggtgggtyggggtttygggaggggaagygygagygygggagygaggaagaaaggyggyggttttyggggatttygyg

SEQ ID NO: 7932 - DNA, 1088 bp, Artificial Sequence
  Description of Artificial Sequence: Synthetic polynucleotide
ygttgaggggtygtatttattygygtaggtattagtaggtagttttggygttygygggaggyggtygggggygggggtttttyggtgtttatygtygtttttgyggttgggttygygtttygggtyggtygagtttaaygttaggatttygttygagttttttagggtttygttaggygtygygttygygttygygtttttttgtyggtttyggttygggttttatyggggygtagggttggggaatyggagtttygttygtygattyggagtatygtttaygtagattygtttygggygagggaggggtygggygygtattygyggggagggyggygagyggggattagtygaagtygggagaggggygtttttayggggygggaaattggygygygattttgggggaagtgtaggatggggggataggggygttttygygggggtggatgggggattatagyggggttggyggggtaggggtyggygtaygaggttggaggaggggagygygygtttttattygggttgggtygtygaggttygyggygtatygtggyggyggtgggyggaggggggyggggggtatttttttttttttgtggygtaggtgggygygttttggatyggtttgaygattttttttygtygttttatttttttggttaaaggtttttagtttttaattagggatatttttagtttatagtttygaagttatgggtttttttyggttttttgaagtygttatatttgtgttagtyggtygygtttttagattttttttygyggagtttttttagtatttggagaygtagygtagggtttygaggayggtttggttyggagaaaagatatygaagttttaattttttttaatttygttttttttttttttttatttttttttttygtttttaaagttygggggttttatttttttttyggttygyggagtttttygaattttgyggggattyggygttyggyggtgtttttttggggygtayggggttggggygggagygaggagattaggtggggaggggattttagattttagaygttaggggagayggygtttttyg

SEQ ID NO: 7933 - DNA, 1812 bp, Artificial Sequence
  Description of Artificial Sequence: Synthetic polynucleotide
yggggtygttgygtttttttgattattgayggttaggayggttttagtttygttttatttgtaagttttattttaggttygagttttygagggtagggatagtttttygggtttygaggtttgattagagtttgaaagtttttgtygggggttgtttygatttagygaggygttaggttgttyggygyggttgggggygtttagygtygggattttagttttgtttyggtygttygttggtttagtgygtaygtttyggtagtttagtttttttttttayggyggtaggagagttttyggtatttgtttggggygggggygggggyggggyggggygggygtygygtttttttgtttgattggtaggaagatagattaatyggaggggtttttyggggggaggggyggtgtygtgtttgagtygggygygggygatygagggagttgtagttattygygtgyggtaygygtyggtygtttgttyggatygyggttattagtgtygyggtttttygattttygtttygtygagtygygygygygattgttattttttttaattgttttttaygattttttttgtgtatgtatttattttttgtttygttttgttttttttaaggyggtggyggyggygatagyggygtaagttygtagyggggagggggyggtyggaggatgyggygyggggttgygttygttaygttygttgttgttgttyggttygggtttgagygtygagtaggtgggtataggtgygtyggggggygggaggygagygttggttagagggaattygtggattyggygatygaggggyggatttggyggtaagggaygyggygatyggtgtygtttygttttatygtttatttttttttttttyggttatygygttttttttgggttttttttttattttygtattttattttagtggttttttatttttttatatttattttttatttttttttagatttttttgtaaaattttttagtygttgygtygttttttttaatattttttttyggtttygtttttagtttttagtttttttttaygttatttttatttttattttttttyggatttygtttttaagttaaggagygggagggggatttattyggtgtttgtyggagtggygyggggggtgtggtyggttygtttttttygtgtttttygtagggtaggttatagttttttagattttygtttaggtggtaaagaagatggagttgggggtygygtttyggyggygyggggttygaaggygaggtygtttagttygtattttattttaygtayggtataygtygtygyggtttttgttaygtatattttygygttgtttygtttaygtgggygtyggggaggaggttygagagatgggaagaaaggttggtatttatttttttgtygggtyggygygttttgggygtattggttttyggagatggygygtaaggattgattttygtggtgttagatattttgtygggygttttgygtyggggttagyggtttygttggtttgygttagtgygttgyggtttygttttttagtttttyggtttttygttttattttttttgttgtgggtttttgagtattyggtttgggtagtttagatagaggtygtttaygaggttggygttttttttygttttagaagtatttygtttttatatattttagttygtyggttttttgaaggttgggttagtttyggtttttygttagtttttgttyggttttttgagttttagygatattgtatttaatygttagttttttttygtygttyg

SEQ ID NO: 7934 - DNA, 5819 bp, Artificial Sequence
  Description of Artificial Sequence: Synthetic polynucleotide
yggagggaaatygggtygaygataagggtggttattttygggtttttygygttyggtttaagygtttttgggtggggtagtttaaayggggagaggggtttygtgggtygagggttygaggtygtagygagtttagygtttggttaaatttggttygygygtttttttattgttttgttagggttgtgtgatttttyggagttttaygttttygtttaaatagtttttagygtttttgttggtattyggggygtttttattttagtttttgtattyggygygtygygygtagatyggayggaggggaaagttggtaagagygyggygttygygggagaaagygttaatgggyggtygggtgggagtagygygttygttygtttaygttaygtyggtgygggttyggttgaygatygyggygtttggggaygtyggygygtttygttygttaggtgtttygtttggaaatgtttttattagttgtygtyggtttttygttggagygygygygtygagttttygygyggagttttygygggttgtygggagyggtttagygttatygtaggtaggtgaggtttttygttttygttttygtttyggggtttygagattttttttttttttygaggaggyggaggtttygygyggtygtygaggggagygggyggyggyggttgyggygatttttyggtgygtttygggttgygagttgtttttygyggtttyggtagttatayggygygggygggagtttttttagtttaggtagggagtgggtttygtygtataaattttgygaggattgtttttgygtttaaggggataaagtttgttattygtygttaggttttttagaggtygttgygtttgttgtaagttgygggaagtagggtgygygggtyggygyggggyggggggtggggggttyggagtggttaggtttgagttttggaygttyggayggygtttygtttagttttaggtygtatttagggagtaagyggygggggygtagygggagagaggagggagagggtygygggtttttatggagggyggttgggaatttagagatttatygtttgtttttgtggtttttttttttattattggtttygagggggtttyggggttgtgaggaaatgatttgttaatttygaggttygttagtgyggygttagygatygtgaggttttttaaatttatattttagtygggtgtttygagyggtgggygggtataggygtttttaaggtttttggttttaggttttagaaagaaaggtttttgtttggtgtttygggttttyggtttygtttttggttggagttaatttttttgggttggaaggagtttttttyggaygagtttttggtgyggggaattggtggtttttagggtaatttttgaagtattagggttaggttggtygaagaagggttagggttyggtttgttttttyggaggttttttatggtttygayggttaayggtaatttygttaaaataggygattygtttgygtttygygttaggggttgattattttttgttttttttgyggtttgtttyggttttggtttttygtttttyggagygttttaggttagygggagtattttattttttygaagttgagtyggtgttgtgtatttygggagtyggttgatttttggtttatttgtttaygggtgtatttagtatygggggtttttagagggaggaaggtttagtatttygagtttatgtagaygygtttagttgatatttgagatgttgagygttttatygttggtgaaagggatattgggtgttttygttttaggtttggttttttggtgaaggtatttggaaaatattttagtattatttatgggagaagggtggtttagtgagaattttyggtttgggtaggygggtttaggttaggttatagggttttagtgagatgtttyggtggtygttaatttataggttggattgattttgtgttttggaatgagtagtggggtttgggtgaggtygggygggttaggaggttttttgggtagttgygagtttttygaggtagggtgattgtgattgggttyggattttaggygttggggtttgttggygggtaggaagtggagygtgtgtgtgyggyggtttgggaaagtygatttagaggttaggtttttgggttayggagaaagggtygttygttggtggggattggagygtygatttatgtatataggttggaaaggtaaaagagaataggagaaggtggyggtggtggttaaaggaagttttygaaagggtttttaygtattggttgttttgggaagtggaggttgttttttttagattttgtttagaagatgaatggtygtttgttttggggtttyggttttagttaagtttygtygggtttggaaggaaggaaatgtattagttttaggtttgggtgggttgagttgttgtattagagtttagaggtgtagggtataggtggttgggtttttgggttttggtttttttttttagtyggyggagtgtttatagtygtygaggttaggttttygagtataggtgaggaaaggataagttatagttgaatgttttttttttgggggtttttattttttattttagtttttggttyggttgggtttatattttttttttagtygggttttattatttggagagagygagtagtttgtaaataataaataatgggaagtagaaggatgttygggaaaaattagaaaattgtaaggagtggggaggagggagggtgggagaggggaggaaggagggtgggggaggggaggagtaggaggagagggaaaggggttgagagatttatttttagygagaaatttyggtggttagttttttattatttataggaaggtgatattagygatttaggtgagaaagaaagaaaygyggtttgtygygaaattaatatagaatttagaaataattattaatgttatttgattygtgttttttatatatttttygyggttatygaygttaaattgtttgaataatttgtatggagyggttatttattattttygatggtttttttttgtaagtagttyggaygtggttygtttyggtttaaygygatyggagaattygtatttttatttgtaaattaaagtaattaygtagtagatattatatgatgtgtattgtggtttttagatagttattaattatttttaatygagttgttaaaagagtaggtagatttygtttttgggaggtaggtttgtagttggggagagggygaggaygttattattaattagagggtgattttggggygatttataggtttgaatttaggaatttttttgagtaagtttgtataaygttgttttgtayggttttttttttaatttattaygggaggtyggtttagggggygagggtaatyggggygagtttyggtttyggagggygatggygtagaaggyggggaaygggttygggatggttygggygtttttttgtygtttttttgtygtttgtttattggttttygttttgaatttgggtaaggttttagggagggtattggtygagggagttttggggtgggygttyggttttttttttygattgtttygtgygttttagatagaaagttgggtaaaatggataggggagggygttttygttaggtatttaaygttttttttttygtagttagttttgyggggygtygggagggaygagtttagygggaggggtyggggtttgggttgaggaatttgttttttygagygygtagggtygttyggtagttttyggtttagtygygaggggtagggggaagtyggyggagtayggtyggyggaaaggggatyggggaggaaagtyggggaggygaggtgggggyggtgggttgagygggaatttaaaagatygyggtggagaagatggggygtttttygygatattyggttgtttagaggtgtaaagtyggtgggygtaygttyggggyggttttatagttttygggtygttagttttagggtgtygggttttaattaaggtttygaagtttttaygtatttgagggtattttgattagtttttgygggttgttttgyggtygtagtgggttttgaaagtttatttyggygtagggtggaaatyggygggaggygttgttgattttygattaaataatagtgaygagaygygtgyggggygtttgygagtttttttttgttattyggagtagagygygttagygygaggtygggtyggtygtttgygtagygtygggttaattttaattgttgattatatttttagygtgtttttttataggttttatttgtaattgagaygaatgattatagtggggygggaaggagtagttgtttattaattaatttttaattaaaagtgtttttygttttygggtgattaaagagaaatatygttygttgggygatattgattyggatggaatttatttgttaaygttyggaggaatggttttttygtttatygygyggtygggattgttttggtttttttyggtttgagtygtyggygagtgatyggygagtttgyggttaggtygggttgygygaggtggggttgaygttagagtttttttygttttaagtygygtatatttgatttgaygggttygygygattygtttttttttttttttttttygtaaaatatgtatttttgtygtygttgygaggtygttyggttttagagttttttygagttttyggaatgygaagttaaaggaatygyggyggttatygttgtttattttgttattyggttagaaaagtttgyggagygyggggatggattaatyggtttttttgtttygtttttttagygtttagaagtttgtagtttyggagtagtggtygygttaygtyggttttagygygtagaattttgtaggtttygttygttygtttygggtygygttygttatgttttattygtagtttggatatttttatttttyggttttttaggtaagyggagtttygtttygtttaggttatygtaggtgtyggtagggyggatggggyggggayggggggtggggagtgttygatttaygattgtttgyggttttygagttagtaaggtttgggtygygygttttttaygtttaatttttgttttttaaattttyggggaaaggtygaggygttaagaaaattygaygggtygggttygggttttttgatgtttgaattataaggtttaggttgtgttttaggggagttttaggattttaaggaatttttggggaaggaggtttggygygtaaatggygttagaggttttggaaatttttyggggaagggtgtaggtgttyggttgggttttaygtggyggaggaggttagaygygtataagttagtggaaaggggygagtattttggtgtggayggygggaggttygggggtattyggggtaygttttygtgggyggygygygggattggtaaggtttagggttttagtttttagttyggtttttygttagttttygyggtttttttttgtagtttttgatggttattaattttttgagtaygtgttgygagttyggaggtygtaygttggyggatttygggttygtygtttyggtttaggygtyggtttattgttyggtttaygagagtyggttgttggttatygygygttaygagtttaattyggtygyggygttgggygtttatgggggtttttatggyggatygtagggttatggtaattaygtgatttayggttyggaggygttygttttttattyg

SEQ ID NO: 7935 - DNA, 2001 bp, Artificial Sequence
  Description of Artificial Sequence: Synthetic polynucleotide
ygttttygtttygtgttaagygggtttaaggttygaggttttttygtttataatttyggtgttyggaataygttttygaggggtygtgttgtyggggttattattygygattggatttygygtygtgttgtttttttygggtttygagttygtttagyggtttgtayggtttaggtttgagttgygggttttttttgtggggygygttgggagtgagttttatttttaaagtttattttaaygttttaggtatgattaygayggtagaggtyggtygtttattttygttttttttttyggttagagygtttttgtygggagtygaygatygyggtttgatttygggttttatygtttattttyggttttygttttttttttayggttaggggttatatatagyggaygtttygtttttagtygtttttttgatttttgaatttgggagttagygtgttygttggggtatgtattgttaygggtattgggatttttttgttgttgyggggaggagtttygayggtaggtgggaagatttagtttgttygygttttygttttttagtttttgygattygggtygaggtttttagtttttgggttttttygtttygggtttgagggaggggtygggttttygggtttgtagattygttatygygygtgygtatgygtyggtygygagttttygggtgtaggtttgggyggtttyggttygygtatttgtttaggygttgyggtttagygygttttaatttttagttygggyggagagygggggygggattgaagtatygtgttttttaaagtattttttygtygtyggtagttttggtttygtaaatgttttagygygtttaggygtaygtagagattggygyggtagttttygggttaayggtaygygagtaaagttggttggygatttgggataygtagtagaagttgaggttgtatygattttygtygtttygggggaggtatgggttygggtaggtttaggaggaagttgtatagttygaggttygggygggagtggygggtygygggtaagggaaygtatatttggaaggggttaggatttyggttggagtttggttttttatggygaggaagtygattgggaagggttttttggygaggtttttttgttgtgttattttttttyggtagygtygggygyggggaaygyggggttgtatyggggygggggagggggttttattyggyggtttygaggattygattttggggtygggttyggygggtaggtttgtttaggagttagttggtaaatgtagyggattgttaygttattttattgttattatttattgtaaattattgttttaagttttygggagaattygtygaatttgagaggggggagggggatgggggtgggygygtaggaagttttataggtattagggattggtgatttaggatattagtttttygagttttttttgggaatttttagtatttagattgtttttgattgtagggattayggtggggygttttttttttaagtttttttygggatatygggygygtttttttygtttttgggttagygtatatttttttaygygatgattagtatagttattgtgaggttyggttttggtygygtttgttttttgygagtgataataataaaaattattggaattgtaaggaagtttttggtttyggttttttagtygttgttgttttgggtgtttyggttgyggaaagatttygtagtygggttygatttaygagtggaatatygggttgyggatttagtygggtttataggattggygyggggtttyggggataggtttygtagggtttttttgygtatygtttgggaygtygattttgttaatttggaggataatttttgtttttattttattagtagatttttaaaaatttagtygtygttgaaaygtgttttttattygttyggtttgtttgtagtttttgaygagtttyggtatagttttyg

SEQ ID NO: 7936 - DNA, 1265 bp, Artificial Sequence
  Description of Artificial Sequence: Synthetic polynucleotide
yggttygggygttaggtagaattttagttygatgttgtygtygtygggggagagggaattygttgggagggatagtygggggttggggaaggaagagygggtgttgggagggtttaatattggyggagttttaggtggygaygygggyggygagagttgtttygaggygggggtttygggtaggtygttttttaygtagtatayggagtagaagatttgttttttggygagggaygggygtygttgatttagtaygtttaggattagttygtyggyggtttttaygygggttttgggttttagtttttygtyggggggygttttttgttgtttatttttttttttttttygatttttagttttttttttttttttttttagttttaattgtagtggtaaggtttggggattgagaggttyggtgagtgttagtttygtaggttgygtyggtgttyggtttttattttagttygggggttttaggtttttygygggttttggggygttggtgttygygtagttttagtygttttygtagttatygtygttyggtttygyggaggyggygygtagygggggygttygggygttgtttttttgaggtttygggggtttagggtggttygtagtgttattggttagggtttgygatttttggggttygtygtygtygtttatygtgttttgtttttygtttatygtygttygyggttygygtygtygttgtttatttagtygtygggatttttattyggygttygygggtagygggggtagtggttyggttygattygyggtttygtttttgttttygggtttttttttttgggttgggaygttttaagtttttttyggggagttygtgtttygaggttgyggygygtggggagtttggttyggttygtygttttttttygtattttggygyggyggggtatygtttygggggygtygagggtygttygttttgggttygggygygttygttttatatgtagttyggggyggygtygtagttttagygagttttaggygggatagaggggtttgggaggagayggtygttagtttygygttattatyggtttyggttgtyggaygygyggttygagggyggtggttaaagggtygaggggtttgtggygtygtygyggygygtattaggaggtgtagtyggagygttggttagtygtagggtttttgggggagaggtyggagygggygattttttttttttygygttttatttatagtttttttygtyg

SEQ ID NO: 7937 - DNA, 1360 bp, Artificial Sequence
  Description of Artificial Sequence: Synthetic polynucleotide
ygtygaggatgtggttttygtttttygtagtygtygtaggagtttttgtttttaaagyggtaggtaggggttttagygggtttattttaatttgggaaggtyggtgygtttttttatagatttygtagggygttttttttggggattattgaagttttggtatttttaattttagttttttygygttaygggaaaygaagaygatatttttttgaataatttyggatgtgttattatagaggggtattttatattggtttttattttaatttttatttagtatattgtttgtttattttttaaatttygtgyggattgyggtatttagtttygggggattttttagttttgttttttygattygygtaggtgygttygtttatttaagggtagggaggtatgttttttygggttttttyggtygtatggtttgtttgtttttttggtttttttttttygtattaggaggggygtgagatagttaggtygatttttatttyggtagtttgyggygatyggtygtttygagygtagygttagatatttgggttggggggtgttagtttgaygygtaggaagggygtagyggygggagggggttttattttagatttgggaggtttgtttggygtyggttttygttygtttttygtyggtggaggtygyggttggyggagatygttaagttagaggaggggattygaggtttyggttgggygaaggttttggagggggagaagayggtygaggygtggaggggtagtygyggyggggygatttttatttgtttattgyggggtttgttygtggggtyggggtagatttygtaaaggaygygtagtttgtaagttygyggttygygyggygyggggatggggagygtgtgygtygaggagygygygtygagtygggttttygygtttgtgtggtyggttggyggtyggggttygtgtgtttttgygyggyggygtgtgygtgtgygtaygyggggattaygttygttyggagtygtygtygtygtygttattttttgttyggggtygagygtagygttttttttgttygtttygygyggygyggtagtttagtttggtttygttttgygggagaggygtygttttygtygygaagttaggttgggygttggagggaggygatygattatygtttttttttgtttattttataggttggggagggggtgttgtaggttaatgagygttygggggyggggttagatygagggyggtgyggtggggggygyggtggggggygtygggttgtttaattygattttattygtagtatagattggagtaggagttgyggygggaaattttagyggygggggtygggggyg

SEQ ID NO: 7938 - DNA, 362 bp, Artificial Sequence
  Description of Artificial Sequence: Synthetic polynucleotide
ygygggggttatygygttygygaaygtagagtttataygtggattttygygtttgtgatgtttygattygtttygggttttygtatagataatgtygygygtttttttygtagttatttygggattygygtttygygtygttyggaygtttttttgygtttgtyggggatatttatygatattaggaattttagygtgtttatatagtttygttyggttttttggagttygttgagtaygtataygygtaggygaagttgtttttttaggtttttggygttttyggygyggttgttttygyggttgttttygtttatggtyggyggyggtgygtagygyggygttgttygtygtgttgagyg

SEQ ID NO: 7939 - DNA, 2566 bp, Artificial Sequence
  Description of Artificial Sequence: Synthetic polynucleotide
cgtttttaacgcgggagcgtagtgtattttagtggataaattcgagaatcgtacgttgtttttcgtttttatttttgtttttttcgttcgcggttttaattcgggatttaaatgtacgagttcggtgaatgtttcggtaggagggcgagggtttagaggtagtttgtttagtaaaaacgatagttgtgttttggtgggttttgggttattttaggtagaagttagagaagttcgagaatttcggcgggttggtaaagtttgtcgagaagggtttttttggatatttttattacgggttttaggttcgaatttttttttttatttggttttggagttttagatatagataagtttcgggcgcgtcggcgggcgtatgtgcgtgtgtgtttatagcggggtggtcgtcggagttttttaagaattttagttttttcgttttagttgttcgttagttgtgagcgttcgtcgggttcggaggttattcgtaaatagttgggtcggtagttgggagtttgggaggtttttgtttagtttcggggtttcgagaaaggagaagggggagcggagtggttgtttggttgtggttttttttaatttcgtttgcgaagttttcgttgggagttcggagttttagtttttttcggtagtttcggttttcgcgttcgtcgcgtttagcggtcggcgtttcgtttcgggtttcggggaggaggcgcgtcggggtagtcggttaggatattgcgttgttggtttttagagttgcgggcgcgtttggtcggttttatttttcgggttgttggggcgggcgtcgttgtttcgatttcggacgcgcggaattttggagattcggtcgtttttcgttagggtcgcggtgttgttttaggtttcgggcgggcgttttttttcggttatcggtgtatttcgttgttcgtttgcgggaagcgaagaggggttttttgatttgtaatatagaggaaagcgtcgttttcgtttagtttggtatttacgcgtttatacgtattcggcgtcggtcgggtcgtttatttgagttttaaaagttgttgaatttatatggttacgtttcggggagcggggttttagatttggttcgtttaggttatttgcgcggcgttcgcgttcgttcgttttcgtttcgcggcgtcggttttcggttttcggttcgtcgtttttcgtcgttcgtcggtcgcggggcgtatagcgagttagagcgcggtcgcgcggggttttatgtcggtcggcgcgtcgtcgtcgttggggcgtatggtttaggttgggcggttcgcgggggcgtatatttttcggtcggggcgcggggttcgcggtttttttcgtcggcggtatagcgaaggcggtagcgaggcggggcgtgtttcggcgttgtcgcggcgtagtaaagggttggggagtcgcggtttcgtttttcggggcggcgaggagggaggtcggcggcgttgtcgtttacggtgcgtgtttttcggcgcgcggtttttgtttttagtcggagtttcgcgtcgatggggcggcgttgtttagggtttggggtgacgcgacgcggacggacgcgagtttttttcgcgttgtcgggtcggggggttttgttagaggtttcgtcgtcgatcggcgttatttaagttgttcgggggtttcgtttgagcgttcgttttgtagacggtcgcggttcggagattggtaggaggcgggtacgagaggcgcgcggggcgagggcgtcgtggagcgcggggcgtggggacgcgcggcggcggcgtcgcgcggaggaggcgcgcggggatttcggggtttcgtcgttcgcgtttatcgcgttcgtcgtagagtcgttcgcgttgtttagtcgttttttttttcgcgtttgttttttcgcgcgttcgttttcgtttttcggagtcggttttaatttcgttcgttcggttcggtttacgttattcgtttttttcgtttttcgaacgggagttcgagtttttggtttggtttcggtttttgttcgtcgttttattttgcgggggtcggggtcgtcgcgggtggtggggggcgttgtgtttagtaggggcgatagcgtaggcggggttttttgtagtttttttttttattttcggtcgcgtttcggtttttattttgcgaaaggttcgagagaggtcgtaggttaggattggatcgtcgggcgtcgtcggatggtgttgttagggtaatcggatggtacgcgaagtcgttcgaggtttcgattcggttacgggggcgtttagtggattcggagagttattttggggagggggcggtttcgaagaaggattgggtgggggcgtatggagcgggggttgcgcgaaaagttttttggggcggagttgagttacgcgggtcgcgtaggagcgtttgttcgagggtcgtttacgagggatttttttgttcggttgcgcgggtttttgcgttgatgaagttatcgcgtttcgggtcggagtttcggcgtttttgtttcgaatttagcgaagttcggttttatgtttttaattatttaacggttttttatcgtttagcg

SEQ ID NO: 7940 - DNA, 572 bp, Artificial Sequence
  Description of Artificial Sequence: Synthetic polynucleotide
cgttgttcgtcgggtcggtggcgtttatttcgtatcgcgttgtttcgttcggggtattatggtttggggttggattatgttttttttattttagtcggcgttttttatttacgcgcgttgagggtgcggtgagttgagtgcggggttaagtatgttttggcgtcgatttcgtttaggggtttaggatttggcgtttaaggggttttttggcgacggagattttcgacgtagtagcgattcgcggttgtttaagttgatttcgttcgcgtttcgagcggttttgggcgcgcggggtttcggggattggaggatttcggggggcggcgtcgcgtggtggtcggaaggggacgttaagttcggggtgggcgtcggacgtttttcgtcgcgtttgttcgttttgtttatcgcgattcggcgggtcgtgcggaagcgggggttgttgcggtttttgttgtcgttttttttgttgtcggtcggcgcgtttcgggaatcggcgtttaggtagttagggtttggagagcgcgagcgttttcggaggcgcgtggttagggaggatttcgattttttgggcg

SEQ ID NO: 7941 - DNA, 989 bp, Artificial Sequence
  Description of Artificial Sequence: Synthetic polynucleotide
cgtatattttgtgcggttcgagtggttcggatggtatagtttaggtgttcgggttaaagttggtatttttaaagtttagaacgtaatttgggcgcgttagtataaattcggttttcggtttttttgaagttagttaagttcgtatagggtttttagcgtttggaaatttgagaggcgtggaagggtggggagtttcgcgaagtttttagtttttgggtgtttttcggtttcgcgggggagcgggtttggagttaaatcggtcggtcgtaggttggagtagcgggcgtcggagcgcgcggtggggatgttcgaaaaggagttagaggtttagtcggagagttcgagaatacgagggatgtttattttgtaatatggttttaagtttttttttgtttacgcggaagcgtttttcgttttatttcgggttgtgtagggtcgtttcggcgattaagtcgttttcggagtcgggtattggggagtcggtgttgcgttcgttgttggagtcggggttcgattgcgtcgttaggtagtcgggttttttttgggcggttatggtgggcgcgtagcgttcgggttttcgttgtcgtcgtcgttttgtttgcgttgtcgttttcgttcgtcggtcgggtttaattggtttttagcgtcgcggcgttagttcgtttttttgtagtcgtcgacgttatcgttaacgtcgtcgtcgttattgagttttcggcgtattttagtttcgggcgtcgtttacgttattcgttatttcgggtcgcggtttcggttcgggtttagtggttgcgtcgtttttcgttagtaacgttcgcgcggaatgagcgcgtcgcgttgttcgcgtttttattcgtagggttcggcgtttttttttcgttcgtcgtttttatagtcgcgcgtttattggttcggttagtttacggggagtcgcggcgggcgggcggtttttggcgtttatatattcgcgcgcgtatatatatattacg

SEQ ID NO: 7942 - DNA, 2400 bp, Artificial Sequence
  Description of Artificial Sequence: Synthetic polynucleotide
cggtttgatcggggcgtttcgtcgtttttttagtgtattttatcgttttcggttgggggcgtagtattttggagagaggcgtttggtttcgcgtttgggttgggggcgttttattttgcgttttgggggttaggggcgtttgtcgggtcgttgtcgaggggttttgtttatttttgtttagttcggagtttaggcgagttagcgcggcgagtttttttttttttcgtttgggtcgttttgagttcgcgttcgttttagttgttgtagttgttgttgttggcggttgcggggagcgcggggcgcgcgtcgaagaggtttgggcggcgaggacggggacgaggaggagtcggaggcggtaaggaggaagagcgagcggaggtcgaggggtttagcggcgtggcgataggattagggggtttcgagaatatgggttagtaggcggttacgggtcggcggtcggacgcggtgaatttgtcgcggtcgggcgcgtattggcgcggcgagtcggagtcgagcgtagtcgggggaggagggttggcgtaggggcgttcgggcggagggggtcgattatttattattaacgagttattatttaataagcggagagcggttcgttagtcgcgcgggaggcgttcggggaagggggttatcggtcgagcgtagcgtatattcgtggcgtacggcgggcggcgcggcgtcgaggatattcgggatcgcgcgcggagtcggggcgggttcgggggcggcgtagatttcgggcgcgggcggttcgcggcgttttttggttttcggcgttcggggttagcgtagttcggggcgagcggggcgcgggtcggggagggggagttgttcgcgtattttatttttttttttttcgggcgggcggcggcggttcgttgtatatatttcggcgtatttcgttaggtcgcgtatagcgtttcgagtttaggcgttttttcgtttttttttcgcgttttgcggcggcggcggcggcggtagtagtagtagtaatatggttgttgatgggtgtttggggtggcgttggcggcgggaggagttttttcgagtttttgcgtcggttgttcgttgttagttatggtaaatggtggcggcggcggcggcggtagtagcggcggcggcggcggcggcggaggtagtagttttagaatgagtagtaatatttacgcgaattattttagtttagacgcgttttttttttttttttttttttttttttttttttttttttttttttttttttttttttcgtttttggtttacgagtttaagatggatgcgtttattatttcggtgattatggaggtgtcgtgcgatagtcggggttaacgtatgtggtgggtttttttggttttttttatggtgatttttttcgggggtttttttattattttgttttggcggacgtttaagtatttgtggatcgtgtgttgttattgcgggggtaagacgaaggtaacgcgcgtttcgggcgttcgttttttgcgttagttttatcgtttttcggcgttttttgtagtttattttttcgtttcgcgtcgcgtcgtgtttttttttattttcgtttgtttttttttcgtcgtttttttttttttcggttttttcggtgttttcggatcggggtagcgggcggcgcgtcgggggtgaggagttgtttttagttagtgcgtttcgggacgcggacgtttaattttgtttttttgtttattgtagggttgttggcggttgcggttggggtcggggtcggggatttataggttcgggtgtcgtggtgcggggtggggatagttaatttagcggggacggaggaagttgggggtagttgggtgcgtgttttgtatcgtttatttgtcggggttcggtttttggcggtgggcgagagggagtatattcgtttatattttaggaatttgttggggagatgagttcgtggggttagaaagaagggaaaaattttttgggtaagggagagaataattttgtataagggaatttcgggggaggagtatggttcgagataatagggggatttcgaggggcgagagaagttggggagatttattttattattgggggtagtttacggggttgttatttttggaatgtgtcgaggtcgtatatttgatgtaattttttatttcgttttttaggtgttttagtggaatatattttaagtttttcggtttttgtttttttgtttttaggttatttattttgggttttcggaaatgttattagtagcgcggagttggagcgggagttcgtttgaggtcgcggttttacgcggagcgttttttttggcgttcgaggtggttagatgtcgtcggttttagttatttttggtgtagacgtttatcggtattgaggttggcgatattttcg

SEQ ID NO: 7943 - DNA, 1859 bp, Artificial Sequence
  Description of Artificial Sequence: Synthetic polynucleotide
cgtacggaagtttttgtttagttgttagcgcgcgtcgttaggggttgtattgaagttgtggattcgggatggggaggaggttggcggttttcgaagtagggtttatagcgggggagggttagcgtcgtttggcggtggttgcgcgtggttagtgcggatttaggttcggttcggtcggcgttgtttgcgtgtggttcgggcggagcgagggtttttggagttcggttcgttttgggttttaggaagttcggcgtgtagcgttagaggtcgcgtgtgttgggggagggaggagtatagattgtgtttgggggtatttaggacgaatttatagaggggtggttttgttttatttagggggtgtcgtgggtaaaggttttggggttatttgtttggtgttttggagggcgtagggtaggagtcgtcgaggttcgcgggttattgtggggcgcggaattttagattaggtattcgcggtttaattttcgggttaggggattcgcgggggttttacgaatttgtttggtttatttgtgtaatagaaattcgttcgcgtttagtagcgttcggggtcgtttgcgtcggattcgtagtttagtatttttcgcgttttggatttcgaggaggttaggtagagagcggttcgcgcggttttcgtttgcgtttttagtttcgcgttgggtagcgggatatgtttggtttcggcgtcgttatttcggttttcgtttgtttttgagtgcggagttcggagtttttttcgcggtgcgttgggttttagagggttagaggttattagggggtcggtatcggcgggagtttagtcgggcgcgttttcggtttttttttatttacgtttttcgcggtcgttcgggtttaggggcgtagcggggaggagatttcggttagggtcggggagcgcgagggcggggcggggttcggcggggaggggcgcgggcgggcggggatcggggcgggggtcgggttcgggggcggcggcggcgcgggcgggaggaggaggagtttttcgcgcggggtaggggcggagcgagcggtcgcgtcgcggagttaagtgagttcgtttcggagtcgcgtcgtcgtcggtttagtatttcgggcgttcgtcgttttcgtcgtcgtcgttagcgcggggatgtaggatgtaggcgggcgttaggttttagcggcggcggcggtagttgtagtagtagtagtttcggcggcggtagttttttttttggtcgatggacgtagagtcgtcgtcgtcgtcgttttgggtttggatggtgtcgggttcggtcgggttgtttcggtttagcgcgggggtcgtggttttttcggtgttgttcgtttcggtttcgtcgttcgcggtttcgttgtttttcggttttttcggttggtcggtttcgagcgagtcggtgttttcgttgttgtcgttgttttttgcgttagatttcgtcgtcgtcgtcgtcgcgtatttttttttcgcgttttacgggtaggtaacgtgttttcgtttcgtttcggttcgggtcgtcgttttttttgtttttgggcgcgttttgttcggttcggttttggttttcggttcgcgcgttttttttttcggcggttttcgtcgttttaaatttttaggacggagttcggtagtcgtgtttcggcgagaaagttcgtgtttggacgttcggtcgtttattttcgtagttttggtaggtgttttcgggtgtttggacggagtcgtggagggattcgtcgtttaggttcgcgtggggatcgtagggaattcgcgttacgtcgggggttattgtttatcgcgaggtgttgaagtggtttcgtgatcgtcgcgggtcgtggttgatatcgcg

SEQ ID NO: 7944 - DNA, 902 bp, Artificial Sequence
  Description of Artificial Sequence: Synthetic polynucleotide
cgggttcggttggtttttagtaggtttgtcggggtttttgtattttgtgttcgggatttttaatttgcgaatagtttggggaggttgagcgcgagttaggagcggattcgggggtgggggtaagcgttacgtgcgcgttaggtttttggtgtgttcggtaggcggcgttgcgtggttgcggttggtttcgagggtgcggggggcggcgattcgggagggaaaatttttgttttttttcggggtttgttttgttcgttttttaaattcgttttatatttttttcgattttcgtttttgtaagcgttatttgtagttttatcggttttcgtaacggtggtggtggttggtggggggtttcgaagtttgtttttggttagtcggatttcggtgggagatggaggtagaaatttcggttttttaggagaagggcgtttgtttatttttttatttttcggggtttggggagggggttgggtaggggcggaagcgagttggagtcgtgtttgtcgcggcgttgcggagtggaatagatggttggggaggggagagggtgcgtggcggggaggaggaggggtgcgggggtcggaggatagggaacgaggaatttcgaagtttggagttttttaggagaagttttttttttcgtttttttttagaaaggggggtatatatgcgtttgtttttttttcggagagttttggtttttgttttgtggtagattttgtcgcgtaattttttgttttagggcgcgttttttatttttaaattttcgtcgcgggacggggtggcggggttaggatcgttaggagcggttcgggtcgcgagggttaatggggtcgtttttttaggggcgaggaggcggcgggaaacgggttcggggtggggaacgagttttgggatcg

SEQ ID NO: 7945 - DNA, 2044 bp, Artificial Sequence
  Description of Artificial Sequence: Synthetic polynucleotide
cggcgttttcgttttgtttgtatttttttttattgtttttttacgtttggaatgttttcgtttttgtagtttgtagatagcggaaatcgcgggtgtaaatgtgtaggggtcgttgatatgatcggttgtagaagtttatttagggttattcgaataggttagcgttcgggattgtataagaggttaggcgatgttgtgggtttttaaatttgtatagttgcgatattttgcgacgtgttattttatttttagtggggtggggtgggggatttttttcgtagttcgttgaaagcgaggtaggaattattgtaatttttttgtttaggttgaggtcgttatcgtttcgcggatgtacgcgttgtaggggcgtttttcgtcgcgggtacggcgcgggaagggatggggtttggtgggagtgggtaggtggcgggagaggcgcgtgttcgtgtattagaggttttcgtgcgtgatataggtcgatgagtttttgcgggttgtatttacgcggagttatagatcgaaaaggttagtcggtggtcggtgtgttaatatatatagagagacgttcgttaggcgcgttgtaggttgggacgaggttaggagggtttaggttggaggagggttgaggagggttgcgggggcgggtttcggcgtagggcgttcggagcggagggggcgggttcgaggcggggcgggtcgcggcgttgacgggttgtcgtcgttgtattcgtttttagttcgcggtgtcgagcgtaggcggaggtatatggtttcgacgggaggcgcgcggcgagtattcggagttcggttttttgtttgagtacggtagtcgcgttttcgttcgcgcgttttcgttttttcggtcggtagttcgcggatatgatcgtgtagtttttttttgggttgggatttgtttgaagattttttttatggaagcgatgtttttttagtaggagattttagggggatagtcggggcgttttttttttttgataggagtgtttcggttcgcgggaggtagttgtattaagaaggtgaggacgttgagcgggggttcgtgtttttcgtcgtcgtagtttttattgtcggcgcgcgtttttcgcgttcgttatagtagcgcgttaggcggacgtcgcgggaatttgacgttcgaggttcgcggtttttaatgagagttttagaatatttttcgtttttgacggttagcggtagcgtcgtcgtttttcgtagagcgttcgttttttcgtttttagagttttagttttttttcgagcgatttcgtagtttttttttcgtttttattcgtcgtcggttttgtagttcggttttttttttagtttaggcgcgcgggttgtagtgggcgatcgttttttttcgatttttcgtcgtgtttttgggtttttcgaagtggtttgggcgagtattgattgttttttggcggtgttagttttaaagttagggtcggcgatgtttgttcgggagcggtagtcggcgttgaagaaggtaggtagcggggttgcggcgttggtgggttcggtttttttatttgttcgtcgaggcgcggttgttttatagtagttttcggggggtagatatggggagtattgttttttatattagggttttggatgatttcgggttttttaggtgggggttatagtttgaggggcgattgtggatgataacgttcgatattacggggatatgtaggttcggttgggtttagaatcgagtagggtgggggcgggtgggttgtggttgggggttttgagggttgaggtgggggattttttttttgtattggtttttggtttttgggattttggtcgggttggatagggattcgggtgtcggtgtgggcgtgggggtagcgcgtgttttttgttaaagttgggagagggatgtaggtgataatttgtagcgttttatttcgataaatacggtcgttgtgttgcgggaggatttcgattcgggttaggtttcgttggaacggttttttgagtaagtgtacgtgggtcgcgggttgtcggtttttgtcgtttcg

SEQ ID NO: 7946 - DNA, 1152 bp, Artificial Sequence
  Description of Artificial Sequence: Synthetic polynucleotide
cggcgtatataagttgaggattgtcgaggcgttttttgcgaggtaaatacgaagtcgtttggttagtgagaagaaattcgaggtggtttttggggtagatagagtaggatttgtttttgttttttgtttttttcgtttttttttttttagcggcggcgatcgtagtaatagcggtagtggcggttgttgttattgttttgtcgttgtcgagtcggttatttgggtattcgcggagtcgcgtcgttgttatcgtttcggcggtttttcggagtgcgcggagggggcggcggaggagcgagatatttatagtaatcgaggatgcgaggggcgtttagtagtagcgagtgtttgggagttaggaggaggttttcgcgcgtcggtaatttttagtgttaggcgttttgtagttttcgcgcgtcgcgtttgggttcgtatcgttttcgtagtgagggttcgttcgagcggtaagtttttttcggcggttaagtcgatatttttttttcgtttcgtcgtttatttcgggtagtagtcgcggaataatggagagcgtagttagtagttttggagacggcgttcgggggaggacgcgtcgtcgtcgtcgtcgttgtcgttagggtaggcgcgcgtcgcgtggagtcgggcgggtgcgagggcgcgcggcggggggtggggggtacgcgtcgcgcggggggcgggggtagtggggggcgcgcgcgcgggttcggggagttcgcggggagagttcggcgttcggcgtagcgcggcgcggttaagtttcgcgtttttttcgttttttttcggcgcgttcgttttcgtttcgtcgttcgtattcgttgggggcgtttagaaagatgtatagaggtaacggttaggggagcggaggtttaagttatatgtttgcgttttcgggggttagagttcgttagttttcgcggatttcggttcgcggttagttcgagcggttcgggtgagtagcggtatagcggttttttcgtttcgcggttttcgttcgtcgagacgtggttttaagaagtggtgtcgtagtcggggtagaggcggaggaagtcgagtcgggtaagtcgggaaggttgcggagacgttttgtcggggtaggtgttgtagttttagttagcggtttttacggagggggcg

SEQ ID NO: 7947 - DNA, 872 bp, Artificial Sequence
  Description of Artificial Sequence: Synthetic polynucleotide
cggtcgggtttagcgatgcggttgagttgtttattcgcgtttgttgaatcggttaattagcggcgttttcggatttagcgggagcgtttttatgtcgatcgcggtaggcgtgcgtttttcggggtcgtatcgttatggcgatttgtttatttgattcgtttcgggtggattcgtcgcgatttttgggcgtttaggtttttgagggtttaacgggcgacggttttttagttttagttgtgcgttttcgttcgggcgaggtggggttgatcgcggtcgtttgtatacgttttttttggttcgcgttttcggtttgggagggcggattcgtttattttacgatggtttcggttttggaagggattgttttcgtgattcgtttttttaatagtcgttaataattttttttaacgttttttgcgcggttcgtttttgagaattttggttcgggagagcgacgcggggttttcggggttgcgtaggttgcggcgttttgtttacgttggttcgagggcgcggttcgtttcgggtcggtttatatatttacgttttttgtcgggaggcggttgggacgcggcggggttgttttaagtgtagtcgcggtagtgttgcgtttttatcgcgggggtttttgcgggtcgcgtttgtttcgttcggttttcggtgtatgtggtttgcgaggcggtagaggagatgtggggatttagggtcgtacgtcgtgttcgaggtttttacgagaggttttttttcgcgggtttttgcgtaattgcgtgaagtcggttcgggaaagttaagattgtggtttaggaagaggaaggaacgcgggcgatagagttggggtttgggacgttgagggggtcggtggtagtttttcg

SEQ ID NO: 7948 - DNA, 1070 bp, Artificial Sequence
  Description of Artificial Sequence: Synthetic polynucleotide
cggcgttgagttttgtttagcgcgattcggatcgacggacgcgtagagattttgtcgggattcgttttttagtcggcgttcggggagtcgtcggtcggttttatttttcgttcgggagtcgggtagggcgagaaggtagcgcgagtggcggtggcgattttcgtcggggtttttgcgacgagcggtgattagtagcgttcgtagtcgcggtttcgttttttattcggacgtggttaagcggcggcggttacgacgttcggtttttcgggatcgttcggttgcgttttgggcgtatttgcgcgtttggtttcgcgtttcgcggagagggcgatgggtttcggttaggattgagtttttttttttttttttttagtttcgtttggtatttttttttttgtttcgagggcgagttacggtttgcgtcgtcgttttttttttcggtgttttcggttcgtcgttttttcgcgtttttttttttcggattcgttttcggggttattatggtcgcggttatcgttagcggtttgattcgttagaagcggtaggcgcgggagtagtattgggatcggtcgtttgttagtaggaggcggagtagttttagtaagaatcgcgggttttgtaacggtaatttggtggatattttttttaaagtgcgtattttcggttttaagaagcgtaggttgcggcgttaaggtttgtgggggttatggtcgggagatgcgtttcgggtcgtttttttttcgtttaaacggagtttttttaggttttttttttttttcggttttttcggtttatttcggtttcggttttttttttgagtattttgggtgtcgtcgcggggattttggagttcgttgtcgggtaatttgtagtcgtcgagaagtgtagtcgttagagatggtaagttggttgtttttcgtcggcggtttttgtttttcgcgtttttgtaggttgggttttgggaaatttgttttttttgagtttcggtttttcgggaggatagggattggtattggttttggaacgcggggtatttttttttgttatattcggggtcgagttatcgttcg

SEQ ID NO: 7949 - DNA, 395 bp, Artificial Sequence
  Description of Artificial Sequence: Synthetic polynucleotide
cggcggtttttcgttttttttttatttttttcgtttttatttttattttttggtcgttcgaattttcgatcgggagtttagagttttgttagcgtcgtattgtgcgtcgcgtaagtcgttcgatttttttagcggtatcggttttaagtagtaaatatttgtgcgtttttgagttagggacgcgcgtggggggtgggcgtgtacgcgggtgggttagcgtagagtgggagtttgtgggtgtttttcgtcgggatttttaatttagttgttttcgagagtttaagttgagcgtcgtacgtgttcgtgttatttgttgtattggacgtagtttaatagcgtagagaggtttttattcggtatttagttcgatgtgggtcgtttttttttttttagcg

SEQ ID NO: 7950 - DNA, 265 bp, Artificial Sequence
  Description of Artificial Sequence: Synthetic polynucleotide
cgtcggattcgcggaaaaggtcgttggaagttttttttgaagtcggtagtattaagaggattaatacgggcggtgggtatcgtttttattttttcgttggttttatttttcgtcgttcgtttttgtttttttttttcgtcgtttttttttttttttttttttttttttttttgcggttcggatatttttagttcgaattcggcggtttttgcgtttttgtttcgcgtttttttttttgtatttgtttcgcgtttaggtgttttcg

SEQ ID NO: 7951 - DNA, 1169 bp, Artificial Sequence
  Description of Artificial Sequence: Synthetic polynucleotide
cgagttcgcgttaagagttacgtcgagacgcgtcgtcggtggggttacgcgagatgtaatcggagagtttaaaattagtttaggattaattttttagggattcgtttaatttttttcgtagaagagtttaagtggggtagtggtcgttataggttgaggatgattttcggacgcgttttaggcgcgatcgtattattcgtttttagtttaaagtttgagtgatttggtattatttttttaattgttttttatttttttcgtatttttgttgtgtttatcgtttttacgtatttgagagtttaaattatgttaagacgatttggagaaacgttcgatttgttttttaagttacgtaaggatttatttagacgtacgttcgcgcggagacgtacgttggtatacgcgtttatatacgcgagtatatatacgcgtatattattcggttcgtgcgcgcgggtcgttgtttttgttgtattatgtaaaggtggttgggaaagcgcgttgatttatatttatatagtttattttttttttatagtatgtgattaatacgtatttcggggaggagggagcgcggttgggggtgttaatcggaagggaatagatagtgagtgttattttgttgggaggttttagaagtaaagcgttaacgacgatagtagcggtggttttagttttattagtaattgtcgttggtaggagtattatacgttttaggagtttttcgggtattaagtatgggtttagttcgttttagttattttttttttttatggttttattttcgttgttagtatttcgattttagtttgtaattttgattttgggtttgattataaatgacgaaagatcgcggtagtttttaaagtgcgggagcgagtttcgtattggttagcgcggcggagggatttttttaggaggttttaagtttttaagtttgtggagagatttggtaatagttggtaaggtttgttttagttattttcgttggttttttgtttttgtatttagcgtttgagggcgttattcgttttttttttgcgttttacgtaagcggtttaaggaatttattcgattcggatttcgtttcgtatgttttttaagttttcgttattttcgtaggcgttttagaaaggcgtgatggttttagtttagtgttcgttagttcg

SEQ ID NO: 7952 - DNA, 1743 bp, Artificial Sequence
  Description of Artificial Sequence: Synthetic polynucleotide
cgttttcgcggttgttttttttttagggtcgtcggtggtttaggatttggttatcggggaggggcgtggttttgtcgaagtcgatgagttatacgtcggcgcgatggtagtgatcgtgtataaagaggagcgagttgtcgattatttgcgagtttcgtatcgttaggtcgcggttttgtttagagacgtttttgtcgggttttcgttttagttttcgcggttcgggtattcgggtagtcgtcgtttatttcgtgttttttgaagaattcggatatttttagggtgtttcggatttgttgtaggcggtttagatatcgtttttgtagagggtggggtgggagaggagggtaaattaattaaacgttaaatgagtttttgttaacgatgaggagtcgggatttacgttgtgtttggtaaatgtcgttaggaggaggatttagggtttcgtttagcgtggtttagaagggaaggagcgtagagtagttgcgagttagcgcggtgagggttatggtggggatatagtcgagggtattgggttagatgataggggtagttttcggttttaggttttttaatattttagggtttgggatttcgtttttattagtatttttttatttttttgtataaattttttaaagacgcgaagtatttgttttcggtttcgcgtagttttgaagtcggtgttgtaggagtcgttcgttttttggatgtgggataggagtgttaggggtttcgggttcgttagtggggaagaggatagcgtagagtagcggtattttttagttgtaggggacggcgaggcggtgggagagggcggaggggtaggcggggcgggagcgggggatcgggaaagatagcgcgtagtggggttgcggcggtgttagcgaagcgcgtttgttttattttgatgttttcgatgcggaagtcgagggtggtgttggagttgatgttttttcgttattgtatgtagcgcggtttggtgacggcgcgttgcgcgtgtttttttttcgtgggagttttaggatttatcgttagtatttttttgtatatgttttttcgtagtttgggtcgtttacgggttttggttagttttttttttaggtaagttttgtgggggcgtaggtagcggttagggtatgagggggcgtatacggagattttttcgagtattcgtttcgggttttttttaagtagttgtttcggtttcggatttttatttgatttttttaatcgatttggtagggtacgtatatttgacgtttattttgtagtcgagtatataaggttcgtcgaagttatcgagtaggttttgtagttgtaggtagttttcgtcgtcgcgttttattacgtcgtggaaggtaggtacgtagtcgcgtagcgcgttagttattagtcgcgttaggtagtagcgtttcggtttcgagtagcgttttaggattagttcgttggtgttcgtcgttttaaaattttttgaggatcggtattcgttagcgtcgtttagttttttttcgtcgcgggtattcgtttattcgttttattgtttattagtgtgttttgttagttgtatttaggcgtagcgttttttgaaagggtttatgatcggtagattgattatggttcggattttttgttagtggtttttttgaaagcgatagggttaaggtttgataatcggcgtttcggtaatgtataagttttttttttattgaaatagggtttcgttacgttttcgatttatcg

SEQ ID NO: 7953 - DNA, 2405 bp, Artificial Sequence
  Description of Artificial Sequence: Synthetic polynucleotide
cgggggaggggtatacgtagttttcgtgcggaaagatggtgttttttttttatagggttgcgcgggtatttattttcgttgtaaagcgttcgggttaggcgcggtttgtttcgggtcggggcgagttcgttgttttttgcggtagatagcgatgcgcgtttttcgttttagttttcggttcgttcggcggttcgcgcgttttttcggtgtagtatgcgggcgttgtgacgttttcggataaatgtcgtgtaattgtgtaggcgaatgagagttaaaaataagaacggaaaatttattattaaggtattattgcgttagcgtagttatttgaaggtttttatggttttcggcgtttgcgtttgaagttcgtttttaggttttggggggtatttgtagaaaatttttagtagcggttcgttaattagattttagggtgtacggggggtggcgtcggtaattatggtaatttttaaaataaaataatataaaataaagtaattaacgtttattaattattattttattttattttttgtattgtttttaggtagttggggaagtcgtcgggagtgtagtcggatgttggaatttaatgtgattcggttgattatgtaaagattaggattggacgtttttgtagttttatttcgttatttatttttttttttttatttcgtattagaaataaagtggggggggggggcgagtttttggaggagaaaatgataattggtatttaattttaggtttatagtgcgtcgcggtggggcgtaaagacgtaaattttcgggatggcgagttttcggggttttattgggttaaacgaaaattgatttgatttgttttttaatattcgagggagagaaggggagatgaggggagggagggtagggtttgagtgtgtgcgtgtgcgtgtgcgtgtgtgtgtgtttggggagggggaggaggtattaagttgtagtttgcgcgcggttttgcgtttcggcggggttgcgtgcgtgtgtttttgttcgcgttgttgaaacgggtttttcgagggatcggcgttatatgatttcgtttgtttttcgttagcgcgtagatcgttagttttttagtttgttcggtatcggaggagggtcgggcggtatttttcgggtattggggttttgcggagcggagaagaggttttagcggggaatggtatatttggatttaagaagtcgcggttcggcgttagattttggagtgtagatatttggggggaggggagagttagagggagcgagcgagcgagcgttagagagaggtagcgcgtagcgcgtacggacggggggttgttgcgcggagaagatgtaagcgcgtggggtttcgttggtttttgagtattatgtagaaggggattcggttgaatgatggttacgtcgcgtttttgggattgttggcgcgtaaggacggtacgcgtaaaggttatttgagtaagcggagttcggataatataaaatggtaaattaagtggttcgcgttgttgtagaatttgtttttttatttcgagagcgattcgagttcgcggttttcggggttttatttgttggagggttgcgtttgcgatcgcgcgtttttttttaagtcggcgttgtcggttaaggagtcgttggagaaataggtgaggcgagcgtcgcgttttgatttttttgcgtttcggtcgcggttttgggggtttagggttttcggttggttgatggcgtttgaattttggtttttttatttttggcgttttaggcgttttttgtatttttagcgagaggggaggtttgtttttagttaggcgagtgattgcggcgggtagagggggtagggattgagggcggggagtagatgtgggttgcggttgtttttcgtcggacgagtttcgtgggaggcgggtatagaggggtcgatatttggagatgtagaggaagatggggttttaaggattagagacgatgagtttggatatacgtttagttaaaaatggtgtttttaatttttatttttatcgtttagttttaatagtttcgatcgtttgttttatatcgggaacgtgtaatttttcgcgtttaggtatgggaagggtaagacggaggcgttcgagcgttgttagtttttgtttcgtcgtagttgagggcggagagcggtttgcgttagtttttcggagttgggttggggttatggggttatacgggtcggttcggtattatcgagcggtggtgggtttttagttggcggtcgtcggagtaataagtttaaagatttttaaggatcgttttgatgcgtcggggttagggttagggttgttgcggaggtagcgggacgaagtgggcgttttttttttttttcgttttttgcgtcgtcgtcgtcgtcgtagtcgcggttatagcgttgcg

SEQ ID NO: 7954 - DNA, 1920 bp, Artificial Sequence
  Description of Artificial Sequence: Synthetic polynucleotide
cgggcgttgttttttgcggtttttttcgtcgaggtttgtgcgtggcggggtttttaggagcggtagttcgtgcggtttgggggcggtttttttttcgtatcgtagcggggcgtgtaaagcgtttgcggttgtagtgtgggcgtttattttacgtgttcggcggcgtgcgaggagtagtaatattttttgtgggcgatgaaggtggataggttgttgaatttgatgttgtaaagacggtagtatcggtggttgtcgttgggtagcggcgtcggcgtgtttttgttgggagtttggacgtttttgttcgagtaggaggggggcgtcggcgggggcggtacggtttcgggcgcggcggtcggggacgggggcgggtcgggcggcggtttttggggtttcgggtcgaggtcgtttcgggggttacgggattcgggttgcggggaggcggcgggggcgggagcgggcgaggggtcgcggtcggtcggcgttcgggtttcgattttcgggtcggttaggggcgcgtcgagtagtaggtcgtgcgttaggcggaaatgttttagtaggttttcgcgtatcgggtcgttcggggggtagtaggggtaggcggcggcgggtaggtcgagcgcgtcgggcggtggcgtagcggggtacgagtattttttgtgcgttaggtaggtttcgaggttgtggaagtttacgcggtaggtcgtgtattcgtggtagtcggttagcgtcggtgtcggggtttcggggagcgggcgtcgcggttttttgtttaggtcgatggggtcgtcggtcgcggggtcgggcgagcgcgtaggggcgaggtcggggtcgttttcgttttcgttttcgggtcgcggcgattcgggcgcgggggcgtggtcgggcggcggggggggcggggcgtcggtcgcgtgtagttcgtagagtttgcggcgtttgcgcgtgcgtataggcgcggcgggagagggggtcgggggcgcggtcggtttagggggtttcgggggcgcggtcggtcggcgcggcggcgggtcgtggcgcgaggcgtagtagtatcgtttgtgtacggtgtaggtttcgtggcggttgaagcggatgttgtaggtttcgtatagcgtgcggttggggtcgtttttcgcgtcgtttacggagttattcgggttttggttgttttcgttgtttcggtcgttcgcgtcgttttcgggcgtggtcgcgtttttagtttttttttcgcgcgtttcggggttcggggacgagcgcggcgcgtcgggttcggcgggttggtcggggggcgcgcgggtcgggtcggggggcgttttgggtttgcgcgcggtaggcgcgttttcgggcgtacggcggtttgaatagtagaggcgtttgtgtacgtagtagttgttgacgttgttgaaggtgatttcgtattcgaagtacgtagcgtttttgggggtttcggggaagagttcggtttgcgcgtcgtcggcgttcgcgttcgcgttttgttgtagtcggttgtgtattagttcggatattttggttaggattttcgaggcggggggcgtcgcgtcgggttcgaatacgtattgcggaaggaatagggtttcggttaggtttagttcgtcgggtatcgggttggagttcggcgtggggttggatagttcggttttgattttggtcggggcggggttgcgcggcgacggcgttcgcgacggggtttggggtttaggtttttcggggtttaggatgggggtcgttttcggtttttttatcgtttttattttgatgtttttgggggtcgtcgggggttcgttgttgtttttattttgggttagaggtttcgttttggttttttcgttggtggtttcggttagggtttttttgtttagttttggcgatggggtgggcgttaggtttaggttcgcg

SEQ ID NO: 7955 - DNA, 1403 bp, Artificial Sequence
  Description of Artificial Sequence: Synthetic polynucleotide
cgttcgttttttttaggttcggtgggattagattcgaagttaattttcgttaggcgttaggtgtagattttaggttaggttagagtagtttttgggttttcggatcgggatgttcgttttgtttttttttttggtttcgttcggtttgttatagggggaggtttcggtttcgtatttcgggtagcgaatttcgtcggtcgaggttagtttcgtgcgggggtttttcgcgggatcgatcgttaagcggtattgttcgtttcgggcgttcgttcggttttagacgtaggttttgcggtcgtttcgtgataagtatattgacgggttattgttttttgacgagtgttaaaaagttcgtttgttttgaacgttaatttttaagtgatttttacgaggttttttttttcggttttttcgttgttgtttcgttcgtattcggtttttagtaggtgtttaagaaacgtttagtaaacggtagcgtaggcgagtttgttttgcgcgttggcgcgttttattgtttacggatggcgggcgattttacgggattttcggttcgtaggattttcgttttcgaggttgtttttgggtcgggaggggttattttagaggggcgtttattttcgacggcgggggtcggggcgtcgcgggtaggggagggcgtagtttttaagtagttttagtttggtttagatttcgcgtttagcgagtcggtcggttaggtttatattttttatttgtcgttcgttttaggggaagggttttttcgacgacgttcgagtttttttttttttcggagggtcggaggtcggcgtttattggtcggttttgggcgacgtttcgttttttcgacgttacgggttaatgagcgcgcgttgttagtttattagtcgggttggttgggcggttcgggagttcgagcggtggcggagcggcgagtagcgagtagcgtttgcgggagcggtcggtcggtcgggttttcgcgtttcgtacgttcgtacgtttagcggggttcgtattgagtatgggcgcggcggtcgtgcgttggtatttgtgcgtgttgttggttttgggtatacgcgggcggttggtcgggggtagcgggtttttaggtaagttttcgatcgaggtggggggcggcgggcgcggggggttcgggcggtcgaggcgcggtttcggagggtttttttttcgcggatttcgagttcgtttcgcgcggtttcgcgttttttgtttttttgtaaagtaatttttagggtcggttcggggcgtttttttttcgtagttcgggcggtcggggtttttgagttcggcggggtcgtattaggggtgggtgggtcggggtttcgggaggggaagcgcgagcgcgggagcgaggaagaaaggcggcggttttcggggatttcgcg

SEQ ID NO: 7956 - DNA, 1088 bp, Artificial Sequence
  Description of Artificial Sequence: Synthetic polynucleotide
cgttgaggggtcgtatttattcgcgtaggtattagtaggtagttttggcgttcgcgggaggcggtcgggggcgggggtttttcggtgtttatcgtcgtttttgcggttgggttcgcgtttcgggtcggtcgagtttaacgttaggatttcgttcgagttttttagggtttcgttaggcgtcgcgttcgcgttcgcgtttttttgtcggtttcggttcgggttttatcggggcgtagggttggggaatcggagtttcgttcgtcgattcggagtatcgtttacgtagattcgtttcgggcgagggaggggtcgggcgcgtattcgcggggagggcggcgagcggggattagtcgaagtcgggagaggggcgtttttacggggcgggaaattggcgcgcgattttgggggaagtgtaggatggggggataggggcgttttcgcgggggtggatgggggattatagcggggttggcggggtaggggtcggcgtacgaggttggaggaggggagcgcgcgtttttattcgggttgggtcgtcgaggttcgcggcgtatcgtggcggcggtgggcggaggggggcggggggtatttttttttttttgtggcgtaggtgggcgcgttttggatcggtttgacgattttttttcgtcgttttatttttttggttaaaggtttttagtttttaattagggatatttttagtttatagtttcgaagttatgggtttttttcggttttttgaagtcgttatatttgtgttagtcggtcgcgtttttagattttttttcgcggagtttttttagtatttggagacgtagcgtagggtttcgaggacggtttggttcggagaaaagatatcgaagttttaattttttttaatttcgttttttttttttttttatttttttttttcgtttttaaagttcgggggttttatttttttttcggttcgcggagtttttcgaattttgcggggattcggcgttcggcggtgtttttttggggcgtacggggttggggcgggagcgaggagattaggtggggaggggattttagattttagacgttaggggagacggcgtttttcg

SEQ ID NO: 7957 - DNA, 1812 bp, Artificial Sequence
  Description of Artificial Sequence: Synthetic polynucleotide
cggggtcgttgcgtttttttgattattgacggttaggacggttttagtttcgttttatttgtaagttttattttaggttcgagttttcgagggtagggatagtttttcgggtttcgaggtttgattagagtttgaaagtttttgtcgggggttgtttcgatttagcgaggcgttaggttgttcggcgcggttgggggcgtttagcgtcgggattttagttttgtttcggtcgttcgttggtttagtgcgtacgtttcggtagtttagtttttttttttacggcggtaggagagttttcggtatttgtttggggcgggggcgggggcggggcggggcgggcgtcgcgtttttttgtttgattggtaggaagatagattaatcggaggggtttttcggggggaggggcggtgtcgtgtttgagtcgggcgcgggcgatcgagggagttgtagttattcgcgtgcggtacgcgtcggtcgtttgttcggatcgcggttattagtgtcgcggtttttcgattttcgtttcgtcgagtcgcgcgcgcgattgttattttttttaattgttttttacgattttttttgtgtatgtatttattttttgtttcgttttgttttttttaaggcggtggcggcggcgatagcggcgtaagttcgtagcggggagggggcggtcggaggatgcggcgcggggttgcgttcgttacgttcgttgttgttgttcggttcgggtttgagcgtcgagtaggtgggtataggtgcgtcggggggcgggaggcgagcgttggttagagggaattcgtggattcggcgatcgaggggcggatttggcggtaagggacgcggcgatcggtgtcgtttcgttttatcgtttatttttttttttttcggttatcgcgttttttttgggttttttttttattttcgtattttattttagtggttttttatttttttatatttattttttatttttttttagatttttttgtaaaattttttagtcgttgcgtcgttttttttaatattttttttcggtttcgtttttagtttttagtttttttttacgttatttttatttttattttttttcggatttcgtttttaagttaaggagcgggagggggatttattcggtgtttgtcggagtggcgcggggggtgtggtcggttcgtttttttcgtgtttttcgtagggtaggttatagttttttagattttcgtttaggtggtaaagaagatggagttgggggtcgcgtttcggcggcgcggggttcgaaggcgaggtcgtttagttcgtattttattttacgtacggtatacgtcgtcgcggtttttgttacgtatattttcgcgttgtttcgtttacgtgggcgtcggggaggaggttcgagagatgggaagaaaggttggtatttatttttttgtcgggtcggcgcgttttgggcgtattggttttcggagatggcgcgtaaggattgattttcgtggtgttagatattttgtcgggcgttttgcgtcggggttagcggtttcgttggtttgcgttagtgcgttgcggtttcgttttttagtttttcggtttttcgttttattttttttgttgtgggtttttgagtattcggtttgggtagtttagatagaggtcgtttacgaggttggcgttttttttcgttttagaagtatttcgtttttatatattttagttcgtcggttttttgaaggttgggttagtttcggtttttcgttagtttttgttcggttttttgagttttagcgatattgtatttaatcgttagttttttttcgtcgttcg

SEQ ID NO: 7958 - DNA, 5819 bp, Artificial Sequence
  Description of Artificial Sequence: Synthetic polynucleotide
cggagggaaatcgggtcgacgataagggtggttattttcgggtttttcgcgttcggtttaagcgtttttgggtggggtagtttaaacggggagaggggtttcgtgggtcgagggttcgaggtcgtagcgagtttagcgtttggttaaatttggttcgcgcgtttttttattgttttgttagggttgtgtgatttttcggagttttacgttttcgtttaaatagtttttagcgtttttgttggtattcggggcgtttttattttagtttttgtattcggcgcgtcgcgcgtagatcggacggaggggaaagttggtaagagcgcggcgttcgcgggagaaagcgttaatgggcggtcgggtgggagtagcgcgttcgttcgtttacgttacgtcggtgcgggttcggttgacgatcgcggcgtttggggacgtcggcgcgtttcgttcgttaggtgtttcgtttggaaatgtttttattagttgtcgtcggtttttcgttggagcgcgcgcgtcgagttttcgcgcggagttttcgcgggttgtcgggagcggtttagcgttatcgtaggtaggtgaggtttttcgttttcgttttcgtttcggggtttcgagattttttttttttttcgaggaggcggaggtttcgcgcggtcgtcgaggggagcgggcggcggcggttgcggcgatttttcggtgcgtttcgggttgcgagttgtttttcgcggtttcggtagttatacggcgcgggcgggagtttttttagtttaggtagggagtgggtttcgtcgtataaattttgcgaggattgtttttgcgtttaaggggataaagtttgttattcgtcgttaggttttttagaggtcgttgcgtttgttgtaagttgcgggaagtagggtgcgcgggtcggcgcggggcggggggtggggggttcggagtggttaggtttgagttttggacgttcggacggcgtttcgtttagttttaggtcgtatttagggagtaagcggcgggggcgtagcgggagagaggagggagagggtcgcgggtttttatggagggcggttgggaatttagagatttatcgtttgtttttgtggtttttttttttattattggtttcgagggggtttcggggttgtgaggaaatgatttgttaatttcgaggttcgttagtgcggcgttagcgatcgtgaggttttttaaatttatattttagtcgggtgtttcgagcggtgggcgggtataggcgtttttaaggtttttggttttaggttttagaaagaaaggtttttgtttggtgtttcgggttttcggtttcgtttttggttggagttaatttttttgggttggaaggagtttttttcggacgagtttttggtgcggggaattggtggtttttagggtaatttttgaagtattagggttaggttggtcgaagaagggttagggttcggtttgttttttcggaggttttttatggtttcgacggttaacggtaatttcgttaaaataggcgattcgtttgcgtttcgcgttaggggttgattattttttgttttttttgcggtttgtttcggttttggtttttcgtttttcggagcgttttaggttagcgggagtattttattttttcgaagttgagtcggtgttgtgtatttcgggagtcggttgatttttggtttatttgtttacgggtgtatttagtatcgggggtttttagagggaggaaggtttagtatttcgagtttatgtagacgcgtttagttgatatttgagatgttgagcgttttatcgttggtgaaagggatattgggtgttttcgttttaggtttggttttttggtgaaggtatttggaaaatattttagtattatttatgggagaagggtggtttagtgagaattttcggtttgggtaggcgggtttaggttaggttatagggttttagtgagatgtttcggtggtcgttaatttataggttggattgattttgtgttttggaatgagtagtggggtttgggtgaggtcgggcgggttaggaggttttttgggtagttgcgagtttttcgaggtagggtgattgtgattgggttcggattttaggcgttggggtttgttggcgggtaggaagtggagcgtgtgtgtgcggcggtttgggaaagtcgatttagaggttaggtttttgggttacggagaaagggtcgttcgttggtggggattggagcgtcgatttatgtatataggttggaaaggtaaaagagaataggagaaggtggcggtggtggttaaaggaagttttcgaaagggtttttacgtattggttgttttgggaagtggaggttgttttttttagattttgtttagaagatgaatggtcgtttgttttggggtttcggttttagttaagtttcgtcgggtttggaaggaaggaaatgtattagttttaggtttgggtgggttgagttgttgtattagagtttagaggtgtagggtataggtggttgggtttttgggttttggtttttttttttagtcggcggagtgtttatagtcgtcgaggttaggttttcgagtataggtgaggaaaggataagttatagttgaatgttttttttttgggggtttttattttttattttagtttttggttcggttgggtttatattttttttttagtcgggttttattatttggagagagcgagtagtttgtaaataataaataatgggaagtagaaggatgttcgggaaaaattagaaaattgtaaggagtggggaggagggagggtgggagaggggaggaaggagggtgggggaggggaggagtaggaggagagggaaaggggttgagagatttatttttagcgagaaatttcggtggttagttttttattatttataggaaggtgatattagcgatttaggtgagaaagaaagaaacgcggtttgtcgcgaaattaatatagaatttagaaataattattaatgttatttgattcgtgttttttatatatttttcgcggttatcgacgttaaattgtttgaataatttgtatggagcggttatttattattttcgatggtttttttttgtaagtagttcggacgtggttcgtttcggtttaacgcgatcggagaattcgtatttttatttgtaaattaaagtaattacgtagtagatattatatgatgtgtattgtggtttttagatagttattaattatttttaatcgagttgttaaaagagtaggtagatttcgtttttgggaggtaggtttgtagttggggagagggcgaggacgttattattaattagagggtgattttggggcgatttataggtttgaatttaggaatttttttgagtaagtttgtataacgttgttttgtacggttttttttttaatttattacgggaggtcggtttagggggcgagggtaatcggggcgagtttcggtttcggagggcgatggcgtagaaggcggggaacgggttcgggatggttcgggcgtttttttgtcgtttttttgtcgtttgtttattggttttcgttttgaatttgggtaaggttttagggagggtattggtcgagggagttttggggtgggcgttcggttttttttttcgattgtttcgtgcgttttagatagaaagttgggtaaaatggataggggagggcgttttcgttaggtatttaacgttttttttttcgtagttagttttgcggggcgtcgggagggacgagtttagcgggaggggtcggggtttgggttgaggaatttgttttttcgagcgcgtagggtcgttcggtagttttcggtttagtcgcgaggggtagggggaagtcggcggagtacggtcggcggaaaggggatcggggaggaaagtcggggaggcgaggtgggggcggtgggttgagcgggaatttaaaagatcgcggtggagaagatggggcgtttttcgcgatattcggttgtttagaggtgtaaagtcggtgggcgtacgttcggggcggttttatagttttcgggtcgttagttttagggtgtcgggttttaattaaggtttcgaagtttttacgtatttgagggtattttgattagtttttgcgggttgttttgcggtcgtagtgggttttgaaagtttatttcggcgtagggtggaaatcggcgggaggcgttgttgattttcgattaaataatagtgacgagacgcgtgcggggcgtttgcgagtttttttttgttattcggagtagagcgcgttagcgcgaggtcgggtcggtcgtttgcgtagcgtcgggttaattttaattgttgattatatttttagcgtgtttttttataggttttatttgtaattgagacgaatgattatagtggggcgggaaggagtagttgtttattaattaatttttaattaaaagtgtttttcgttttcgggtgattaaagagaaatatcgttcgttgggcgatattgattcggatggaatttatttgttaacgttcggaggaatggttttttcgtttatcgcgcggtcgggattgttttggtttttttcggtttgagtcgtcggcgagtgatcggcgagtttgcggttaggtcgggttgcgcgaggtggggttgacgttagagtttttttcgttttaagtcgcgtatatttgatttgacgggttcgcgcgattcgtttttttttttttttttttcgtaaaatatgtatttttgtcgtcgttgcgaggtcgttcggttttagagttttttcgagttttcggaatgcgaagttaaaggaatcgcggcggttatcgttgtttattttgttattcggttagaaaagtttgcggagcgcggggatggattaatcggtttttttgtttcgtttttttagcgtttagaagtttgtagtttcggagtagtggtcgcgttacgtcggttttagcgcgtagaattttgtaggtttcgttcgttcgtttcgggtcgcgttcgttatgttttattcgtagtttggatatttttatttttcggttttttaggtaagcggagtttcgtttcgtttaggttatcgtaggtgtcggtagggcggatggggcggggacggggggtggggagtgttcgatttacgattgtttgcggttttcgagttagtaaggtttgggtcgcgcgttttttacgtttaatttttgttttttaaattttcggggaaaggtcgaggcgttaagaaaattcgacgggtcgggttcgggttttttgatgtttgaattataaggtttaggttgtgttttaggggagttttaggattttaaggaatttttggggaaggaggtttggcgcgtaaatggcgttagaggttttggaaatttttcggggaagggtgtaggtgttcggttgggttttacgtggcggaggaggttagacgcgtataagttagtggaaaggggcgagtattttggtgtggacggcgggaggttcgggggtattcggggtacgttttcgtgggcggcgcgcgggattggtaaggtttagggttttagtttttagttcggtttttcgttagttttcgcggtttttttttgtagtttttgatggttattaattttttgagtacgtgttgcgagttcggaggtcgtacgttggcggatttcgggttcgtcgtttcggtttaggcgtcggtttattgttcggtttacgagagtcggttgttggttatcgcgcgttacgagtttaattcggtcgcggcgttgggcgtttatgggggtttttatggcggatcgtagggttatggtaattacgtgatttacggttcggaggcgttcgttttttattcg

SEQ ID NO: 7959 - DNA, 2001 bp, Artificial Sequence
  Description of Artificial Sequence: Synthetic polynucleotide
cgttttcgtttcgtgttaagcgggtttaaggttcgaggttttttcgtttataatttcggtgttcggaatacgttttcgaggggtcgtgttgtcggggttattattcgcgattggatttcgcgtcgtgttgtttttttcgggtttcgagttcgtttagcggtttgtacggtttaggtttgagttgcgggttttttttgtggggcgcgttgggagtgagttttatttttaaagtttattttaacgttttaggtatgattacgacggtagaggtcggtcgtttattttcgttttttttttcggttagagcgtttttgtcgggagtcgacgatcgcggtttgatttcgggttttatcgtttattttcggttttcgttttttttttacggttaggggttatatatagcggacgtttcgtttttagtcgtttttttgatttttgaatttgggagttagcgtgttcgttggggtatgtattgttacgggtattgggatttttttgttgttgcggggaggagtttcgacggtaggtgggaagatttagtttgttcgcgttttcgttttttagtttttgcgattcgggtcgaggtttttagtttttgggttttttcgtttcgggtttgagggaggggtcgggttttcgggtttgtagattcgttatcgcgcgtgcgtatgcgtcggtcgcgagttttcgggtgtaggtttgggcggtttcggttcgcgtatttgtttaggcgttgcggtttagcgcgttttaatttttagttcgggcggagagcgggggcgggattgaagtatcgtgttttttaaagtattttttcgtcgtcggtagttttggtttcgtaaatgttttagcgcgtttaggcgtacgtagagattggcgcggtagttttcgggttaacggtacgcgagtaaagttggttggcgatttgggatacgtagtagaagttgaggttgtatcgattttcgtcgtttcgggggaggtatgggttcgggtaggtttaggaggaagttgtatagttcgaggttcgggcgggagtggcgggtcgcgggtaagggaacgtatatttggaaggggttaggatttcggttggagtttggttttttatggcgaggaagtcgattgggaagggttttttggcgaggtttttttgttgtgttattttttttcggtagcgtcgggcgcggggaacgcggggttgtatcggggcgggggagggggttttattcggcggtttcgaggattcgattttggggtcgggttcggcgggtaggtttgtttaggagttagttggtaaatgtagcggattgttacgttattttattgttattatttattgtaaattattgttttaagttttcgggagaattcgtcgaatttgagaggggggagggggatgggggtgggcgcgtaggaagttttataggtattagggattggtgatttaggatattagtttttcgagttttttttgggaatttttagtatttagattgtttttgattgtagggattacggtggggcgttttttttttaagtttttttcgggatatcgggcgcgtttttttcgtttttgggttagcgtatatttttttacgcgatgattagtatagttattgtgaggttcggttttggtcgcgtttgttttttgcgagtgataataataaaaattattggaattgtaaggaagtttttggtttcggttttttagtcgttgttgttttgggtgtttcggttgcggaaagatttcgtagtcgggttcgatttacgagtggaatatcgggttgcggatttagtcgggtttataggattggcgcggggtttcggggataggtttcgtagggtttttttgcgtatcgtttgggacgtcgattttgttaatttggaggataatttttgtttttattttattagtagatttttaaaaatttagtcgtcgttgaaacgtgttttttattcgttcggtttgtttgtagtttttgacgagtttcggtatagttttcg

SEQ ID NO: 7960 - DNA, 1265 bp, Artificial Sequence
  Description of Artificial Sequence: Synthetic polynucleotide
cggttcgggcgttaggtagaattttagttcgatgttgtcgtcgtcgggggagagggaattcgttgggagggatagtcgggggttggggaaggaagagcgggtgttgggagggtttaatattggcggagttttaggtggcgacgcgggcggcgagagttgtttcgaggcgggggtttcgggtaggtcgttttttacgtagtatacggagtagaagatttgttttttggcgagggacgggcgtcgttgatttagtacgtttaggattagttcgtcggcggtttttacgcgggttttgggttttagtttttcgtcggggggcgttttttgttgtttatttttttttttttttcgatttttagttttttttttttttttttttagttttaattgtagtggtaaggtttggggattgagaggttcggtgagtgttagtttcgtaggttgcgtcggtgttcggtttttattttagttcgggggttttaggtttttcgcgggttttggggcgttggtgttcgcgtagttttagtcgttttcgtagttatcgtcgttcggtttcgcggaggcggcgcgtagcgggggcgttcgggcgttgtttttttgaggtttcgggggtttagggtggttcgtagtgttattggttagggtttgcgatttttggggttcgtcgtcgtcgtttatcgtgttttgtttttcgtttatcgtcgttcgcggttcgcgtcgtcgttgtttatttagtcgtcgggatttttattcggcgttcgcgggtagcgggggtagtggttcggttcgattcgcggtttcgtttttgttttcgggtttttttttttgggttgggacgttttaagtttttttcggggagttcgtgtttcgaggttgcggcgcgtggggagtttggttcggttcgtcgttttttttcgtattttggcgcggcggggtatcgtttcgggggcgtcgagggtcgttcgttttgggttcgggcgcgttcgttttatatgtagttcggggcggcgtcgtagttttagcgagttttaggcgggatagaggggtttgggaggagacggtcgttagtttcgcgttattatcggtttcggttgtcggacgcgcggttcgagggcggtggttaaagggtcgaggggtttgtggcgtcgtcgcggcgcgtattaggaggtgtagtcggagcgttggttagtcgtagggtttttgggggagaggtcggagcgggcgattttttttttttcgcgttttatttatagtttttttcgtcg

SEQ ID NO: 7961 - DNA, 1360 bp, Artificial Sequence
  Description of Artificial Sequence: Synthetic polynucleotide
cgtcgaggatgtggttttcgtttttcgtagtcgtcgtaggagtttttgtttttaaagcggtaggtaggggttttagcgggtttattttaatttgggaaggtcggtgcgtttttttatagatttcgtagggcgttttttttggggattattgaagttttggtatttttaattttagttttttcgcgttacgggaaacgaagacgatatttttttgaataatttcggatgtgttattatagaggggtattttatattggtttttattttaatttttatttagtatattgtttgtttattttttaaatttcgtgcggattgcggtatttagtttcgggggattttttagttttgttttttcgattcgcgtaggtgcgttcgtttatttaagggtagggaggtatgttttttcgggttttttcggtcgtatggtttgtttgtttttttggtttttttttttcgtattaggaggggcgtgagatagttaggtcgatttttatttcggtagtttgcggcgatcggtcgtttcgagcgtagcgttagatatttgggttggggggtgttagtttgacgcgtaggaagggcgtagcggcgggagggggttttattttagatttgggaggtttgtttggcgtcggttttcgttcgtttttcgtcggtggaggtcgcggttggcggagatcgttaagttagaggaggggattcgaggtttcggttgggcgaaggttttggagggggagaagacggtcgaggcgtggaggggtagtcgcggcggggcgatttttatttgtttattgcggggtttgttcgtggggtcggggtagatttcgtaaaggacgcgtagtttgtaagttcgcggttcgcgcggcgcggggatggggagcgtgtgcgtcgaggagcgcgcgtcgagtcgggttttcgcgtttgtgtggtcggttggcggtcggggttcgtgtgtttttgcgcggcggcgtgtgcgtgtgcgtacgcggggattacgttcgttcggagtcgtcgtcgtcgtcgttattttttgttcggggtcgagcgtagcgttttttttgttcgtttcgcgcggcgcggtagtttagtttggtttcgttttgcgggagaggcgtcgttttcgtcgcgaagttaggttgggcgttggagggaggcgatcgattatcgtttttttttgtttattttataggttggggagggggtgttgtaggttaatgagcgttcgggggcggggttagatcgagggcggtgcggtggggggcgcggtggggggcgtcgggttgtttaattcgattttattcgtagtatagattggagtaggagttgcggcgggaaattttagcggcgggggtcgggggcg

SEQ ID NO: 7962 - DNA, 362 bp, Artificial Sequence
  Description of Artificial Sequence: Synthetic polynucleotide
cgcgggggttatcgcgttcgcgaacgtagagtttatacgtggattttcgcgtttgtgatgtttcgattcgtttcgggttttcgtatagataatgtcgcgcgtttttttcgtagttatttcgggattcgcgtttcgcgtcgttcggacgtttttttgcgtttgtcggggatatttatcgatattaggaattttagcgtgtttatatagtttcgttcggttttttggagttcgttgagtacgtatacgcgtaggcgaagttgtttttttaggtttttggcgttttcggcgcggttgttttcgcggttgttttcgtttatggtcggcggcggtgcgtagcgcggcgttgttcgtcgtgttgagcg

SEQ ID NO: 7963 - DNA, 56 bp, Homo sapiens; identical to SEQ ID NO: 112

SEQ ID NO: 7964 - DNA, 431 bp, Homo sapiens; identical to SEQ ID NO: 374

SEQ ID NO: 7965 - DNA, 84 bp, Homo sapiens; identical to SEQ ID NO: 396

SEQ ID NO: 7966 - DNA, 50 bp, Homo sapiens; identical to SEQ ID NO: 418

SEQ ID NO: 7967 - DNA, 166 bp, Homo sapiens; identical to SEQ ID NO: 2

SEQ ID NO: 7968 - DNA, 125 bp, Homo sapiens; identical to SEQ ID NO: 13

SEQ ID NO: 7969 - DNA, 396 bp, Homo sapiens; identical to SEQ ID NO: 35

SEQ ID NO: 7970 - DNA, 173 bp, Homo sapiens; identical to SEQ ID NO: 46

SEQ ID NO: 7971 - DNA, 97 bp, Homo sapiens; identical to SEQ ID NO: 57

SEQ ID NO: 7972 - DNA, 208 bp, Homo sapiens; identical to SEQ ID NO: 68

SEQ ID NO: 7973 - DNA, 647 bp, Homo sapiens; identical to SEQ ID NO: 79

SEQ ID NO: 7974 - DNA, 282 bp, Homo sapiens; identical to SEQ ID NO: 90

SEQ ID NO: 7975 - DNA, 141 bp, Homo sapiens; identical to SEQ ID NO: 135

SEQ ID NO: 7976 - DNA, 25 bp, Homo sapiens
cgtgcaccctgaggtctggttggcg

SEQ ID NO: 7977 - DNA, 56 bp, Homo sapiens; identical to SEQ ID NO: 540

SEQ ID NO: 7978 - DNA, 431 bp, Homo sapiens; identical to SEQ ID NO: 802

SEQ ID NO: 7979 - DNA, 84 bp, Homo sapiens; identical to SEQ ID NO: 824

SEQ ID NO: 7980 - DNA, 50 bp, Homo sapiens; identical to SEQ ID NO: 846

SEQ ID NO: 7981 - DNA, 166 bp, Homo sapiens; identical to SEQ ID NO: 430

SEQ ID NO: 7982 - DNA, 125 bp, Homo sapiens; identical to SEQ ID NO: 441

SEQ ID NO: 7983 - DNA, 396 bp, Homo sapiens; identical to SEQ ID NO: 463

SEQ ID NO: 7984 - DNA, 173 bp, Homo sapiens; identical to SEQ ID NO: 474

SEQ ID NO: 7985 - DNA, 97 bp, Homo sapiens; identical to SEQ ID NO: 485

SEQ ID NO: 7986 - DNA, 208 bp, Homo sapiens; identical to SEQ ID NO: 496

SEQ ID NO: 7987 - DNA, 647 bp, Homo sapiens; identical to SEQ ID NO: 507

SEQ ID NO: 7988 - DNA, 282 bp, Homo sapiens; identical to SEQ ID NO: 518

SEQ ID NO: 7989 - DNA, 141 bp, Homo sapiens; identical to SEQ ID NO: 563

SEQ ID NO: 7990 - DNA, 25 bp, Homo sapiens
cgccaaccagacctcagggtgcacg

SEQ ID NO: 7991 - DNA, 56 bp, Artificial Sequence; identical to SEQ ID NO: 968
  Description of Artificial Sequence: Synthetic oligonucleotide

SEQ ID NO: 7992 - DNA, 431 bp, Artificial Sequence; identical to SEQ ID NO: 1230
  Description of Artificial Sequence: Synthetic polynucleotide

SEQ ID NO: 7993 - DNA, 84 bp, Artificial Sequence; identical to SEQ ID NO: 1252
  Description of Artificial Sequence: Synthetic oligonucleotide

SEQ ID NO: 7994 - DNA, 50 bp, Artificial Sequence; identical to SEQ ID NO: 1274
  Description of Artificial Sequence: Synthetic oligonucleotide

SEQ ID NO: 7995 - DNA, 166 bp, Artificial Sequence; identical to SEQ ID NO: 858
  Description of Artificial Sequence: Synthetic polynucleotide

SEQ ID NO: 7996 - DNA, 125 bp, Artificial Sequence; identical to SEQ ID NO: 869
  Description of Artificial Sequence: Synthetic polynucleotide

SEQ ID NO: 7997 - DNA, 396 bp, Artificial Sequence; identical to SEQ ID NO: 891
  Description of Artificial Sequence: Synthetic polynucleotide

SEQ ID NO: 7998 - DNA, 173 bp, Artificial Sequence; identical to SEQ ID NO: 902
  Description of Artificial Sequence: Synthetic polynucleotide

SEQ ID NO: 7999 - DNA, 97 bp, Artificial Sequence; identical to SEQ ID NO: 913
  Description of Artificial Sequence: Synthetic oligonucleotide

SEQ ID NO: 8000 - DNA, 208 bp, Artificial Sequence; identical to SEQ ID NO: 924
  Description of Artificial Sequence: Synthetic polynucleotide

SEQ ID NO: 8001 - DNA, 647 bp, Artificial Sequence; identical to SEQ ID NO: 935
  Description of Artificial Sequence: Synthetic polynucleotide

SEQ ID NO: 8002 - DNA, 282 bp, Artificial Sequence; identical to SEQ ID NO: 946
  Description of Artificial Sequence: Synthetic polynucleotide

SEQ ID NO: 8003 - DNA, 141 bp, Artificial Sequence; identical to SEQ ID NO: 991
  Description of Artificial Sequence: Synthetic polynucleotide

SEQ ID NO: 8004 - DNA, 25 bp, Artificial Sequence
  Description of Artificial Sequence: Synthetic oligonucleotide
ygtgtattttgaggtttggttggyg

SEQ ID NO: 8005 - DNA, 56 bp, Artificial Sequence; identical to SEQ ID NO: 1396
  Description of Artificial Sequence: Synthetic oligonucleotide

SEQ ID NO: 8006 - DNA, 431 bp, Artificial Sequence; identical to SEQ ID NO: 1658
  Description of Artificial Sequence: Synthetic polynucleotide

SEQ ID NO: 8007 - DNA, 84 bp, Artificial Sequence; identical to SEQ ID NO: 1680
  Description of Artificial Sequence: Synthetic oligonucleotide

SEQ ID NO: 8008 - DNA, 50 bp, Artificial Sequence; identical to SEQ ID NO: 1702
  Description of Artificial Sequence: Synthetic oligonucleotide

SEQ ID NO: 8009 - DNA, 166 bp, Artificial Sequence; identical to SEQ ID NO: 1286
  Description of Artificial Sequence: Synthetic polynucleotide

SEQ ID NO: 8010 - DNA, 125 bp, Artificial Sequence; identical to SEQ ID NO: 1297
  Description of Artificial Sequence: Synthetic polynucleotide

SEQ ID NO: 8011 - DNA, 396 bp, Artificial Sequence; identical to SEQ ID NO: 1319
  Description of Artificial Sequence: Synthetic polynucleotide

SEQ ID NO: 8012 - DNA, 173 bp, Artificial Sequence; identical to SEQ ID NO: 1330
  Description of Artificial Sequence: Synthetic polynucleotide

SEQ ID NO: 8013 - DNA, 97 bp, Artificial Sequence; identical to SEQ ID NO: 1341
  Description of Artificial Sequence: Synthetic oligonucleotide

SEQ ID NO: 8014 - DNA, 208 bp, Artificial Sequence; identical to SEQ ID NO: 1352
  Description of Artificial Sequence: Synthetic polynucleotide

SEQ ID NO: 8015 - DNA, 647 bp, Artificial Sequence; identical to SEQ ID NO: 1363
  Description of Artificial Sequence: Synthetic polynucleotide

SEQ ID NO: 8016 - DNA, 282 bp, Artificial Sequence; identical to SEQ ID NO: 1374
  Description of Artificial Sequence: Synthetic polynucleotide

SEQ ID NO: 8017 - DNA, 141 bp, Artificial Sequence; identical to SEQ ID NO: 1419
  Description of Artificial Sequence: Synthetic polynucleotide

SEQ ID NO: 8018 - DNA, 25 bp, Artificial Sequence
  Description of Artificial Sequence: Synthetic oligonucleotide
cgtgtattttgaggtttggttggcg

SEQ ID NO: 8019 - DNA, 56 bp, Artificial Sequence; identical to SEQ ID NO: 1824
  Description of Artificial Sequence: Synthetic oligonucleotide

SEQ ID NO: 8020 - DNA, 431 bp, Artificial Sequence; identical to SEQ ID NO: 2086
  Description of Artificial Sequence: Synthetic polynucleotide

SEQ ID NO: 8021 - DNA, 84 bp, Artificial Sequence; identical to SEQ ID NO: 2108
  Description of Artificial Sequence: Synthetic oligonucleotide

SEQ ID NO: 8022 - DNA, 50 bp, Artificial Sequence; identical to SEQ ID NO: 2130
  Description of Artificial Sequence: Synthetic oligonucleotide

SEQ ID NO: 8023 - DNA, 166 bp, Artificial Sequence; identical to SEQ ID NO: 1714
  Description of Artificial Sequence: Synthetic polynucleotide

SEQ ID NO: 8024 - DNA, 125 bp, Artificial Sequence; identical to SEQ ID NO: 1725
  Description of Artificial Sequence: Synthetic polynucleotide

SEQ ID NO: 8025 - DNA, 396 bp, Artificial Sequence; identical to SEQ ID NO: 1747
  Description of Artificial Sequence: Synthetic polynucleotide

SEQ ID NO: 8026 - DNA, 173 bp, Artificial Sequence; identical to SEQ ID NO: 1758
  Description of Artificial Sequence: Synthetic polynucleotide

SEQ ID NO: 8027 - DNA, 97 bp, Artificial Sequence; identical to SEQ ID NO: 1769
  Description of Artificial Sequence: Synthetic oligonucleotide

SEQ ID NO: 8028 - DNA, 208 bp, Artificial Sequence; identical to SEQ ID NO: 1780
  Description of Artificial Sequence: Synthetic polynucleotide

SEQ ID NO: 8029 - DNA, 647 bp, Artificial Sequence; identical to SEQ ID NO: 1791
  Description of Artificial Sequence: Synthetic polynucleotide

SEQ ID NO: 8030 - DNA, 282 bp, Artificial Sequence; identical to SEQ ID NO: 1802
  Description of Artificial Sequence: Synthetic polynucleotide

SEQ ID NO: 8031 - DNA, 141 bp, Artificial Sequence; identical to SEQ ID NO: 1847
  Description of Artificial Sequence: Synthetic polynucleotide

SEQ ID NO: 8032 - DNA, 25 bp, Artificial Sequence
  Description of Artificial Sequence: Synthetic oligonucleotide
ygttaattagattttagggtgtayg

SEQ ID NO: 8033 - DNA, 56 bp, Artificial Sequence; identical to SEQ ID NO: 2252
  Description of Artificial Sequence: Synthetic oligonucleotide

SEQ ID NO: 8034 - DNA, 431 bp, Artificial Sequence; identical to SEQ ID NO: 2514
  Description of Artificial Sequence: Synthetic polynucleotide

SEQ ID NO: 8035 - DNA, 84 bp, Artificial Sequence; identical to SEQ ID NO: 2536
  Description of Artificial Sequence: Synthetic oligonucleotide

SEQ ID NO: 8036 - DNA, 50 bp, Artificial Sequence; identical to SEQ ID NO: 2558
  Description of Artificial Sequence: Synthetic oligonucleotide

SEQ ID NO: 8037 - DNA, 166 bp, Artificial Sequence; identical to SEQ ID NO: 2142
  Description of Artificial Sequence: Synthetic polynucleotide

SEQ ID NO: 8038 - DNA, 125 bp, Artificial Sequence; identical to SEQ ID NO: 2153
  Description of Artificial Sequence: Synthetic polynucleotide

SEQ ID NO: 8039 - DNA, 396 bp, Artificial Sequence; identical to SEQ ID NO: 2175
  Description of Artificial Sequence: Synthetic polynucleotide

SEQ ID NO: 8040 - DNA, 173 bp, Artificial Sequence; identical to SEQ ID NO: 2186
  Description of Artificial Sequence: Synthetic polynucleotide

SEQ ID NO: 8041 - DNA, 97 bp, Artificial Sequence; identical to SEQ ID NO: 2197
  Description of Artificial Sequence: Synthetic oligonucleotide

SEQ ID NO: 8042 - DNA, 208 bp, Artificial Sequence; identical to SEQ ID NO: 2208
  Description of Artificial Sequence: Synthetic polynucleotide

SEQ ID NO: 8043 - DNA, 647 bp, Artificial Sequence; identical to SEQ ID NO: 2219
  Description of Artificial Sequence: Synthetic polynucleotide

SEQ ID NO: 8044 - DNA, 282 bp, Artificial Sequence; identical to SEQ ID NO: 2230
  Description of Artificial Sequence: Synthetic polynucleotide

SEQ ID NO: 8045 - DNA, 141 bp, Artificial Sequence; identical to SEQ ID NO: 2275
  Description of Artificial Sequence: Synthetic polynucleotide

SEQ ID NO: 8046 - DNA, 25 bp, Artificial Sequence
  Description of Artificial Sequence: Synthetic oligonucleotide
cgttaattagattttagggtgtacg

SEQ ID NO: 8047 - DNA, 255 bp, Homo sapiens; identical to SEQ ID NO: 2680

SEQ ID NO: 8048 - DNA, 630 bp, Homo sapiens; identical to SEQ ID NO: 2942

SEQ ID NO: 8049 - DNA, 283 bp, Homo sapiens; identical to SEQ ID NO: 2964

SEQ ID NO: 8050 - DNA, 249 bp, Homo sapiens; identical to SEQ ID NO: 2986

SEQ ID NO: 8051 - DNA, 365 bp, Homo sapiens; identical to SEQ ID NO: 2570

SEQ ID NO: 8052 - DNA, 324 bp, Homo sapiens; identical to SEQ ID NO: 2581

SEQ ID NO: 8053 - DNA, 595 bp, Homo sapiens; identical to SEQ ID NO: 2603

SEQ ID NO: 8054 - DNA, 372 bp, Homo sapiens; identical to SEQ ID NO: 2614

SEQ ID NO: 8055 - DNA, 296 bp, Homo sapiens; identical to SEQ ID NO: 2625

SEQ ID NO: 8056 - DNA, 407 bp, Homo sapiens; identical to SEQ ID NO: 2636

SEQ ID NO: 8057 - DNA, 846 bp, Homo sapiens; identical to SEQ ID NO: 2647

SEQ ID NO: 8058 - DNA, 481 bp, Homo sapiens; identical to SEQ ID NO: 2658

SEQ ID NO: 8059 - DNA, 340 bp, Homo sapiens; identical to SEQ ID NO: 2703

SEQ ID NO: 8060 - DNA, 224 bp, Homo sapiens; identical to SEQ ID NO: 2714

SEQ ID NO: 8061 - DNA, 255 bp, Homo sapiens; identical to SEQ ID NO: 3108

SEQ ID NO: 8062 - DNA, 630 bp, Homo sapiens; identical to SEQ ID NO: 3370

SEQ ID NO: 8063 - DNA, 283 bp, Homo sapiens; identical to SEQ ID NO: 3392

SEQ ID NO: 8064 - DNA, 249 bp, Homo sapiens; identical to SEQ ID NO: 3414

SEQ ID NO: 8065 - DNA, 365 bp, Homo sapiens; identical to SEQ ID NO: 2998

SEQ ID NO: 8066 - DNA, 324 bp, Homo sapiens; identical to SEQ ID NO: 3009

SEQ ID NO: 8067 - DNA, 595 bp, Homo sapiens; identical to SEQ ID NO: 3031

SEQ ID NO: 8068 - DNA, 372 bp, Homo sapiens; identical to SEQ ID NO: 3042

SEQ ID NO: 8069 - DNA, 296 bp, Homo sapiens; identical to SEQ ID NO: 3053

SEQ ID NO: 8070 - DNA, 407 bp, Homo sapiens; identical to SEQ ID NO: 3064

SEQ ID NO: 8071 - DNA, 846 bp, Homo sapiens; identical to SEQ ID NO: 3075

SEQ ID NO: 8072 - DNA, 481 bp, Homo sapiens; identical to SEQ ID NO: 3086

SEQ ID NO: 8073 - DNA, 340 bp, Homo sapiens; identical to SEQ ID NO: 3131

SEQ ID NO: 8074 - DNA, 224 bp, Homo sapiens; identical to SEQ ID NO: 3142

SEQ ID NO: 8075 - DNA, 255 bp, Artificial Sequence; identical to SEQ ID NO: 3536
  Description of Artificial Sequence: Synthetic polynucleotide

SEQ ID NO: 8076 - DNA, 630 bp, Artificial Sequence; identical to SEQ ID NO: 3798
  Description of Artificial Sequence: Synthetic polynucleotide

SEQ ID NO: 8077 - DNA, 283 bp, Artificial Sequence; identical to SEQ ID NO: 3820
  Description of Artificial Sequence: Synthetic polynucleotide

SEQ ID NO: 8078 - DNA, 249 bp, Artificial Sequence; identical to SEQ ID NO: 3842
  Description of Artificial Sequence: Synthetic polynucleotide

SEQ ID NO: 8079 - DNA, 365 bp, Artificial Sequence; identical to SEQ ID NO: 3426
  Description of Artificial Sequence: Synthetic polynucleotide

SEQ ID NO: 8080 - DNA, 324 bp, Artificial Sequence; identical to SEQ ID NO: 3437
  Description of Artificial Sequence: Synthetic polynucleotide

SEQ ID NO: 8081 - DNA, 595 bp, Artificial Sequence; identical to SEQ ID NO: 3459
  Description of Artificial Sequence: Synthetic polynucleotide

SEQ ID NO: 8082 - DNA, 372 bp, Artificial Sequence; identical to SEQ ID NO: 3470
  Description of Artificial Sequence: Synthetic polynucleotide

SEQ ID NO: 8083 - DNA, 296 bp, Artificial Sequence; identical to SEQ ID NO: 3481
  Description of Artificial Sequence: Synthetic polynucleotide

SEQ ID NO: 8084 - DNA, 407 bp, Artificial Sequence; identical to SEQ ID NO: 3492
  Description of Artificial Sequence: Synthetic polynucleotide

SEQ ID NO: 8085 - DNA, 846 bp, Artificial Sequence; identical to SEQ ID NO: 3503
  Description of Artificial Sequence: Synthetic polynucleotide

SEQ ID NO: 8086 - DNA, 481 bp, Artificial Sequence; identical to SEQ ID NO: 3514
  Description of Artificial Sequence: Synthetic polynucleotide

SEQ ID NO: 8087 - DNA, 340 bp, Artificial Sequence; identical to SEQ ID NO: 3559
  Description of Artificial Sequence: Synthetic polynucleotide

SEQ ID NO: 8088 - DNA, 224 bp, Artificial Sequence; identical to SEQ ID NO: 3570
  Description of Artificial Sequence: Synthetic polynucleotide

SEQ ID NO: 8089 - DNA, 255 bp, Artificial Sequence; identical to SEQ ID NO: 3964
  Description of Artificial Sequence: Synthetic polynucleotide

SEQ ID NO: 8090 - DNA, 630 bp, Artificial Sequence; identical to SEQ ID NO: 4226
  Description of Artificial Sequence: Synthetic polynucleotide

SEQ ID NO: 8091 - DNA, 283 bp, Artificial Sequence; identical to SEQ ID NO: 4248
  Description of Artificial Sequence: Synthetic polynucleotide

SEQ ID NO: 8092 - DNA, 249 bp, Artificial Sequence; identical to SEQ ID NO: 4270
  Description of Artificial Sequence: Synthetic polynucleotide

SEQ ID NO: 8093 - DNA, 365 bp, Artificial Sequence; identical to SEQ ID NO: 3854
  Description of Artificial Sequence: Synthetic polynucleotide

SEQ ID NO: 8094 - DNA, 324 bp, Artificial Sequence; identical to SEQ ID NO: 3865
  Description of Artificial Sequence: Synthetic polynucleotide

SEQ ID NO: 8095 - DNA, 595 bp, Artificial Sequence; identical to SEQ ID NO: 3887
  Description of Artificial Sequence: Synthetic polynucleotide

SEQ ID NO: 8096 - DNA, 372 bp, Artificial Sequence; identical to SEQ ID NO: 3898
  Description of Artificial Sequence: Synthetic polynucleotide

SEQ ID NO: 8097 - DNA, 296 bp, Artificial Sequence; identical to SEQ ID NO: 3909
  Description of Artificial Sequence: Synthetic polynucleotide

SEQ ID NO: 8098 - DNA, 407 bp, Artificial Sequence; identical to SEQ ID NO: 3920
  Description of Artificial Sequence: Synthetic polynucleotide

SEQ ID NO: 8099 - DNA, 846 bp, Artificial Sequence; identical to SEQ ID NO: 3931
  Description of Artificial Sequence: Synthetic polynucleotide

SEQ ID NO: 8100 - DNA, 481 bp, Artificial Sequence; identical to SEQ ID NO: 3942
  Description of Artificial Sequence: Synthetic polynucleotide

SEQ ID NO: 8101 - DNA, 340 bp, Artificial Sequence; identical to SEQ ID NO: 3987
  Description of Artificial Sequence: Synthetic polynucleotide

SEQ ID NO: 8102 - DNA, 224 bp, Artificial Sequence; identical to SEQ ID NO: 3998
  Description of Artificial Sequence: Synthetic polynucleotide

SEQ ID NO: 8103 - DNA, 255 bp, Artificial Sequence; identical to SEQ ID NO: 4392
  Description of Artificial Sequence: Synthetic polynucleotide

SEQ ID NO: 8104 - DNA, 630 bp, Artificial Sequence; identical to SEQ ID NO: 4654
  Description of Artificial Sequence: Synthetic polynucleotide

SEQ ID NO: 8105 - DNA, 283 bp, Artificial Sequence; identical to SEQ ID NO: 4676
  Description of Artificial Sequence: Synthetic polynucleotide

SEQ ID NO: 8106 - DNA, 249 bp, Artificial Sequence; identical to SEQ ID NO: 4698
  Description of Artificial Sequence: Synthetic polynucleotide

SEQ ID NO: 8107 - DNA, 365 bp, Artificial Sequence; identical to SEQ ID NO: 4282
  Description of Artificial Sequence: Synthetic polynucleotide

SEQ ID NO: 8108 - DNA, 324 bp, Artificial Sequence; identical to SEQ ID NO: 4293
  Description of Artificial Sequence: Synthetic polynucleotide

SEQ ID NO: 8109 - DNA, 595 bp, Artificial Sequence; identical to SEQ ID NO: 4315
  Description of Artificial Sequence: Synthetic polynucleotide

SEQ ID NO: 8110 - DNA, 372 bp, Artificial Sequence; identical to SEQ ID NO: 4326
  Description of Artificial Sequence: Synthetic polynucleotide

SEQ ID NO: 8111 - DNA, 296 bp, Artificial Sequence; identical to SEQ ID NO: 4337
  Description of Artificial Sequence: Synthetic polynucleotide

SEQ ID NO: 8112 - DNA, 407 bp, Artificial Sequence; identical to SEQ ID NO: 4348
  Description of Artificial Sequence: Synthetic polynucleotide

SEQ ID NO: 8113 - DNA, 846 bp, Artificial Sequence; identical to SEQ ID NO: 4359
  Description of Artificial Sequence: Synthetic polynucleotide

SEQ ID NO: 8114 - DNA, 481 bp, Artificial Sequence; identical to SEQ ID NO: 4370
  Description of Artificial Sequence: Synthetic polynucleotide

SEQ ID NO: 8115 - DNA, 340 bp, Artificial Sequence; identical to SEQ ID NO: 4415
  Description of Artificial Sequence: Synthetic polynucleotide

SEQ ID NO: 8116 - DNA, 224 bp, Artificial Sequence; identical to SEQ ID NO: 4426
  Description of Artificial Sequence: Synthetic polynucleotide

SEQ ID NO: 8117 - DNA, 255 bp, Artificial Sequence; identical to SEQ ID NO: 4820
  Description of Artificial Sequence: Synthetic polynucleotide

SEQ ID NO: 8118 - DNA, 630 bp, Artificial Sequence; identical to SEQ ID NO: 5082
  Description of Artificial Sequence: Synthetic polynucleotide

SEQ ID NO: 8119 - DNA, 283 bp, Artificial Sequence; identical to SEQ ID NO: 5104
  Description of Artificial Sequence: Synthetic polynucleotide

SEQ ID NO: 8120 - DNA, 249 bp, Artificial Sequence; identical to SEQ ID NO: 5126
  Description of Artificial Sequence: Synthetic polynucleotide

SEQ ID NO: 8121 - DNA, 365 bp, Artificial Sequence; identical to SEQ ID NO: 4710
  Description of Artificial Sequence: Synthetic polynucleotide

SEQ ID NO: 8122 - DNA, 324 bp, Artificial Sequence; identical to SEQ ID NO: 4721
  Description of Artificial Sequence: Synthetic polynucleotide

SEQ ID NO: 8123 - DNA, 595 bp, Artificial Sequence; identical to SEQ ID NO: 4743
  Description of Artificial Sequence: Synthetic polynucleotide

SEQ ID NO: 8124 - DNA, 372 bp, Artificial Sequence; identical to SEQ ID NO: 4754
  Description of Artificial Sequence: Synthetic polynucleotide

SEQ ID NO: 8125 - DNA, 296 bp, Artificial Sequence; identical to SEQ ID NO: 4765
  Description of Artificial Sequence: Synthetic polynucleotide

SEQ ID NO: 8126 - DNA, 407 bp, Artificial Sequence; identical to SEQ ID NO: 4776
  Description of Artificial Sequence: Synthetic polynucleotide

SEQ ID NO: 8127 - DNA, 846 bp, Artificial Sequence; identical to SEQ ID NO: 4787
  Description of Artificial Sequence: Synthetic polynucleotide

SEQ ID NO: 8128 - DNA, 481 bp, Artificial Sequence; identical to SEQ ID NO: 4798
  Description of Artificial Sequence: Synthetic polynucleotide

SEQ ID NO: 8129 - DNA, 340 bp, Artificial Sequence; identical to SEQ ID NO: 4843
  Description of Artificial Sequence: Synthetic polynucleotide

SEQ ID NO: 8130 - DNA, 224 bp, Artificial Sequence; identical to SEQ ID NO: 4854
  Description of Artificial Sequence: Synthetic polynucleotide

SEQ ID NO: 8131 - DNA, 395 bp, Homo sapiens; identical to SEQ ID NO: 7829

SEQ ID NO: 8132 - DNA, 5819 bp, Homo sapiens; identical to SEQ ID NO: 7838

SEQ ID NO: 8133 - DNA, 1265 bp, Homo sapiens; identical to SEQ ID NO: 7840

SEQ ID NO: 8134 - DNA, 362 bp, Homo sapiens; identical to SEQ ID NO: 7842

SEQ ID NO: 8135 - DNA, 572 bp, Homo sapiens; identical to SEQ ID NO: 7820

SEQ ID NO: 8136 - DNA, 2400 bp, Homo sapiens; identical to SEQ ID NO: 7822

SEQ ID NO: 8137 - DNA, 1859 bp, Homo sapiens; identical to SEQ ID NO: 7823

SEQ ID NO: 8138 - DNA, 902 bp, Homo sapiens; identical to SEQ ID NO: 7824

SEQ ID NO: 8139 - DNA, 2044 bp, Homo sapiens; identical to SEQ ID NO: 7825

SEQ ID NO: 8140 - DNA, 1152 bp, Homo sapiens; identical to SEQ ID NO: 7826

SEQ ID NO: 8141 - DNA, 872 bp, Homo sapiens; identical to SEQ ID NO: 7827

SEQ ID NO: 8142 - DNA, 1743 bp, Homo sapiens; identical to SEQ ID NO: 7832

SEQ ID NO: 8143 - DNA, 2405 bp, Homo sapiens; identical to SEQ ID NO: 7833

SEQ ID NO: 8144 - DNA, 395 bp, Homo sapiens; identical to SEQ ID NO: 7853

SEQ ID NO: 8145 - DNA, 5819 bp, Homo sapiens; identical to SEQ ID NO: 7862

SEQ ID NO: 8146 - DNA, 1265 bp, Homo sapiens; identical to SEQ ID NO: 7864

SEQ ID NO: 8147 - DNA, 362 bp, Homo sapiens; identical to SEQ ID NO: 7866

SEQ ID NO: 8148 - DNA, 572 bp, Homo sapiens; identical to SEQ ID NO: 7844

SEQ ID NO: 8149 - DNA, 2400 bp, Homo sapiens; identical to SEQ ID NO: 7846

SEQ ID NO: 8150 - DNA, 1859 bp, Homo sapiens; identical to SEQ ID NO: 7847

SEQ ID NO: 8151 - DNA, 902 bp, Homo sapiens; identical to SEQ ID NO: 7848

SEQ ID NO: 8152 - DNA, 2044 bp, Homo sapiens; identical to SEQ ID NO: 7849

SEQ ID NO: 8153 - DNA, 1152 bp, Homo sapiens; identical to SEQ ID NO: 7850

SEQ ID NO: 8154 - DNA, 872 bp, Homo sapiens; identical to SEQ ID NO: 7851

SEQ ID NO: 8155 - DNA, 1743 bp, Homo sapiens; identical to SEQ ID NO: 7856

SEQ ID NO: 8156 - DNA, 2405 bp, Homo sapiens; identical to SEQ ID NO: 7857

SEQ ID NO: 8157 - DNA, 395 bp, Artificial Sequence; identical to SEQ ID NO: 7877
  Description of Artificial Sequence: Synthetic polynucleotide

SEQ ID NO: 8158 - DNA, 5819 bp, Artificial Sequence; identical to SEQ ID NO: 7886
  Description of Artificial Sequence: Synthetic polynucleotide

SEQ ID NO: 8159 - DNA, 1265 bp, Artificial Sequence; identical to SEQ ID NO: 7888
  Description of Artificial Sequence: Synthetic polynucleotide

SEQ ID NO: 8160 - DNA, 362 bp, Artificial Sequence; identical to SEQ ID NO: 7890
  Description of Artificial Sequence: Synthetic polynucleotide

SEQ ID NO: 8161 - DNA, 572 bp, Artificial Sequence; identical to SEQ ID NO: 7868
  Description of Artificial Sequence: Synthetic polynucleotide

SEQ ID NO: 8162 - DNA, 2400 bp, Artificial Sequence; identical to SEQ ID NO: 7870
  Description of Artificial Sequence: Synthetic polynucleotide

SEQ ID NO: 8163 - DNA, 1859 bp, Artificial Sequence; identical to SEQ ID NO: 7871
  Description of Artificial Sequence: Synthetic polynucleotide

SEQ ID NO: 8164 - DNA, 902 bp, Artificial Sequence; identical to SEQ ID NO: 7872
  Description of Artificial Sequence: Synthetic polynucleotide

SEQ ID NO: 8165 - DNA, 2044 bp, Artificial Sequence; identical to SEQ ID NO: 7873
  Description of Artificial Sequence: Synthetic polynucleotide

SEQ ID NO: 8166 - DNA, 1152 bp, Artificial Sequence; identical to SEQ ID NO: 7874
  Description of Artificial Sequence: Synthetic polynucleotide

SEQ ID NO: 8167 - DNA, 872 bp, Artificial Sequence; identical to SEQ ID NO: 7875
  Description of Artificial Sequence: Synthetic polynucleotide

SEQ ID NO: 8168 - DNA, 1743 bp, Artificial Sequence; identical to SEQ ID NO: 7880
  Description of Artificial Sequence: Synthetic polynucleotide

SEQ ID NO: 8169 - DNA, 2405 bp, Artificial Sequence; identical to SEQ ID NO: 7881
  Description of Artificial Sequence: Synthetic polynucleotide

SEQ ID NO: 8170 - DNA, 395 bp, Artificial Sequence; identical to SEQ ID NO: 7901
  Description of Artificial Sequence: Synthetic polynucleotide

SEQ ID NO: 8171 - DNA, 5819 bp, Artificial Sequence; identical to SEQ ID NO: 7910
  Description of Artificial Sequence: Synthetic polynucleotide

SEQ ID NO: 8172 - DNA, 1265 bp, Artificial Sequence; identical to SEQ ID NO: 7912
  Description of Artificial Sequence: Synthetic polynucleotide

SEQ ID NO: 8173 - DNA, 362 bp, Artificial Sequence; identical to SEQ ID NO: 7914
  Description of Artificial Sequence: Synthetic polynucleotide

SEQ ID NO: 8174 - DNA, 572 bp, Artificial Sequence; identical to SEQ ID NO: 7892
  Description of Artificial Sequence: Synthetic polynucleotide

SEQ ID NO: 8175 - DNA, 2400 bp, Artificial Sequence; identical to SEQ ID NO: 7894
  Description of Artificial Sequence: Synthetic polynucleotide

SEQ ID NO: 8176 - DNA, 1859 bp, Artificial Sequence; identical to SEQ ID NO: 7895
  Description of Artificial Sequence: Synthetic polynucleotide

SEQ ID NO: 8177 - DNA, 902 bp, Artificial Sequence; identical to SEQ ID NO: 7896
  Description of Artificial Sequence: Synthetic polynucleotide

SEQ ID NO: 8178 - DNA, 2044 bp, Artificial Sequence; identical to SEQ ID NO: 7897
  Description of Artificial Sequence: Synthetic polynucleotide

SEQ ID NO: 8179 - DNA, 1152 bp, Artificial Sequence; identical to SEQ ID NO: 7898
  Description of Artificial Sequence: Synthetic polynucleotide

SEQ ID NO: 8180 - DNA, 872 bp, Artificial Sequence; identical to SEQ ID NO: 7899
  Description of Artificial Sequence: Synthetic polynucleotide

SEQ ID NO: 8181 - DNA, 1743 bp, Artificial Sequence; identical to SEQ ID NO: 7904
  Description of Artificial Sequence: Synthetic polynucleotide

SEQ ID NO: 8182 - DNA, 2405 bp, Artificial Sequence; identical to SEQ ID NO: 7905
  Description of Artificial Sequence: Synthetic polynucleotide

SEQ ID NO: 8183 - DNA, 395 bp, Artificial Sequence; identical to SEQ ID NO: 7925
  Description of Artificial Sequence: Synthetic polynucleotide

SEQ ID NO: 8184 - DNA, 5819 bp, Artificial Sequence; identical to SEQ ID NO: 7934
  Description of Artificial Sequence: Synthetic polynucleotide

SEQ ID NO: 8185 - DNA, 1265 bp, Artificial Sequence; identical to SEQ ID NO: 7936
  Description of Artificial Sequence: Synthetic polynucleotide

SEQ ID NO: 8186 - DNA, 362 bp, Artificial Sequence; identical to SEQ ID NO: 7938
  Description of Artificial Sequence: Synthetic polynucleotide

SEQ ID NO: 8187 - DNA, 572 bp, Artificial Sequence; identical to SEQ ID NO: 7916
  Description of Artificial Sequence: Synthetic polynucleotide

SEQ ID NO: 8188 - DNA, 2400 bp, Artificial Sequence; identical to SEQ ID NO: 7918
  Description of Artificial Sequence: Synthetic polynucleotide

SEQ ID NO: 8189 - DNA, 1859 bp, Artificial Sequence; identical to SEQ ID NO: 7919
  Description of Artificial Sequence: Synthetic polynucleotide

SEQ ID NO: 8190 - DNA, 902 bp, Artificial Sequence; identical to SEQ ID NO: 7920
  Description of Artificial Sequence: Synthetic polynucleotide

SEQ ID NO: 8191 - DNA, 2044 bp, Artificial Sequence; identical to SEQ ID NO: 7921
  Description of Artificial Sequence: Synthetic polynucleotide

SEQ ID NO: 8192 - DNA, 1152 bp, Artificial Sequence; identical to SEQ ID NO: 7922
  Description of Artificial Sequence: Synthetic polynucleotide

SEQ ID NO: 8193 - DNA, 872 bp, Artificial Sequence; identical to SEQ ID NO: 7923
  Description of Artificial Sequence: Synthetic polynucleotide

SEQ ID NO: 8194 - DNA, 1743 bp, Artificial Sequence; identical to SEQ ID NO: 7928
  Description of Artificial Sequence: Synthetic polynucleotide

SEQ ID NO: 8195 - DNA, 2405 bp, Artificial Sequence; identical to SEQ ID NO: 7929
  Description of Artificial Sequence: Synthetic polynucleotide

SEQ ID NO: 8196 - DNA, 395 bp, Artificial Sequence; identical to SEQ ID NO: 7949
  Description of Artificial Sequence: Synthetic polynucleotide

SEQ ID NO: 8197 - DNA, 5819 bp, Artificial Sequence; identical to SEQ ID NO: 7958
  Description of Artificial Sequence: Synthetic polynucleotide

SEQ ID NO: 8198 - DNA, 1265 bp, Artificial Sequence; identical to SEQ ID NO: 7960
  Description of Artificial Sequence: Synthetic polynucleotide

SEQ ID NO: 8199 - DNA, 362 bp, Artificial Sequence; identical to SEQ ID NO: 7962
  Description of Artificial Sequence: Synthetic polynucleotide

SEQ ID NO: 8200 - DNA, 572 bp, Artificial Sequence; identical to SEQ ID NO: 7940
  Description of Artificial Sequence: Synthetic polynucleotide

SEQ ID NO: 8201 - DNA, 2400 bp, Artificial Sequence; identical to SEQ ID NO: 7942
  Description of Artificial Sequence: Synthetic polynucleotide

SEQ ID NO: 8202 - DNA, 1859 bp, Artificial Sequence; identical to SEQ ID NO: 7943
  Description of Artificial Sequence: Synthetic polynucleotide

SEQ ID NO: 8203 - DNA, 902 bp, Artificial Sequence; identical to SEQ ID NO: 7944
  Description of Artificial Sequence: Synthetic polynucleotide

SEQ ID NO: 8204 - DNA, 2044 bp, Artificial Sequence; identical to SEQ ID NO: 7945
  Description of Artificial Sequence: Synthetic polynucleotide

SEQ ID NO: 8205 - DNA, 1152 bp, Artificial Sequence; identical to SEQ ID NO: 7946
  Description of Artificial Sequence: Synthetic polynucleotide

SEQ ID NO: 8206 - DNA, 872 bp, Artificial Sequence; identical to SEQ ID NO: 7947
  Description of Artificial Sequence: Synthetic polynucleotide

SEQ ID NO: 8207 - DNA, 1743 bp, Artificial Sequence; identical to SEQ ID NO: 7952
  Description of Artificial Sequence: Synthetic polynucleotide

SEQ ID NO: 8208 - DNA, 2405 bp, Artificial Sequence; identical to SEQ ID NO: 7953
  Description of Artificial Sequence: Synthetic polynucleotide

SEQ ID NO: 8209 - DNA, 355 bp, Homo sapiens
tcgaactggatgccggatggaaacctctctgcgctattagactgcgtccagtacagcagatggcacgagcacgtgcggcgctcagcttaggctctcggaggcagctgagttggaaatcccgacggaaagcacccacaagctcccactctgcgctggcccacccgcgtgcacgcccaccccccacgcgcgtccctggctcagaagcgcacagatgtttactgcttagagccggtaccgctggggagatcgagcgacttgcgcggcgcacagtgcggcgctggcagggctctgggctcccggtcgggggttcgagcggccaagggatgggggtgggggcggggagagtggggggagg

SEQ ID NO: 8210 - DNA, 730 bp, Homo sapiens
ctgctccggagctgcaggcttctaggcgctgggagggcgaagcaggagagccggttagtccatccccgcgctccgcaaacttttctaaccgggtaacaaagtgagcagcggtggccgccgcgattcctttaacttcgcattccggaggctcgagggggctctgggaccgagcggcctcgcagcggcgacagaaatacatattttacgaaaaagaaaaaaaaaaaaacgagtcgcgcgaacccgtcaagtcagatgtgcgcggcttgaagcggaggaggctctgacgtcagccccacctcgcgcagcccggcctggccgcagactcgccggtcactcgccggcggctcaggccgggaggggccaggacagtcccggccgcgcggtggacggaggggccattcctccgggcgttagcaaataaattccatccgagtcaatatcgcccagcgaacggtgtttctctttagtcacccgagaacgagaggcacttttaattagaaattaattaatgagcagctgctccttcccgccccactgtaatcattcgtctcaattacaaatgagacctatgaaaggacacgctgaagatgtaatcaacagttaaaattagcccggcgctgcgcaggcggccggcccggcctcgcgctggcgcgctctgctccgagtggcaggaaggggctcgcaggcgccccgcacgcgtctcgtcactattgtttaatcgagaatcagc

SEQ ID NO: 8211 - DNA, 383 bp, Homo sapiens
agcggcggcgcgggccgcgggcggcgatgggcgaggagcagagcacggtgagcggcggcggcgggccccaggagtcgcagaccctggccagtggcactgcgggccaccctgagcccccgaggcctcagggggacagcgcccgggcgcccccgctgcgcgccgcctccgcggagccgagcggcggtggctgcggaagcgactggggctgcgcggacaccagcgccccagagcccgcgaggagcctggggcccccgggctggagtaagagccgagcaccggcgcagcctgcgggactggcactcaccgggcctctcaatccccagaccttgccactgcagttggagctggaggaggaagaggaggaagctggggatcgaaaagag

SEQ ID NO: 8212 - DNA, 349 bp, Homo sapiens
agaccgagcgggactatgtgggcacgctggagttcctggtgtcggtgagtgtccccggcagacgcagggggacgtccgggcggcgcggggcgcgggtcccggagtggctgcgggaaggacgcgcggcattgtctgtgcggggacccgggacgggtcggggcatcacaggcgcgggaatccacgtgtggactctgcgttcgcgggcgcggtgacccccgcggggatttgttggtgccccgagactcactgagttgcgggggccttggagacctccaggtctgaaaagttagctctagagaagagagctccagtccagggaatcccggctgccctatcttccctcactttt

SEQ ID NO: 8213 - DNA, 465 bp, Homo sapiens
ccgcacggcccgccgggtcgcggtgagcaaggcgggcaggcgcggcgggaggcgtccgacgcccaccccgggcttggcgtccccttccggccaccacgcggcgccgccccccgggatcctccagtccccggagccccgcgcgcccagagccgctcggagcgcgggcggggtcagcttgggcagccgcgggtcgctgctgcgtcggaagtctccgtcgccagggagccccttgggcgccaggtcctgggcccctgggcgaagtcgacgccagaacatgcttggccccgcactcagctcaccgcaccctcagcgcgcgtgggtggggggcgccggctgaggtggggagggcatagtccagccccaggccatagtgccccgggcggggcagcgcggtgcggggtgaacgccaccggcccggcggacagcgagtggcttcaggcgagagctcccagagcctctgtttcc

SEQ ID NO: 8214 - DNA, 424 bp, Homo sapiens
acacagaggtgacgcacgagtgacccacagagagggacccctgggcctctggtgggggcctgggagacggtcgaagggggcccgggcagaagctccgcggccgggccggcggagggaagggggcggccgcgcccgggacccggctcccctcggctccacttacctgctccgaagagtggccccagctctgcgcctcttcctgcgaccccacacacagggacagccccaggcacagccccagcagcaggagcatggcggggcgagggcgcgggacgctcggggacccggcgggacacgctttgcagcgcccagggctccagccactgcgggacgctctcggggccgcccaccccgcggtcccagcccggaccccgcccaccccacggacccagcccggaccccgcccaccccgcggtcccagccc

SEQ ID NO: 8215 - DNA, 540 bp, Homo sapiens
acgaggaggaagaggaggaggaagaagaagaagaggaagaggaggaggaggaggaggaggacgcgtctaggctgagatggttcgcgtggatattgctactcattctaagactgctgcctccgccgccgccgccgccgccgctgctgccgccgccgccgccgccaccatttgccatagctagcaacgggcagccggcgcaggggctcgggggagctcctcccgccgccagcgccaccccaaacacccatcaacagccatattgctgctactgctgccgccgccgccgccgccgcggagcgcgggaggggggcggggaggcgcctgggctcggggcgctgtgcgcgacctggcggggtgcgccgagatatatacagcgagccgccgccgcccgcccgggggggagggggatggagtgcgcgggcagctccccctccccggcccgcgccccgctcgccccgggctgcgctggccccgagcgccgagagccagggggcgccgcgggccgcccgcgcccggggtctgcgccgcccccgggcccgc

SEQ ID NO: 8216 - DNA, 472 bp, Homo sapiens
tctttttaatcccatgtcttaaaagccaaactctagttctaaagtgcagtgtggcattagcgaatgtggtggactccggcaggcctggggcaggggaatctccggtaacatccctcagtaccgaaggcaggatttcccggccacttccgtcggttggaattctcttaagcattgccctgagtctattttcaaatgaaagggggaaaaacccaaaccagattagaatctgaaacagctgaaacagctatcgatttccagcttgctttcaagtctggcagagactgtgaaagtcctaacttctccgcgatgtcagccacggcccgcggcggtcacggagccacttcagcacctcgcgatggacagtgacccccggcgtggcgcgagttccctgcggtccccacgcgggcctgggcggcgggtccctccacggctccgtccagacacccggaggcacctgccaaagctgcggagg

SEQ ID NO: 8217 - DNA, 396 bp, Homo sapiens
ggggagtgggggagtgagcagacgcccttctcctaggaggccggaatttctgcctccatctcccaccggggtccggctggccagaggcaagcttcgagaccccccaccaaccaccaccaccgttgcgagggccggtgaggctgcagataacgcttgcaaggacgggagtcggggagggtgtagggcgagtttaaaggacgggcagagcaagccccgggaagaggcaggggttttccctcccgggtcgccgccccccgcaccctcggagccagccgcagccacgcagcgccgcctgccgggcacaccaaggacctggcgcgcacgtggcgcttacccccacccccgggtccgctcctggctcgcgctcagcctccccagactattcgcaaattgagg

SEQ ID NO: 8218 - DNA, 507 bp, Homo sapiens
tgactttggggctgacaccgccaaagggcagtcagtgctcgcccaggccacttcgggaggcccaggggcacggcgaggggtcggggaaaggcgatcgcccactacagcccgcgcgcctagactgagggaggagccgggctgcagaaccggcggcggatggagacgggagggaggctgcgaggtcgctcgaggagagactaaggctctagaaacggagaagcgggcgctctgcgggaggcggcggcgctgccgctggccgtcaagggcgggaagtgttctgggactctcattaggggccgcgagcctcgagcgtcaaattcccgcggcgtccgcctagcgcgctgctgtggcgggcgcggagggcgcgcgccggcagtgggggctgcggcggcggagggcacgggcccccgctcagcgtcctcaccttcttggtgcagctgcctcccgcgagccgagacactcctgtcagggaagaggagcgccccggctgtccccctagagtctcct

SEQ ID NO: 8219 - DNA, 946 bp, Homo sapiens
cgctactcacccgagccgctcgggctggccgcgagccgggatccgcgagggctggcgggctctggcccccgaggacgcagacatgtggcttgaacctccgctcccctagccgttgcctctgtgcatctttctgggcgcccccagcgaatgcgagcggcgaggcgagggcgagcgcgccgaggaagggcgggagaggcgcggagcttggccgcgccgcgctgcgccgagcgccgggctctccccgcgagctccccgggcccgcgcgcgcgccccccactgcccccgccccccgcgcggcgcgtgccccccaccccccgccgcgcgccctcgcacccgcccggctccacgcggcgcgcgcctgccctggcggcagcggcggcggcggcggcgcgtcctcccccgaacgccgtctccagggctgctggctgcgctctccattgttccgcggctgctgcccggggtgggcggcgaggcgggggggaggtgtcggcttggccgccggggagggcttaccgctcgggcggaccctcactgcgagagcgatgcgggcccaggcgcggcgcgcgggggctgcagggcgcctagcactgggggttgccggcgcgcgggggcctcctcctggctcccaggcactcgctgctgctgggcgcccctcgcatcctcggttactatggatatctcgctcctccgccgccccctccgcgcactccgggaggccgccggggcggtagcagcggcgcggctccgcgggtgcccaggtgaccggctcggcagcggcagagcagtggcagcagccgccactgccgctgttactgcggtcgccgccgctggagagaggaggacgaggagggcaaggggcagaagcaggtcctgctctgtctgccccagaggccacctcgggtttcttctcactaaccaagcgacttcgtgtttacctcgcaggaga

SEQ ID NO: 8220 - DNA, 390 bp, Homo sapiens
cggggcaggcgcggcccgcaaggacccccgcgatggagacgcaacactgccgcgactgcacttggggcagccccgccgcgtcccagccgcctcccggcaggaagcgtaggtgtgtgagccgacccggagcgagccgcgccctcgggccagcgtgggcagggcgccgcagcctgcgcagccccgaggaccccgcgtcgctctcccgagccagggttctcaggagcgggccgcgcaggagacgttagagggggttgttagcggctgttgggagaacgggtcacggaaacagtcccttccaaagccggggccatcgtggggtgggcgagtccgccctcccaggccgggggcgcggaccagaggggacgtgtgcagacggccgcggtcagcccc

SEQ ID NO: 8221 - DNA, 440 bp, Homo sapiens
ctggtgagcagtggggcgggtgggcgggtgcccgcgacgggaaggggctgggcggcgctgacggatgccggtcctcagggagttttaaggcggcgggcaccagcgggctgatcctgaagcgctgctcggagccggagcgctactgcctggcgcggctgatggctgacgcgctgcgcggctgcgtgcctgccttccacggcgtggtggagcgcgacggcgaaagctacctgcagctgcaggacctgctcgatggcttcgacggaccttgtgtgctcgactgcaaaatgggcgtcaggtatgcgtgccctgccaggtcggttggggggatcaagtaggggtccggggccgggacagctgcttgagggggacccggggcgagtgctcgaaggggtctccgtgtgcgccccctcatgccctggccgctgcctgcgcccccacag

SEQ ID NO: 8222 - DNA, 324 bp, Homo sapiens
aattccagcatccggctgcactcccggcggcttccccagctacctgaggacagtacagggggtgagatggggtggtggttggtgaacgttggttactttattttatattattttattttgagagttgccataattaccggcgccaccccccgtgcaccctgaggtctggttggcgagccgctgctgggagttttctgcaaataccccccaaagcctgaaggcgggcttcaaacgcaggcgccggggaccatgggagccttcaaatagctgcgctggcgcaatgataccttaatgatagattttccgttcttatttttagctctc

SEQ ID NO: 8223 - DNA, 355 bp, Artificial Sequence
  Description of Artificial Sequence: Synthetic polynucleotide
tygaattggatgtyggatggaaatttttttgygttattagattgygtttagtatagtagatggtaygagtaygtgyggygtttagtttaggttttyggaggtagttgagttggaaatttygayggaaagtatttataagtttttattttgygttggtttattygygtgtaygtttattttttaygygygtttttggtttagaagygtatagatgtttattgtttagagtyggtatygttggggagatygagygatttgygyggygtatagtgyggygttggtagggttttgggttttyggtygggggttygagyggttaagggatgggggtgggggyggggagagtggggggagg

SEQ ID NO: 8224 - DNA, 730 bp, Artificial Sequence
  Description of Artificial Sequence: Synthetic polynucleotide
ttgtttyggagttgtaggtttttaggygttgggagggygaagtaggagagtyggttagtttattttygygtttygtaaatttttttaatygggtaataaagtgagtagyggtggtygtygygatttttttaatttygtatttyggaggttygagggggttttgggatygagyggtttygtagyggygatagaaatatatattttaygaaaaagaaaaaaaaaaaaaygagtygygygaattygttaagttagatgtgygyggtttgaagyggaggaggttttgaygttagttttatttygygtagttyggtttggtygtagattygtyggttattygtyggyggtttaggtygggaggggttaggatagtttyggtygygyggtggayggaggggttattttttygggygttagtaaataaattttattygagttaatatygtttagygaayggtgtttttttttagttattygagaaygagaggtatttttaattagaaattaattaatgagtagttgttttttttygttttattgtaattattygttttaattataaatgagatttatgaaaggataygttgaagatgtaattaatagttaaaattagttyggygttgygtaggyggtyggttyggtttygygttggygygttttgtttygagtggtaggaaggggttygtaggygtttygtaygygtttygttattattgtttaatygagaattagt

SEQ ID NO: 8225 - DNA, 383 bp, Artificial Sequence
  Description of Artificial Sequence: Synthetic polynucleotide
agyggyggygygggcygygggyggygatgggygaggagtagagtayggtgagyggyggyggygggttttaggagtygtagattttggttagtggtattgygggttattttgagttttygaggttttagggggatagygccygggygccccygctgygygcygccttygyggagtygagyggyggtggttgyggaagygattggggttgygyggatattagygttttagagttygygaggagtttggggttttygggttggagtaagagtygagtatyggygtagtttgygggattggtatttatygggttttttaatttttagattttgttattgtagttggagttggaggaggaagaggaggaagttggggatygaaaagag

SEQ ID NO: 8226 - DNA, 349 bp, Artificial Sequence
  Description of Artificial Sequence: Synthetic polynucleotide
agatygagygggattatgtgggtaygttggagtttttggtgtyggtgagtgttttyggtagaygtagggggaygtcygggyggygyggggygygggtttyggagtggttgygggaaggaygygyggtattgtttgtgyggggattygggaygggtyggggtattataggygygggaatttaygtgtggattttgygttygygggygyggtgattttygyggggatttgttggtgtttygagatttattgagttgygggggttttggagatttttaggtttgaaaagttagttttagagaagagagttttagtttagggaatttyggttgttttatttttttttattttt

SEQ ID NO: 8227 - DNA, 465 bp, Artificial Sequence
  Description of Artificial Sequence: Synthetic polynucleotide
tygtayggttygtygggtygyggtgagtaaggygggtaggygyggygggaggygttygaygtttatttygggtttggygttttttttyggttattaygyggygtygtttttygggattttttagttttyggagtttygygygtttagagtygttyggagygygggyggggttagtttgggtagtygygggtygttgttgygtyggaagttttygtygttagggagttttttgggygttaggttttgggtttttgggygaagtygaygttagaatatgtttggtttygtatttagtttatygtatttttagygygygtgggtggggggygtyggttgaggtggggagggtatagtttagttttaggttatagtgtttygggyggggtagygyggtgyggggtgaaygttatyggttyggyggatagygagtggcttcaggygagagctcccagagcctctgtttcc

SEQ ID NO: 8228 - DNA, 424 bp, Artificial Sequence
  Description of Artificial Sequence: Synthetic polynucleotide
atatagaggtgaygtaygagtgatttatagagagggatttttgggtttttggtgggggtttgggagayggtygaagggggttygggtagaagttcygyggcygggcyggyggagggaagggggyggcygygccygggattyggtttttttyggttttatttatttgtttygaagagtggttttagttttgygtttttttttgygattttatatatagggatagttttaggtatagttttagtagtaggagtatggyggggygagggygygggaygttyggggattyggygggataygttttgtagygtttagggttttagttattgygggaygttttyggggtygcccacccygyggtcccagccyggacccygcccaccccayggacccagccyggacccygcccacccygyggtcccagccc

SEQ ID NO: 8229 - DNA, 540 bp, Artificial Sequence
  Description of Artificial Sequence: Synthetic polynucleotide
aygaggaggaagaggaggaggaagaagaagaagaggaagaggaggaggaggaggaggaggaygygtttaggttgagatggttygygtggatattgttatttattttaagattgctgcctcygcygcygcygcygcygcygctgctgcygcygcygcygcygccaccatttgttatagttagtaaygggtagtyggygtaggggttygggggagtttttttygtygttagygttattttaaatatttattaatagttatattgttgttattgctgcygcygcygcygcygcygyggagygygggaggggggyggggaggygtttgggttyggggygttgtgygygatttggyggggtgygtygagatatatatagygagcygcygcygccygccygggggggagggggatggagtgygygggtagttttttttcccyggccygygcccygctygcccygggctgygctggcccygagygcygagagccagggggygcygygggcygccygygccyggggtctgygcygccccygggccygc

SEQ ID NO: 8230 - DNA, 472 bp, Artificial Sequence
  Description of Artificial Sequence: Synthetic polynucleotide
tttttttaattttatgttttaaaagttaaattttagttttaaagtgtagtgtggtattagygaatgtggtggatttyggtaggtttggggtaggggaattttyggtaatattttttagtatygaaggtaggatttttyggttattttygtyggttggaatttttttaagtattgttttgagtttatttttaaatgaaagggggaaaaatttaaattagattagaatttgaaatagttgaaatagttatygatttttagtttgtttttaagtttggtagagattgtgaaagttttaattttttygygatgttagttayggttygyggyggttayggagttattttagtatttygygatggatagtgattttyggygtggygygagttttttgyggtttttaygygggtttgggyggygggtttttttayggtttygtttagatattyggaggtatttgttaaagttgyggagg

SEQ ID NO: 8231 - DNA, 396 bp, Artificial Sequence
  Description of Artificial Sequence: Synthetic polynucleotide
ggggagtgggggagtgagtagaygttttttttttaggaggtyggaatttttgtttttattttttatyggggttyggttggttagaggtaagtttygagattttttattaattattattatygttgygagggtyggtgaggttgtagataaygtttgtaaggaygggagtyggggagggtgtagggygagtttaaaggaygggtagagtaagtttygggaagaggtaggggttttttttttygggtygtygtttttygtattttyggagttagtygtagttaygtagygtygtttgtygggtatattaaggatttggygygtaygtggygtttatttttattttygggttygtttttggttygygtttagtttttttagattattygtaaattgagg

SEQ ID NO: 8232 - DNA, 507 bp, Artificial Sequence
  Description of Artificial Sequence: Synthetic polynucleotide
tgattttggggttgatatygttaaagggtagttagtgttygtttaggttatttygggaggtttaggggtayggygaggggtyggggaaaggygatygtttattatagttygygygtttagattgagggaggagtygggttgtagaatyggyggyggatggagaygggagggaggttgygaggtygttygaggagagattaaggttttagaaayggagaagygggygttttgygggaggyggyggygttgtygttggtygttaagggygggaagtgttttgggatttttattaggggtygygagtttygagygttaaattttygyggygttygtttagygygttgttgtggygggygyggagggygygygcyggcagtgggggctgyggyggyggagggcaygggccccygcttagygtttttatttttttggtgtagttgtttttygygagtygagatatttttgttagggaagaggagygtttyggttgtttttttagagtttttt

SEQ ID NO: 8233 - DNA, 946 bp, Artificial Sequence
  Description of Artificial Sequence: Synthetic polynucleotide
ygttatttattygagtygttygggttggtygygagtygggattygygagggttggygggttttggttttygaggaygtagatatgtggtttgaattttygtttttttagtygttgtttttgtgtatttttttgggygtttttagygaatgygagyggygaggygagggygagygygtygaggaagggygggagaggygyggagtttggcygygcygygctgygcygagygcygggctctcccygygagctcccygggccygygygygygccccccactgccccygcccccygygyggygygtgccccccacccccygcygygygccctygcaccygccyggctccaygyggygygygcctgttttggyggcagyggyggyggyggyggygygttttttttygaaygtygtttttagggttgttggttgygttttttattgtttygyggttgttgttyggggtgggyggygaggygggggggaggtgtyggtttggtygtyggggagggtttatygttygggyggatttttattgygagagygatgygggtttaggygyggygygygggggttgtagggygtttagtattgggggttgtyggygygygggggtttttttttggtttttaggtattygttgttgttgggygtttttygtattttyggttattatggatatttygttttttygtygtttttttygygtatttygggaggtygtyggggyggtagtagyggygyggtttygygggtgtttaggtgatyggttyggtagyggtagagtagtggtagtagtygttattgtygttgttattgyggtygtygtygttggagagaggaggaygaggagggtaaggggtagaagtaggttttgttttgtttgttttagaggttatttygggtttttttttattaattaagygatttygtgtttatttygtaggaga

SEQ ID NO: 8234 - DNA, 390 bp, Artificial Sequence
  Description of Artificial Sequence: Synthetic polynucleotide
yggggtaggygyggttygtaaggattttygygatggagaygtaatattgtygygattgtatttggggtagtttygtygygttttagtygtttttyggtaggaagygtaggtgtgtgagtygattyggagygagtygygttttygggttagygtgggtagggygtygtagtttgygtagtttygaggatttygygtygttttttygagttagggtttttaggagygggtygygtaggagaygttagagggggttgttagyggttgttgggagaaygggttayggaaatagttttttttaaagtyggggttatygtggggtgggygagttygtttttttaggtygggggygyggattagaggggaygtgtgtagayggtygyggttagtttt

SEQ ID NO: 8235 - DNA, 440 bp, Artificial Sequence
  Description of Artificial Sequence: Synthetic polynucleotide
ttggtgagtagtggggygggtgggygggtgttygygaygggaaggggttgggyggygttgayggatgtyggtttttagggagttttaaggyggygggtattagygggttgattttgaagygttgttyggagtyggagygttattgtttggygyggttgatggttgaygygttgygyggttgygtgtttgttttttayggygtggtggagygygayggygaaagttatttgtagttgtaggatttgttygatggtttygayggattttgtgtgttygattgtaaaatgggygttaggtatgygtgttttgttaggtyggttggggggattaagtaggggttyggggtygggatagttgtttgagggggattyggggygagtgttygaaggggttttygtgtgygtttttttatgttttggtygttgtttgygtttttatag

SEQ ID NO: 8236 - DNA, 324 bp, Artificial Sequence
  Description of Artificial Sequence: Synthetic polynucleotide
aattttagtattyggttgtattttyggyggtttttttagttatttgaggatagtatagggggtgagatggggtggtggttggtgaaygttggttactttattttatattattttattttgagagttgttataattatyggygttatttttygtgtattttgaggtttggttggygagtygttgttgggagttttttgtaaatattttttaaagtttgaaggygggttttaaaygtaggygtyggggattatgggagtttttaaatagttgygttggygtaatgatattttaatgatagatttttygtttttatttttagttttt

SEQ ID NO: 8237 - DNA, 355 bp, Artificial Sequence
  Description of Artificial Sequence: Synthetic polynucleotide
tcgaattggatgtcggatggaaatttttttgcgttattagattgcgtttagtatagtagatggtacgagtacgtgcggcgtttagtttaggttttcggaggtagttgagttggaaatttcgacggaaagtatttataagtttttattttgcgttggtttattcgcgtgtacgtttattttttacgcgcgtttttggtttagaagcgtatagatgtttattgtttagagtcggtatcgttggggagatcgagcgatttgcgcggcgtatagtgcggcgttggtagggttttgggttttcggtcgggggttcgagcggttaagggatgggggtgggggcggggagagtggggggagg

SEQ ID NO: 8238 - DNA, 730 bp, Artificial Sequence
  Description of Artificial Sequence: Synthetic polynucleotide
ttgtttcggagttgtaggtttttaggcgttgggagggcgaagtaggagagtcggttagtttattttcgcgtttcgtaaatttttttaatcgggtaataaagtgagtagcggtggtcgtcgcgatttttttaatttcgtatttcggaggttcgagggggttttgggatcgagcggtttcgtagcggcgatagaaatatatattttacgaaaaagaaaaaaaaaaaaacgagtcgcgcgaattcgttaagttagatgtgcgcggtttgaagcggaggaggttttgacgttagttttatttcgcgtagttcggtttggtcgtagattcgtcggttattcgtcggcggtttaggtcgggaggggttaggatagtttcggtcgcgcggtggacggaggggttattttttcgggcgttagtaaataaattttattcgagttaatatcgtttagcgaacggtgtttttttttagttattcgagaacgagaggtatttttaattagaaattaattaatgagtagttgttttttttcgttttattgtaattattcgttttaattataaatgagatttatgaaaggatacgttgaagatgtaattaatagttaaaattagttcggcgttgcgtaggcggtcggttcggtttcgcgttggcgcgttttgtttcgagtggtaggaaggggttcgtaggcgtttcgtacgcgtttcgttattattgtttaatcgagaattagt

SEQ ID NO: 8239 - DNA, 383 bp, Artificial Sequence
  Description of Artificial Sequence: Synthetic polynucleotide
agcggcggcgcgggccgcgggcggcgatgggcgaggagtagagtacggtgagcggcggcggcgggttttaggagtcgtagattttggttagtggtattgcgggttattttgagttttcgaggttttagggggatagcgcccgggcgcccccgctgcgcgccgccttcgcggagtcgagcggcggtggttgcggaagcgattggggttgcgcggatattagcgttttagagttcgcgaggagtttggggttttcgggttggagtaagagtcgagtatcggcgtagtttgcgggattggtatttatcgggttttttaatttttagattttgttattgtagttggagttggaggaggaagaggaggaagttggggatcgaaaagag

SEQ ID NO: 8240 - DNA, 349 bp, Artificial Sequence
  Description of Artificial Sequence: Synthetic polynucleotide
agatcgagcgggattatgtgggtacgttggagtttttggtgtcggtgagtgttttcggtagacgtagggggacgtccgggcggcgcggggcgcgggtttcggagtggttgcgggaaggacgcgcggtattgtttgtgcggggattcgggacgggtcggggtattataggcgcgggaatttacgtgtggattttgcgttcgcgggcgcggtgattttcgcggggatttgttggtgtttcgagatttattgagttgcgggggttttggagatttttaggtttgaaaagttagttttagagaagagagttttagtttagggaatttcggttgttttatttttttttattttt

SEQ ID NO: 8241 - DNA, 465 bp, Artificial Sequence
  Description of Artificial Sequence: Synthetic polynucleotide
tcgtacggttcgtcgggtcgcggtgagtaaggcgggtaggcgcggcgggaggcgttcgacgtttatttcgggtttggcgttttttttcggttattacgcggcgtcgtttttcgggattttttagttttcggagtttcgcgcgtttagagtcgttcggagcgcgggcggggttagtttgggtagtcgcgggtcgttgttgcgtcggaagttttcgtcgttagggagttttttgggcgttaggttttgggtttttgggcgaagtcgacgttagaatatgtttggtttcgtatttagtttatcgtatttttagcgcgcgtgggtggggggcgtcggttgaggtggggagggtatagtttagttttaggttatagtgtttcgggcggggtagcgcggtgcggggtgaacgttatcggttcggcggatagcgagtggcttcaggcgagagctcccagagcctctgtttcc

SEQ ID NO: 8242 - DNA, 424 bp, Artificial Sequence
  Description of Artificial Sequence: Synthetic polynucleotide
atatagaggtgacgtacgagtgatttatagagagggatttttgggtttttggtgggggtttgggagacggtcgaagggggttcgggtagaagttccgcggccgggccggcggagggaagggggcggccgcgcccgggattcggtttttttcggttttatttatttgtttcgaagagtggttttagttttgcgtttttttttgcgattttatatatagggatagttttaggtatagttttagtagtaggagtatggcggggcgagggcgcgggacgttcggggattcggcgggatacgttttgtagcgtttagggttttagttattgcgggacgttttcggggtcgcccaccccgcggtcccagcccggaccccgcccaccccacggacccagcccggaccccgcccaccccgcggtcccagccc

SEQ ID NO: 8243 - DNA, 540 bp, Artificial Sequence
  Description of Artificial Sequence: Synthetic polynucleotide
acgaggaggaagaggaggaggaagaagaagaagaggaagaggaggaggaggaggaggaggacgcgtttaggttgagatggttcgcgtggatattgttatttattttaagattgctgcctccgccgccgccgccgccgccgctgctgccgccgccgccgccgccaccatttgttatagttagtaacgggtagtcggcgtaggggttcgggggagtttttttcgtcgttagcgttattttaaatatttattaatagttatattgttgttattgctgccgccgccgccgccgccgcggagcgcgggaggggggcggggaggcgtttgggttcggggcgttgtgcgcgatttggcggggtgcgtcgagatatatatagcgagccgccgccgcccgcccgggggggagggggatggagtgcgcgggtagttttttttccccggcccgcgccccgctcgccccgggctgcgctggccccgagcgccgagagccagggggcgccgcgggccgcccgcgcccggggtctgcgccgcccccgggcccgc

SEQ ID NO: 8244 - DNA, 472 bp, Artificial Sequence
  Description of Artificial Sequence: Synthetic polynucleotide
tttttttaattttatgttttaaaagttaaattttagttttaaagtgtagtgtggtattagcgaatgtggtggatttcggtaggtttggggtaggggaattttcggtaatattttttagtatcgaaggtaggatttttcggttattttcgtcggttggaatttttttaagtattgttttgagtttatttttaaatgaaagggggaaaaatttaaattagattagaatttgaaatagttgaaatagttatcgatttttagtttgtttttaagtttggtagagattgtgaaagttttaattttttcgcgatgttagttacggttcgcggcggttacggagttattttagtatttcgcgatggatagtgattttcggcgtggcgcgagttttttgcggtttttacgcgggtttgggcggcgggtttttttacggtttcgtttagatattcggaggtatttgttaaagttgcggagg

SEQ ID NO: 8245 - DNA, 396 bp, Artificial Sequence
  Description of Artificial Sequence: Synthetic polynucleotide
ggggagtgggggagtgagtagacgttttttttttaggaggtcggaatttttgtttttattttttatcggggttcggttggttagaggtaagtttcgagattttttattaattattattatcgttgcgagggtcggtgaggttgtagataacgtttgtaaggacgggagtcggggagggtgtagggcgagtttaaaggacgggtagagtaagtttcgggaagaggtaggggttttttttttcgggtcgtcgtttttcgtattttcggagttagtcgtagttacgtagcgtcgtttgtcgggtatattaaggatttggcgcgtacgtggcgtttatttttattttcgggttcgtttttggttcgcgtttagtttttttagattattcgtaaattgagg

SEQ ID NO: 8246 - DNA, 507 bp, Artificial Sequence
  Description of Artificial Sequence: Synthetic polynucleotide
tgattttggggttgatatcgttaaagggtagttagtgttcgtttaggttatttcgggaggtttaggggtacggcgaggggtcggggaaaggcgatcgtttattatagttcgcgcgtttagattgagggaggagtcgggttgtagaatcggcggcggatggagacgggagggaggttgcgaggtcgttcgaggagagattaaggttttagaaacggagaagcgggcgttttgcgggaggcggcggcgttgtcgttggtcgttaagggcgggaagtgttttgggatttttattaggggtcgcgagtttcgagcgttaaattttcgcggcgttcgtttagcgcgttgttgtggcgggcgcggagggcgcgcgccggcagtgggggctgcggcggcggagggcacgggcccccgcttagcgtttttatttttttggtgtagttgtttttcgcgagtcgagatatttttgttagggaagaggagcgtttcggttgtttttttagagtttttt

SEQ ID NO: 8247 - DNA, 946 bp, Artificial Sequence
  Description of Artificial Sequence: Synthetic polynucleotide
cgttatttattcgagtcgttcgggttggtcgcgagtcgggattcgcgagggttggcgggttttggttttcgaggacgtagatatgtggtttgaattttcgtttttttagtcgttgtttttgtgtatttttttgggcgtttttagcgaatgcgagcggcgaggcgagggcgagcgcgtcgaggaagggcgggagaggcgcggagtttggccgcgccgcgctgcgccgagcgccgggctctccccgcgagctccccgggcccgcgcgcgcgccccccactgcccccgccccccgcgcggcgcgtgccccccaccccccgccgcgcgccctcgcacccgcccggctccacgcggcgcgcgcctgttttggcggcagcggcggcggcggcggcgcgttttttttcgaacgtcgtttttagggttgttggttgcgttttttattgtttcgcggttgttgttcggggtgggcggcgaggcgggggggaggtgtcggtttggtcgtcggggagggtttatcgttcgggcggatttttattgcgagagcgatgcgggtttaggcgcggcgcgcgggggttgtagggcgtttagtattgggggttgtcggcgcgcgggggtttttttttggtttttaggtattcgttgttgttgggcgtttttcgtattttcggttattatggatatttcgttttttcgtcgtttttttcgcgtatttcgggaggtcgtcggggcggtagtagcggcgcggtttcgcgggtgtttaggtgatcggttcggtagcggtagagtagtggtagtagtcgttattgtcgttgttattgcggtcgtcgtcgttggagagaggaggacgaggagggtaaggggtagaagtaggttttgttttgtttgttttagaggttatttcgggtttttttttattaattaagcgatttcgtgtttatttcgtaggaga

SEQ ID NO: 8248 - DNA, 390 bp, Artificial Sequence
  Description of Artificial Sequence: Synthetic polynucleotide
cggggtaggcgcggttcgtaaggattttcgcgatggagacgtaatattgtcgcgattgtatttggggtagtttcgtcgcgttttagtcgtttttcggtaggaagcgtaggtgtgtgagtcgattcggagcgagtcgcgttttcgggttagcgtgggtagggcgtcgtagtttgcgtagtttcgaggatttcgcgtcgttttttcgagttagggtttttaggagcgggtcgcgtaggagacgttagagggggttgttagcggttgttgggagaacgggttacggaaatagttttttttaaagtcggggttatcgtggggtgggcgagttcgtttttttaggtcgggggcgcggattagaggggacgtgtgtagacggtcgcggttagtttt

SEQ ID NO: 8249 - DNA, 440 bp, Artificial Sequence
  Description of Artificial Sequence: Synthetic polynucleotide
ttggtgagtagtggggcgggtgggcgggtgttcgcgacgggaaggggttgggcggcgttgacggatgtcggtttttagggagttttaaggcggcgggtattagcgggttgattttgaagcgttgttcggagtcggagcgttattgtttggcgcggttgatggttgacgcgttgcgcggttgcgtgtttgttttttacggcgtggtggagcgcgacggcgaaagttatttgtagttgtaggatttgttcgatggtttcgacggattttgtgtgttcgattgtaaaatgggcgttaggtatgcgtgttttgttaggtcggttggggggattaagtaggggttcggggtcgggatagttgtttgagggggattcggggcgagtgttcgaaggggttttcgtgtgcgtttttttatgttttggtcgttgtttgcgtttttatag

SEQ ID NO: 8250 - DNA, 324 bp, Artificial Sequence
  Description of Artificial Sequence: Synthetic polynucleotide
aattttagtattcggttgtattttcggcggtttttttagttatttgaggatagtatagggggtgagatggggtggtggttggtgaacgttggttactttattttatattattttattttgagagttgttataattatcggcgttatttttcgtgtattttgaggtttggttggcgagtcgttgttgggagttttttgtaaatattttttaaagtttgaaggcgggttttaaacgtaggcgtcggggattatgggagtttttaaatagttgcgttggcgtaatgatattttaatgatagatttttcgtttttatttttagttttt

SEQ ID NO: 8251 - DNA, 355 bp, Homo sapiens
cctccccccactctccccgcccccacccccatcccttggccgctcgaacccccgaccgggagcccagagccctgccagcgccgcactgtgcgccgcgcaagtcgctcgatctccccagcggtaccggctctaagcagtaaacatctgtgcgcttctgagccagggacgcgcgtggggggtgggcgtgcacgcgggtgggccagcgcagagtgggagcttgtgggtgctttccgtcgggatttccaactcagctgcctccgagagcctaagctgagcgccgcacgtgctcgtgccatctgctgtactggacgcagtctaatagcgcagagaggtttccatccggcatccagttcga

SEQ ID NO: 8252 - DNA, 730 bp, Homo sapiens
gctgattctcgattaaacaatagtgacgagacgcgtgcggggcgcctgcgagccccttcctgccactcggagcagagcgcgccagcgcgaggccgggccggccgcctgcgcagcgccgggctaattttaactgttgattacatcttcagcgtgtcctttcataggtctcatttgtaattgagacgaatgattacagtggggcgggaaggagcagctgctcattaattaatttctaattaaaagtgcctctcgttctcgggtgactaaagagaaacaccgttcgctgggcgatattgactcggatggaatttatttgctaacgcccggaggaatggcccctccgtccaccgcgcggccgggactgtcctggcccctcccggcctgagccgccggcgagtgaccggcgagtctgcggccaggccgggctgcgcgaggtggggctgacgtcagagcctcctccgcttcaagccgcgcacatctgacttgacgggttcgcgcgactcgtttttttttttttctttttcgtaaaatatgtatttctgtcgccgctgcgaggccgctcggtcccagagccccctcgagcctccggaatgcgaagttaaaggaatcgcggcggccaccgctgctcactttgttacccggttagaaaagtttgcggagcgcggggatggactaaccggctctcctgcttcgccctcccagcgcctagaagcctgcagctccggagcag

SEQ ID NO: 8253 - DNA, 383 bp, Homo sapiens
ctcttttcgatccccagcttcctcctcttcctcctccagctccaactgcagtggcaaggtctggggattgagaggcccggtgagtgccagtcccgcaggctgcgccggtgctcggctcttactccagcccgggggccccaggctcctcgcgggctctggggcgctggtgtccgcgcagccccagtcgcttccgcagccaccgccgctcggctccgcggaggcggcgcgcagcgggggcgcccgggcgctgtccccctgaggcctcgggggctcagggtggcccgcagtgccactggccagggtctgcgactcctggggcccgccgccgccgctcaccgtgctctgctcctcgcccatcgccgcccgcggcccgcgccgccgct

SEQ ID NO: 8254 - DNA, 349 bp, Homo sapiens
aaaagtgagggaagatagggcagccgggattccctggactggagctctcttctctagagctaacttttcagacctggaggtctccaaggcccccgcaactcagtgagtctcggggcaccaacaaatccccgcgggggtcaccgcgcccgcgaacgcagagtccacacgtggattcccgcgcctgtgatgccccgacccgtcccgggtccccgcacagacaatgccgcgcgtccttcccgcagccactccgggacccgcgccccgcgccgcccggacgtccccctgcgtctgccggggacactcaccgacaccaggaactccagcgtgcccacatagtcccgctcggtct

SEQ ID NO: 8255 - DNA, 465 bp, Homo sapiens
ggaaacagaggctctgggagctctcgcctgaagccactcgctgtccgccgggccggtggcgttcaccccgcaccgcgctgccccgcccggggcactatggcctggggctggactatgccctccccacctcagccggcgccccccacccacgcgcgctgagggtgcggtgagctgagtgcggggccaagcatgttctggcgtcgacttcgcccaggggcccaggacctggcgcccaaggggctccctggcgacggagacttccgacgcagcagcgacccgcggctgcccaagctgaccccgcccgcgctccgagcggctctgggcgcgcggggctccggggactggaggatcccggggggcggcgccgcgtggtggccggaaggggacgccaagcccggggtgggcgtcggacgcctcccgccgcgcctgcccgccttgctcaccgcgacccggcgggccgtgcgg

SEQ ID NO: 8256 - DNA, 424 bp, Homo sapiens
gggctgggaccgcggggtgggcggggtccgggctgggtccgtggggtgggcggggtccgggctgggaccgcggggtgggcggccccgagagcgtcccgcagtggctggagccctgggcgctgcaaagcgtgtcccgccgggtccccgagcgtcccgcgccctcgccccgccatgctcctgctgctggggctgtgcctggggctgtccctgtgtgtggggtcgcaggaagaggcgcagagctggggccactcttcggagcaggtaagtggagccgaggggagccgggtcccgggcgcggccgcccccttccctccgccggcccggccgcggagcttctgcccgggcccccttcgaccgtctcccaggcccccaccagaggcccaggggtccctctctgtgggtcactcgtgcgtcacctctgtgt

SEQ ID NO: 8257 - DNA, 540 bp, Homo sapiens
gcgggcccgggggcggcgcagaccccgggcgcgggcggcccgcggcgccccctggctctcggcgctcggggccagcgcagcccggggcgagcggggcgcgggccggggagggggagctgcccgcgcactccatccccctcccccccgggcgggcggcggcggctcgctgtatatatctcggcgcaccccgccaggtcgcgcacagcgccccgagcccaggcgcctccccgcccccctcccgcgctccgcggcggcggcggcggcggcagcagtagcagcaatatggctgttgatgggtgtttggggtggcgctggcggcgggaggagctcccccgagcccctgcgccggctgcccgttgctagctatggcaaatggtggcggcggcggcggcggcagcagcggcggcggcggcggcggcggaggcagcagtcttagaatgagtagcaatatccacgcgaaccatctcagcctagacgcgtcctcctcctcctcctcctcctcttcctcttcttcttcttcctcctcctcttcctcctcgt

SEQ ID NO: 8258 - DNA, 472 bp, Homo sapiens
cctccgcagctttggcaggtgcctccgggtgtctggacggagccgtggagggacccgccgcccaggcccgcgtggggaccgcagggaactcgcgccacgccgggggtcactgtccatcgcgaggtgctgaagtggctccgtgaccgccgcgggccgtggctgacatcgcggagaagttaggactttcacagtctctgccagacttgaaagcaagctggaaatcgatagctgtttcagctgtttcagattctaatctggtttgggtttttccccctttcatttgaaaatagactcagggcaatgcttaagagaattccaaccgacggaagtggccgggaaatcctgccttcggtactgagggatgttaccggagattcccctgccccaggcctgccggagtccaccacattcgctaatgccacactgcactttagaactagagtttggcttttaagacatgggattaaaaaga

SEQ ID NO: 8259 - DNA, 396 bp, Homo sapiens
cctcaatttgcgaatagtctggggaggctgagcgcgagccaggagcggacccgggggtgggggtaagcgccacgtgcgcgccaggtccttggtgtgcccggcaggcggcgctgcgtggctgcggctggctccgagggtgcggggggcggcgacccgggagggaaaacccctgcctcttcccggggcttgctctgcccgtcctttaaactcgccctacaccctccccgactcccgtccttgcaagcgttatctgcagcctcaccggccctcgcaacggtggtggtggttggtggggggtctcgaagcttgcctctggccagccggaccccggtgggagatggaggcagaaattccggcctcctaggagaagggcgtctgctcactcccccactcccc

SEQ ID NO: 8260 - DNA, 507 bp, Homo sapiens
aggagactctagggggacagccggggcgctcctcttccctgacaggagtgtctcggctcgcgggaggcagctgcaccaagaaggtgaggacgctgagcgggggcccgtgccctccgccgccgcagcccccactgccggcgcgcgccctccgcgcccgccacagcagcgcgctaggcggacgccgcgggaatttgacgctcgaggctcgcggcccctaatgagagtcccagaacacttcccgcccttgacggccagcggcagcgccgccgcctcccgcagagcgcccgcttctccgtttctagagccttagtctctcctcgagcgacctcgcagcctccctcccgtctccatccgccgccggttctgcagcccggctcctccctcagtctaggcgcgcgggctgtagtgggcgatcgcctttccccgacccctcgccgtgcccctgggcctcccgaagtggcctgggcgagcactgactgccctttggcggtgtcagccccaaagtca

SEQ ID NO: 8261 - DNA, 946 bp, Homo sapiens
tctcctgcgaggtaaacacgaagtcgcttggttagtgagaagaaacccgaggtggcctctggggcagacagagcaggacctgcttctgccccttgccctcctcgtcctcctctctccagcggcggcgaccgcagtaacagcggcagtggcggctgctgccactgctctgccgctgccgagccggtcacctgggcacccgcggagccgcgccgctgctaccgccccggcggcctcccggagtgcgcggagggggcggcggaggagcgagatatccatagtaaccgaggatgcgaggggcgcccagcagcagcgagtgcctgggagccaggaggaggcccccgcgcgccggcaacccccagtgctaggcgccctgcagcccccgcgcgccgcgcctgggcccgcatcgctctcgcagtgagggtccgcccgagcggtaagccctccccggcggccaagccgacacctcccccccgcctcgccgcccaccccgggcagcagccgcggaacaatggagagcgcagccagcagccctggagacggcgttcgggggaggacgcgccgccgccgccgccgctgccgccagggcaggcgcgcgccgcgtggagccgggcgggtgcgagggcgcgcggcggggggtggggggcacgcgccgcgcggggggcgggggcagtggggggcgcgcgcgcgggcccggggagctcgcggggagagcccggcgctcggcgcagcgcggcgcggccaagctccgcgcctctcccgcccttcctcggcgcgctcgccctcgcctcgccgctcgcattcgctgggggcgcccagaaagatgcacagaggcaacggctaggggagcggaggttcaagccacatgtctgcgtcctcgggggccagagcccgccagccctcgcggatcccggctcgcggccagcccgagcggctcgggtgagtagcg

SEQ ID NO: 8262 - DNA, 390 bp, Homo sapiens
ggggctgaccgcggccgtctgcacacgtcccctctggtccgcgcccccggcctgggagggcggactcgcccaccccacgatggccccggctttggaagggactgtttccgtgacccgttctcccaacagccgctaacaaccccctctaacgtctcctgcgcggcccgctcctgagaaccctggctcgggagagcgacgcggggtcctcggggctgcgcaggctgcggcgccctgcccacgctggcccgagggcgcggctcgctccgggtcggctcacacacctacgcttcctgccgggaggcggctgggacgcggcggggctgccccaagtgcagtcgcggcagtgttgcgtctccatcgcgggggtccttgcgggccgcgcctgccccg

SEQ ID NO: 8263 - DNA, 440 bp, Homo sapiens
ctgtgggggcgcaggcagcggccagggcatgagggggcgcacacggagaccccttcgagcactcgccccgggtccccctcaagcagctgtcccggccccggacccctacttgatccccccaaccgacctggcagggcacgcatacctgacgcccattttgcagtcgagcacacaaggtccgtcgaagccatcgagcaggtcctgcagctgcaggtagctttcgccgtcgcgctccaccacgccgtggaaggcaggcacgcagccgcgcagcgcgtcagccatcagccgcgccaggcagtagcgctccggctccgagcagcgcttcaggatcagcccgctggtgcccgccgccttaaaactccctgaggaccggcatccgtcagcgccgcccagccccttcccgtcgcgggcacccgcccacccgccccactgctcaccag

SEQ ID NO: 8264 - DNA, 324 bp, Homo sapiens
gagagctaaaaataagaacggaaaatctatcattaaggtatcattgcgccagcgcagctatttgaaggctcccatggtccccggcgcctgcgtttgaagcccgccttcaggctttggggggtatttgcagaaaactcccagcagcggctcgccaaccagacctcagggtgcacggggggtggcgccggtaattatggcaactctcaaaataaaataatataaaataaagtaaccaacgttcaccaaccaccaccccatctcaccccctgtactgtcctcaggtagctggggaagccgccgggagtgcagccggatgctggaatt

SEQ ID NO: 8265 - DNA, 355 bp, Artificial Sequence
  Description of Artificial Sequence: Synthetic polynucleotide
tttttttttatttttttygtttttatttttattttttggtygttygaattttygatygggagtttagagttttgttagygtygtattgtgygtygygtaagtygttygatttttttagyggtatyggttttaagtagtaaatatttgtgygtttttgagttagggaygygygtggggggtgggygtgtaygygggtgggttagygtagagtgggagtttgtgggtgtttttygtygggatttttaatttagttgttttygagagtttaagttgagygtygtaygtgttygtgttatttgttgtattggaygtagtttaatagygtagagaggtttttattyggtatttagttyga

SEQ ID NO: 8266 - DNA, 730 bp, Artificial Sequence
  Description of Artificial Sequence: Synthetic polynucleotide
gttgattttygattaaataatagtgaygagaygygtgyggggygtttgygagtttttttttgttattyggagtagagygygttagygygaggtygggtyggtygtttgygtagygtygggttaattttaattgttgattatatttttagygtgtttttttataggttttatttgtaattgagaygaatgattatagtggggygggaaggagtagttgtttattaattaatttttaattaaaagtgtttttygttttygggtgattaaagagaaatatygttygttgggygatattgattyggatggaatttatttgttaaygttyggaggaatggttttttygtttatygygyggtygggattgttttggtttttttyggtttgagtygtyggygagtgatyggygagtttgyggttaggtygggttgygygaggtggggttgaygttagagtttttttygttttaagtygygtatatttgatttgaygggttygygygattygtttttttttttttttttttygtaaaatatgtatttttgtygtygttgygaggtygttyggttttagagttttttygagttttyggaatgygaagttaaaggaatygyggyggttatygttgtttattttgttattyggttagaaaagtttgyggagygyggggatggattaatyggtttttttgtttygtttttttagygtttagaagtttgtagtttyggagtag

SEQ ID NO: 8267 - DNA, 383 bp, Artificial Sequence
  Description of Artificial Sequence: Synthetic polynucleotide
tttttttygatttttagttttttttttttttttttttagttttaattgtagtggtaaggtttggggattgagaggttyggtgagtgttagtttygtaggttgygtyggtgttyggtttttattttagttygggggttttaggtttttygygggttttggggygttggtgttygygtagttttagtygttttygtagttatygtygttyggtttygyggaggyggygygtagygggggygttygggygttgtttttttgaggtttygggggtttagggtggttygtagtgttattggttagggtttgygatttttggggttygtygtygtygtttatygtgttttgtttttygtttatygtygttygyggttygygtygtygtt

SEQ ID NO: 8268 - DNA, 349 bp, Artificial Sequence
  Description of Artificial Sequence: Synthetic polynucleotide
aaaagtgagggaagatagggtagtygggattttttggattggagtttttttttttagagttaattttttagatttggaggtttttaaggttttygtaatttagtgagtttyggggtattaataaattttygygggggttatygygttygygaaygtagagtttataygtggattttygygtttgtgatgtttygattygtttygggttttygtatagataatgtygygygtttttttygtagttatttygggattygygtttygygtygttyggaygtttttttgygtttgtyggggatatttatygatattaggaattttagygtgtttatatagtttygttyggttt

SEQ ID NO: 8269 - DNA, 465 bp, Artificial Sequence
  Description of Artificial Sequence: Synthetic polynucleotide
ggaaatagaggttttgggagttttygtttgaagttattygttgttygtygggtyggtggygtttatttygtatygygttgtttygttyggggtattatggtttggggttggattatgttttttttattttagtyggygttttttatttaygygygttgagggtgyggtgagttgagtgyggggttaagtatgttttggygtygatttygtttaggggtttaggatttggygtttaaggggttttttggygayggagattttygaygtagtagygattygyggttgtttaagttgatttygttygygtttygagyggttttgggygygyggggtttyggggattggaggatttyggggggyggygtygygtggtggtyggaaggggaygttaagttyggggtgggygtyggaygtttttygtygygtttgttygttttgtttatygygattyggygggtygtgygg

SEQ ID NO: 8270 - DNA, 424 bp, Artificial Sequence
  Description of Artificial Sequence: Synthetic polynucleotide
gggttgggatygyggggtgggyggggttygggttgggttygtggggtgggyggggttygggttgggatygyggggtgggyggtttygagagygtttygtagtggttggagttttgggygttgtaaagygtgtttygtygggttttygagygtttygygttttygtttygttatgtttttgttgttggggttgtgtttggggttgtttttgtgtgtggggtygtaggaagaggygtagagttggggttatttttyggagtaggtaagtggagtygaggggagtygggtttygggygyggtygttttttttttttygtyggttyggtygyggagtttttgttygggtttttttygatygttttttaggtttttattagaggtttaggggtttttttttgtgggttattygtgygttatttttgtgt

SEQ ID NO: 8271 - DNA, 540 bp, Artificial Sequence
  Description of Artificial Sequence: Synthetic polynucleotide
gygggttygggggyggygtagatttygggygygggyggttygyggygttttttggttttyggygttyggggttagygtagttyggggygagyggggygygggtyggggagggggagttgttygygtattttatttttttttttttygggygggyggyggyggttygttgtatatatttyggygtatttygttaggtygygtatagygtttygagtttaggygttttttygtttttttttygygtttygyggyggyggyggyggyggtagtagtagtagtaatatggttgttgatgggtgtttggggtggygttggyggygggaggagttttttygagtttttgygtyggttgttygttgttagttatggtaaatggtggyggyggyggyggyggtagtagyggyggyggyggyggyggyggaggtagtagttttagaatgagtagtaatatttaygygaattattttagtttagaygygttttttttttttttttttttttttttttttttttttttttttttttttttttttttttygt

SEQ ID NO: 8272 - DNA, 472 bp, Artificial Sequence
  Description of Artificial Sequence: Synthetic polynucleotide
ttttygtagttttggtaggtgttttygggtgtttggayggagtygtggagggattygtygtttaggttygygtggggatygtagggaattygygttaygtygggggttattgtttatygygaggtgttgaagtggtttygtgatygtygygggtygtggttgatatygyggagaagttaggatttttatagtttttgttagatttgaaagtaagttggaaatygatagttgttttagttgttttagattttaatttggtttgggttttttttttttttatttgaaaatagatttagggtaatgtttaagagaattttaatygayggaagtggtygggaaattttgttttyggtattgagggatgttatyggagatttttttgttttaggtttgtyggagtttattatattygttaatgttatattgtattttagaattagagtttggtttttaagatatgggattaaaaaga

SEQ ID NO: 8273 - DNA, 396 bp, Artificial Sequence
  Description of Artificial Sequence: Synthetic polynucleotide
ttttaatttgygaatagtttggggaggttgagygygagttaggagyggattygggggtgggggtaagygttaygtgygygttaggtttttggtgtgttyggtaggyggygttgygtggttgyggttggtttygagggtgyggggggyggygattygggagggaaaatttttgttttttttyggggtttgttttgttygttttttaaattygttttatatttttttygattttygtttttgtaagygttatttgtagttttatyggttttygtaayggtggtggtggttggtggggggtttygaagtttgtttttggttagtyggatttyggtgggagatggaggtagaaatttyggttttttaggagaagggygtttgtttatttttttatttttt

SEQ ID NO: 8274 - DNA, 507 bp, Artificial Sequence
  Description of Artificial Sequence: Synthetic polynucleotide
aggagattttagggggatagtyggggygttttttttttttgataggagtgtttyggttygygggaggtagttgtattaagaaggtgaggaygttgagygggggttygtgtttttygtygtygtagtttttattgtyggygygygtttttygygttygttatagtagygygttaggyggaygtygygggaatttgaygttygaggttygyggtttttaatgagagttttagaatatttttygtttttgayggttagyggtagygtygtygtttttygtagagygttygttttttygtttttagagttttagttttttttygagygatttygtagtttttttttygtttttattygtygtyggttttgtagttyggttttttttttagtttaggygygygggttgtagtgggygatygttttttttygatttttygtygtgtttttgggtttttygaagtggtttgggygagtattgattgttttttggyggtgttagttttaaagtta

SEQ ID NO: 8275 - DNA, 946 bp, Artificial Sequence
  Description of Artificial Sequence: Synthetic polynucleotide
ttttttgygaggtaaataygaagtygtttggttagtgagaagaaattygaggtggtttttggggtagatagagtaggatttgtttttgttttttgtttttttygtttttttttttttagyggyggygatygtagtaatagyggtagtggyggttgttgttattgttttgtygttgtygagtyggttatttgggtattygyggagtygygtygttgttatygtttyggyggtttttyggagtgygyggagggggyggyggaggagygagatatttatagtaatygaggatgygaggggygtttagtagtagygagtgtttgggagttaggaggaggttttygygygtyggtaatttttagtgttaggygttttgtagttttygygygtygygtttgggttygtatygttttygtagtgagggttygttygagyggtaagtttttttyggyggttaagtygatatttttttttygtttygtygtttatttygggtagtagtygyggaataatggagagygtagttagtagttttggagayggygttygggggaggaygygtygtygtygtygtygttgtygttagggtaggygygygtygygtggagtygggygggtgygagggygygyggyggggggtggggggtaygygtygygyggggggygggggtagtggggggygygygygygggttyggggagttygyggggagagttyggygttyggygtagygyggygyggttaagtttygygtttttttygttttttttyggygygttygttttygtttygtygttygtattygttgggggygtttagaaagatgtatagaggtaayggttaggggagyggaggtttaagttatatgtttgygttttygggggttagagttygttagttttygyggatttyggttygyggttagttygagyggttygggtgagtagyg

SEQ ID NO: 8276 - DNA, 390 bp, Artificial Sequence
  Description of Artificial Sequence: Synthetic polynucleotide
ggggttgatygyggtygtttgtataygttttttttggttygygttttyggtttgggagggyggattygtttattttaygatggtttyggttttggaagggattgttttygtgattygtttttttaatagtygttaataattttttttaaygttttttgygyggttygtttttgagaattttggttygggagagygaygyggggttttyggggttgygtaggttgyggygttttgtttaygttggttygagggygyggttygtttygggtyggtttatatatttaygttttttgtygggaggyggttgggaygyggyggggttgttttaagtgtagtygyggtagtgttgygtttttatygygggggtttttgygggtygygtttgtttyg

SEQ ID NO: 8277 - DNA, 440 bp, Artificial Sequence
  Description of Artificial Sequence: Synthetic polynucleotide
ttgtgggggygtaggtagyggttagggtatgagggggygtatayggagattttttygagtattygtttygggttttttttaagtagttgtttyggtttyggatttttatttgatttttttaatygatttggtagggtaygtatatttgaygtttattttgtagtygagtatataaggttygtygaagttatygagtaggttttgtagttgtaggtagttttygtygtygygttttattaygtygtggaaggtaggtaygtagtygygtagygygttagttattagtygygttaggtagtagygtttyggtttygagtagygttttaggattagttygttggtgttygtygttttaaaattttttgaggatyggtattygttagygtygtttagttttttttygtygygggtattygtttattygttttattgtttattag

SEQ ID NO: 8278 - DNA, 324 bp, Artificial Sequence
  Description of Artificial Sequence: Synthetic polynucleotide
gagagttaaaaataagaayggaaaatttattattaaggtattattgygttagygtagttatttgaaggtttttatggttttyggygtttgygtttgaagttygtttttaggttttggggggtatttgtagaaaatttttagtagyggttygttaattagattttagggtgtayggggggtggygtyggtaattatggtaatttttaaaataaaataatataaaataaagtaattaaygtttattaattattattttattttattttttgtattgtttttaggtagttggggaagtygtygggagtgtagtyggatgttggaatt

SEQ ID NO: 8279 - DNA, 355 bp, Artificial Sequence
  Description of Artificial Sequence: Synthetic polynucleotide
tttttttttatttttttcgtttttatttttattttttggtcgttcgaattttcgatcgggagtttagagttttgttagcgtcgtattgtgcgtcgcgtaagtcgttcgatttttttagcggtatcggttttaagtagtaaatatttgtgcgtttttgagttagggacgcgcgtggggggtgggcgtgtacgcgggtgggttagcgtagagtgggagtttgtgggtgtttttcgtcgggatttttaatttagttgttttcgagagtttaagttgagcgtcgtacgtgttcgtgttatttgttgtattggacgtagtttaatagcgtagagaggtttttattcggtatttagttcga

SEQ ID NO: 8280 - DNA, 730 bp, Artificial Sequence
  Description of Artificial Sequence: Synthetic polynucleotide
gttgattttcgattaaataatagtgacgagacgcgtgcggggcgtttgcgagtttttttttgttattcggagtagagcgcgttagcgcgaggtcgggtcggtcgtttgcgtagcgtcgggttaattttaattgttgattatatttttagcgtgtttttttataggttttatttgtaattgagacgaatgattatagtggggcgggaaggagtagttgtttattaattaatttttaattaaaagtgtttttcgttttcgggtgattaaagagaaatatcgttcgttgggcgatattgattcggatggaatttatttgttaacgttcggaggaatggttttttcgtttatcgcgcggtcgggattgttttggtttttttcggtttgagtcgtcggcgagtgatcggcgagtttgcggttaggtcgggttgcgcgaggtggggttgacgttagagtttttttcgttttaagtcgcgtatatttgatttgacgggttcgcgcgattcgtttttttttttttttttttcgtaaaatatgtatttttgtcgtcgttgcgaggtcgttcggttttagagttttttcgagttttcggaatgcgaagttaaaggaatcgcggcggttatcgttgtttattttgttattcggttagaaaagtttgcggagcgcggggatggattaatcggtttttttgtttcgtttttttagcgtttagaagtttgtagtttcggagtag

SEQ ID NO: 8281 - DNA, 383 bp, Artificial Sequence
  Description of Artificial Sequence: Synthetic polynucleotide
tttttttcgatttttagttttttttttttttttttttagttttaattgtagtggtaaggtttggggattgagaggttcggtgagtgttagtttcgtaggttgcgtcggtgttcggtttttattttagttcgggggttttaggtttttcgcgggttttggggcgttggtgttcgcgtagttttagtcgttttcgtagttatcgtcgttcggtttcgcggaggcggcgcgtagcgggggcgttcgggcgttgtttttttgaggtttcgggggtttagggtggttcgtagtgttattggttagggtttgcgatttttggggttcgtcgtcgtcgtttatcgtgttttgtttttcgtttatcgtcgttcgcggttcgcgtcgtcgtt

SEQ ID NO: 8282 - DNA, 349 bp, Artificial Sequence
  Description of Artificial Sequence: Synthetic polynucleotide
aaaagtgagggaagatagggtagtcgggattttttggattggagtttttttttttagagttaattttttagatttggaggtttttaaggttttcgtaatttagtgagtttcggggtattaataaattttcgcgggggttatcgcgttcgcgaacgtagagtttatacgtggattttcgcgtttgtgatgtttcgattcgtttcgggttttcgtatagataatgtcgcgcgtttttttcgtagttatttcgggattcgcgtttcgcgtcgttcggacgtttttttgcgtttgtcggggatatttatcgatattaggaattttagcgtgtttatatagtttcgttcggttt

SEQ ID NO: 8283 - DNA, 465 bp, Artificial Sequence
  Description of Artificial Sequence: Synthetic polynucleotide
ggaaatagaggttttgggagttttcgtttgaagttattcgttgttcgtcgggtcggtggcgtttatttcgtatcgcgttgtttcgttcggggtattatggtttggggttggattatgttttttttattttagtcggcgttttttatttacgcgcgttgagggtgcggtgagttgagtgcggggttaagtatgttttggcgtcgatttcgtttaggggtttaggatttggcgtttaaggggttttttggcgacggagattttcgacgtagtagcgattcgcggttgtttaagttgatttcgttcgcgtttcgagcggttttgggcgcgcggggtttcggggattggaggatttcggggggcggcgtcgcgtggtggtcggaaggggacgttaagttcggggtgggcgtcggacgtttttcgtcgcgtttgttcgttttgtttatcgcgattcggcgggtcgtgcgg

SEQ ID NO: 8284 - DNA, 424 bp, Artificial Sequence
  Description of Artificial Sequence: Synthetic polynucleotide
gggttgggatcgcggggtgggcggggttcgggttgggttcgtggggtgggcggggttcgggttgggatcgcggggtgggcggtttcgagagcgtttcgtagtggttggagttttgggcgttgtaaagcgtgtttcgtcgggttttcgagcgtttcgcgttttcgtttcgttatgtttttgttgttggggttgtgtttggggttgtttttgtgtgtggggtcgtaggaagaggcgtagagttggggttatttttcggagtaggtaagtggagtcgaggggagtcgggtttcgggcgcggtcgttttttttttttcgtcggttcggtcgcggagtttttgttcgggtttttttcgatcgttttttaggtttttattagaggtttaggggtttttttttgtgggttattcgtgcgttatttttgtgt

SEQ ID NO: 8285 - DNA, 540 bp, Artificial Sequence
  Description of Artificial Sequence: Synthetic polynucleotide
gcgggttcgggggcggcgtagatttcgggcgcgggcggttcgcggcgttttttggttttcggcgttcggggttagcgtagttcggggcgagcggggcgcgggtcggggagggggagttgttcgcgtattttatttttttttttttcgggcgggcggcggcggttcgttgtatatatttcggcgtatttcgttaggtcgcgtatagcgtttcgagtttaggcgttttttcgtttttttttcgcgtttcgcggcggcggcggcggcggtagtagtagtagtaatatggttgttgatgggtgtttggggtggcgttggcggcgggaggagttttttcgagtttttgcgtcggttgttcgttgttagttatggtaaatggtggcggcggcggcggcggtagtagcggcggcggcggcggcggcggaggtagtagttttagaatgagtagtaatatttacgcgaattattttagtttagacgcgttttttttttttttttttttttttttttttttttttttttttttttttttttttttttcgt

SEQ ID NO: 8286 - DNA, 472 bp, Artificial Sequence
  Description of Artificial Sequence: Synthetic polynucleotide
ttttcgtagttttggtaggtgttttcgggtgtttggacggagtcgtggagggattcgtcgtttaggttcgcgtggggatcgtagggaattcgcgttacgtcgggggttattgtttatcgcgaggtgttgaagtggtttcgtgatcgtcgcgggtcgtggttgatatcgcggagaagttaggatttttatagtttttgttagatttgaaagtaagttggaaatcgatagttgttttagttgttttagattttaatttggtttgggttttttttttttttatttgaaaatagatttagggtaatgtttaagagaattttaatcgacggaagtggtcgggaaattttgttttcggtattgagggatgttatcggagatttttttgttttaggtttgtcggagtttattatattcgttaatgttatattgtattttagaattagagtttggtttttaagatatgggattaaaaaga

SEQ ID NO: 8287 - DNA, 396 bp, Artificial Sequence
  Description of Artificial Sequence: Synthetic polynucleotide
ttttaatttgcgaatagtttggggaggttgagcgcgagttaggagcggattcgggggtgggggtaagcgttacgtgcgcgttaggtttttggtgtgttcggtaggcggcgttgcgtggttgcggttggtttcgagggtgcggggggcggcgattcgggagggaaaatttttgttttttttcggggtttgttttgttcgttttttaaattcgttttatatttttttcgattttcgtttttgtaagcgttatttgtagttttatcggttttcgtaacggtggtggtggttggtggggggtttcgaagtttgtttttggttagtcggatttcggtgggagatggaggtagaaatttcggttttttaggagaagggcgtttgtttatttttttatttttt

SEQ ID NO: 8288 - DNA, 507 bp, Artificial Sequence
  Description of Artificial Sequence: Synthetic polynucleotide
aggagattttagggggatagtcggggcgttttttttttttgataggagtgtttcggttcgcgggaggtagttgtattaagaaggtgaggacgttgagcgggggttcgtgtttttcgtcgtcgtagtttttattgtcggcgcgcgtttttcgcgttcgttatagtagcgcgttaggcggacgtcgcgggaatttgacgttcgaggttcgcggtttttaatgagagttttagaatatttttcgtttttgacggttagcggtagcgtcgtcgtttttcgtagagcgttcgttttttcgtttttagagttttagttttttttcgagcgatttcgtagtttttttttcgtttttattcgtcgtcggttttgtagttcggttttttttttagtttaggcgcgcgggttgtagtgggcgatcgttttttttcgatttttcgtcgtgtttttgggtttttcgaagtggtttgggcgagtattgattgttttttggcggtgttagttttaaagtta

SEQ ID NO: 8289 - DNA, 946 bp, Artificial Sequence
  Description of Artificial Sequence: Synthetic polynucleotide
ttttttgcgaggtaaatacgaagtcgtttggttagtgagaagaaattcgaggtggtttttggggtagatagagtaggatttgtttttgttttttgtttttttcgtttttttttttttagcggcggcgatcgtagtaatagcggtagtggcggttgttgttattgttttgtcgttgtcgagtcggttatttgggtattcgcggagtcgcgtcgttgttatcgtttcggcggtttttcggagtgcgcggagggggcggcggaggagcgagatatttatagtaatcgaggatgcgaggggcgtttagtagtagcgagtgtttgggagttaggaggaggttttcgcgcgtcggtaatttttagtgttaggcgttttgtagttttcgcgcgtcgcgtttgggttcgtatcgttttcgtagtgagggttcgttcgagcggtaagtttttttcggcggttaagtcgatatttttttttcgtttcgtcgtttatttcgggtagtagtcgcggaataatggagagcgtagttagtagttttggagacggcgttcgggggaggacgcgtcgtcgtcgtcgtcgttgtcgttagggtaggcgcgcgtcgcgtggagtcgggcgggtgcgagggcgcgcggcggggggtggggggtacgcgtcgcgcggggggcgggggtagtggggggcgcgcgcgcgggttcggggagttcgcggggagagttcggcgttcggcgtagcgcggcgcggttaagtttcgcgtttttttcgttttttttcggcgcgttcgttttcgtttcgtcgttcgtattcgttgggggcgtttagaaagatgtatagaggtaacggttaggggagcggaggtttaagttatatgtttgcgttttcgggggttagagttcgttagttttcgcggatttcggttcgcggttagttcgagcggttcgggtgagtagcg

SEQ ID NO: 8290 - DNA, 390 bp, Artificial Sequence
  Description of Artificial Sequence: Synthetic polynucleotide
ggggttgatcgcggtcgtttgtatacgttttttttggttcgcgttttcggtttgggagggcggattcgtttattttacgatggtttcggttttggaagggattgttttcgtgattcgtttttttaatagtcgttaataattttttttaacgttttttgcgcggttcgtttttgagaattttggttcgggagagcgacgcggggttttcggggttgcgtaggttgcggcgttttgtttacgttggttcgagggcgcggttcgtttcgggtcggtttatatatttacgttttttgtcgggaggcggttgggacgcggcggggttgttttaagtgtagtcgcggtagtgttgcgtttttatcgcgggggtttttgcgggtcgcgtttgtttcg

SEQ ID NO: 8291 - DNA, 440 bp, Artificial Sequence
  Description of Artificial Sequence: Synthetic polynucleotide
ttgtgggggcgtaggtagcggttagggtatgagggggcgtatacggagattttttcgagtattcgtttcgggttttttttaagtagttgtttcggtttcggatttttatttgatttttttaatcgatttggtagggtacgtatatttgacgtttattttgtagtcgagtatataaggttcgtcgaagttatcgagtaggttttgtagttgtaggtagttttcgtcgtcgcgttttattacgtcgtggaaggtaggtacgtagtcgcgtagcgcgttagttattagtcgcgttaggtagtagcgtttcggtttcgagtagcgttttaggattagttcgttggtgttcgtcgttttaaaattttttgaggatcggtattcgttagcgtcgtttagttttttttcgtcgcgggtattcgtttattcgttttattgtttattag

SEQ ID NO: 8292 - DNA, 324 bp, Artificial Sequence
  Description of Artificial Sequence: Synthetic polynucleotide
gagagttaaaaataagaacggaaaatttattattaaggtattattgcgttagcgtagttatttgaaggtttttatggttttcggcgtttgcgtttgaagttcgtttttaggttttggggggtatttgtagaaaatttttagtagcggttcgttaattagattttagggtgtacggggggtggcgtcggtaattatggtaatttttaaaataaaataatataaaataaagtaattaacgtttattaattattattttattttattttttgtattgtttttaggtagttggggaagtcgtcgggagtgtagtcggatgttggaatt

SEQ ID NO: 8293 - DNA, 265 bp, Homo sapiens
ttagactgcgtccagtacagcagatggcacgagcacgtgcggcgctcagcttaggctctcggaggcagctgagttggaaatcccgacggaaagcacccacaagctcccactctgcgctggcccacccgcgtgcacgcccaccccccacgcgcgtccctggctcagaagcgcacagatgtttactgcttagagccggtaccgctggggagatcgagcgacttgcgcggcgcacagtgcggcgctggcagggctctgggctcccggt

SEQ ID NO: 8294 - DNA, 235 bp, Homo sapiens
tcaggccgggaggggccaggacagtcccggccgcgcggtggacggaggggccattcctccgggcgttagcaaataaattccatccgagtcaatatcgcccagcgaacggtgtttctctttagtcacccgagaacgagaggcacttttaattagaaattaattaatgagcagctgctccttcccgccccactgtaatcattcgtctcaattacaaatgagacctatgaaaggacac

SEQ ID NO: 8295 - DNA, 270 bp, Homo sapiens
gtcgcagaccctggccagtggcactgcgggccaccctgagcccccgaggcctcagggggacagcgcccgggcgcccccgctgcgcgccgcctccgcggagccgagcggcggtggctgcggaagcgactggggctgcgcggacaccagcgccccagagcccgcgaggagcctggggcccccgggctggagtaagagccgagcaccggcgcagcctgcgggactggcactcaccgggcctctcaatccccagaccttgccactgcagttgga

SEQ ID NO: 8296 - DNA, 270 bp, Homo sapiens
tgggcacgctggagttcctggtgtcggtgagtgtccccggcagacgcagggggacgtccgggcggcgcggggcgcgggtcccggagtggctgcgggaaggacgcgcggcattgtctgtgcggggacccgggacgggtcggggcatcacaggcgcgggaatccacgtgtggactctgcgttcgcgggcgcggtgacccccgcggggatttgttggtgccccgagactcactgagttgcgggggccttggagacctccaggtctgaaaagtt

SEQ ID NO: 8297 - DNA, 149 bp, Homo sapiens
gggcgccaggtcctgggcccctgggcgaagtcgacgccagaacatgcttggccccgcactcagctcaccgcaccctcagcgcgcgtgggtggggggcgccggctgaggtggggagggcatagtccagccccaggccatagtgccccggg

SEQ ID NO: 8298 - DNA, 232 bp, Homo sapiens
cccacagagagggacccctgggcctctggtgggggcctgggagacggtcgaagggggcccgggcagaagctccgcggccgggccggcggagggaagggggcggccgcgcccgggacccggctcccctcggctccacttacctgctccgaagagtggccccagctctgcgcctcttcctgcgaccccacacacagggacagccccaggcacagccccagcagcaggagcatgg

SEQ ID NO: 8299 - DNA, 189 bp, Homo sapiens
tggatattgctactcattctaagactgctgcctccgccgccgccgccgccgccgctgctgccgccgccgccgccgccaccatttgccatagctagcaacgggcagccggcgcaggggctcgggggagctcctcccgccgccagcgccaccccaaacacccatcaacagccatattgctgctactgctgc

SEQ ID NO: 8300 - DNA, 260 bp, Homo sapiens
gccaaactctagttctaaagtgcagtgtggcattagcgaatgtggtggactccggcaggcctggggcaggggaatctccggtaacatccctcagtaccgaaggcaggatttcccggccacttccgtcggttggaattctcttaagcattgccctgagtctattttcaaatgaaagggggaaaaacccaaaccagattagaatctgaaacagctgaaacagctatcgatttccagcttgctttcaagtctggcagagactg

SEQ ID NO: 8301 - DNA, 187 bp, Homo sapiens
aggaggccggaatttctgcctccatctcccaccggggtccggctggccagaggcaagcttcgagaccccccaccaaccaccaccaccgttgcgagggccggtgaggctgcagataacgcttgcaaggacgggagtcggggagggtgtagggcgagtttaaaggacgggcagagcaagccccgggaag

SEQ ID NO: 8302 - DNA, 249 bp, Homo sapiens
cacttcgggaggcccaggggcacggcgaggggtcggggaaaggcgatcgcccactacagcccgcgcgcctagactgagggaggagccgggctgcagaaccggcggcggatggagacgggagggaggctgcgaggtcgctcgaggagagactaaggctctagaaacggagaagcgggcgctctgcgggaggcggcggcgctgccgctggccgtcaagggcgggaagtgttctgggactctcattaggggc

SEQ ID NO: 8303 - DNA, 196 bp, Homo sapiens
gccgtctccagggctgctggctgcgctctccattgttccgcggctgctgcccggggtgggcggcgaggcgggggggaggtgtcggcttggccgccggggagggcttaccgctcgggcggaccctcactgcgagagcgatgcgggcccaggcgcggcgcgcgggggctgcagggcgcctagcactgggggttgccgg

SEQ ID NO: 8304 - DNA, 176 bp, Homo sapiens
gcgactgcacttggggcagccccgccgcgtcccagccgcctcccggcaggaagcgtaggtgtgtgagccgacccggagcgagccgcgccctcgggccagcgtgggcagggcgccgcagcctgcgcagccccgaggaccccgcgtcgctctcccgagccagggttctcaggagcggg

SEQ ID NO: 8305 - DNA, 152 bp, Homo sapiens
aaagctacctgcagctgcaggacctgctcgatggcttcgacggaccttgtgtgctcgactgcaaaatgggcgtcaggtatgcgtgccctgccaggtcggttggggggatcaagtaggggtccggggccgggacagctgcttgagggggaccc

SEQ ID NO: 8306 - DNA, 232 bp, Homo sapiens
ctacctgaggacagtacagggggtgagatggggtggtggttggtgaacgttggttactttattttatattattttattttgagagttgccataattaccggcgccaccccccgtgcaccctgaggtctggttggcgagccgctgctgggagttttctgcaaataccccccaaagcctgaaggcgggcttcaaacgcaggcgccggggaccatgggagccttcaaatagctgc

SEQ ID NO: 8307 - DNA, 265 bp, Artificial Sequence
  Description of Artificial Sequence: Synthetic polynucleotide
ttagattgygtttagtatagtagatggtaygagtaygtgyggygtttagtttaggttttyggaggtagttgagttggaaatttygayggaaagtatttataagtttttattttgygttggtttattygygtgtaygtttattttttaygygygtttttggtttagaagygtatagatgtttattgtttagagtyggtatygttggggagatygagygatttgygyggygtatagtgyggygttggtagggttttgggttttyggt

SEQ ID NO: 8308 - DNA, 235 bp, Artificial Sequence
  Description of Artificial Sequence: Synthetic polynucleotide
ttaggtygggaggggttaggatagtttyggtygygyggtggayggaggggttattttttygggygttagtaaataaattttattygagttaatatygtttagygaayggtgtttttttttagttattygagaaygagaggtatttttaattagaaattaattaatgagtagttgttttttttygttttattgtaattattygttttaattataaatgagatttatgaaaggatat

SEQ ID NO: 8309 - DNA, 270 bp, Artificial Sequence
  Description of Artificial Sequence: Synthetic polynucleotide
gtygtagattttggttagtggtattgygggttattttgagttttygaggttttagggggatagygttygggygttttygttgygygtygttttygyggagtygagyggyggtggttgyggaagygattggggttgygyggatattagygttttagagttygygaggagtttggggttttygggttggagtaagagtygagtatyggygtagtttgygggattggtatttatygggttttttaatttttagattttgttattgtagttgga

SEQ ID NO: 8310 - DNA, 270 bp, Artificial Sequence
  Description of Artificial Sequence: Synthetic polynucleotide
tgggtaygttggagtttttggtgtyggtgagtgttttyggtagaygtagggggaygttygggyggygyggggygygggtttyggagtggttgygggaaggaygygyggtattgtttgtgyggggattygggaygggtyggggtattataggygygggaatttaygtgtggattttgygttygygggygyggtgattttygyggggatttgttggtgtttygagatttattgagttgygggggttttggagatttttaggtttgaaaagtt

SEQ ID NO: 8311 - DNA, 149 bp, Artificial Sequence
  Description of Artificial Sequence: Synthetic polynucleotide
gggygttaggttttgggtttttgggygaagtygaygttagaatatgtttggtttygtatttagtttatygtatttttagygygygtgggtggggggygtyggttgaggtggggagggtatagtttagttttaggttatagtgtttyggg

SEQ ID NO: 8312 - DNA, 232 bp, Artificial Sequence
  Description of Artificial Sequence: Synthetic polynucleotide
tttatagagagggatttttgggtttttggtgggggtttgggagayggtygaagggggttygggtagaagtttygyggtygggtyggyggagggaagggggyggtygygttygggattyggtttttttyggttttatttatttgtttygaagagtggttttagttttgygtttttttttgygattttatatatagggatagttttaggtatagttttagtagtaggagtatgg

SEQ ID NO: 8313 - DNA, 189 bp, Artificial Sequence
  Description of Artificial Sequence: Synthetic polynucleotide
tggatattgttatttattttaagattgttgttttygtygtygtygtygtygtygttgttgtygtygtygtygtygttattatttgttatagttagtaaygggtagtyggygtaggggttygggggagtttttttygtygttagygttattttaaatatttattaatagttatattgttgttattgttgt

SEQ ID NO: 8314 - DNA, 260 bp, Artificial Sequence
  Description of Artificial Sequence: Synthetic polynucleotide
gttaaattttagttttaaagtgtagtgtggtattagygaatgtggtggatttyggtaggtttggggtaggggaattttyggtaatattttttagtatygaaggtaggatttttyggttattttygtyggttggaatttttttaagtattgttttgagtttatttttaaatgaaagggggaaaaatttaaattagattagaatttgaaatagttgaaatagttatygatttttagtttgtttttaagtttggtagagattg

SEQ ID NO: 8315 - DNA, 187 bp, Artificial Sequence
  Description of Artificial Sequence: Synthetic polynucleotide
aggaggtyggaatttttgtttttattttttatyggggttyggttggttagaggtaagtttygagattttttattaattattattatygttgygagggtyggtgaggttgtagataaygtttgtaaggaygggagtyggggagggtgtagggygagtttaaaggaygggtagagtaagtttygggaag

SEQ ID NO: 8316 - DNA, 249 bp, Artificial Sequence
  Description of Artificial Sequence: Synthetic polynucleotide
tatttygggaggtttaggggtayggygaggggtyggggaaaggygatygtttattatagttygygygtttagattgagggaggagtygggttgtagaatyggyggyggatggagaygggagggaggttgygaggtygttygaggagagattaaggttttagaaayggagaagygggygttttgygggaggyggyggygttgtygttggtygttaagggygggaagtgttttgggatttttattaggggt

SEQ ID NO: 8317 - DNA, 196 bp, Artificial Sequence
  Description of Artificial Sequence: Synthetic polynucleotide
gtygtttttagggttgttggttgygttttttattgtttygyggttgttgttyggggtgggyggygaggygggggggaggtgtyggtttggtygtyggggagggtttatygttygggyggatttttattgygagagygatgygggtttaggygyggygygygggggttgtagggygtttagtattgggggttgtygg

SEQ ID NO: 8318 - DNA, 176 bp, Artificial Sequence
  Description of Artificial Sequence: Synthetic polynucleotide
gygattgtatttggggtagtttygtygygttttagtygtttttyggtaggaagygtaggtgtgtgagtygattyggagygagtygygttttygggttagygtgggtagggygtygtagtttgygtagtttygaggatttygygtygttttttygagttagggtttttaggagyggg

SEQ ID NO: 8319 - DNA, 152 bp, Artificial Sequence
  Description of Artificial Sequence: Synthetic polynucleotide
aaagttatttgtagttgtaggatttgttygatggtttygayggattttgtgtgttygattgtaaaatgggygttaggtatgygtgttttgttaggtyggttggggggattaagtaggggttyggggtygggatagttgtttgagggggattt

SEQ ID NO: 8320 - DNA, 232 bp, Artificial Sequence
  Description of Artificial Sequence: Synthetic polynucleotide
ttatttgaggatagtatagggggtgagatggggtggtggttggtgaaygttggttattttattttatattattttattttgagagttgttataattatyggygttatttttygtgtattttgaggtttggttggygagtygttgttgggagttttttgtaaatattttttaaagtttgaaggygggttttaaaygtaggygtyggggattatgggagtttttaaatagttgt

SEQ ID NO: 8321 - DNA, 265 bp, Artificial Sequence
  Description of Artificial Sequence: Synthetic polynucleotide
ttagattgcgtttagtatagtagatggtacgagtacgtgcggcgtttagtttaggttttcggaggtagttgagttggaaatttcgacggaaagtatttataagtttttattttgcgttggtttattcgcgtgtacgtttattttttacgcgcgtttttggtttagaagcgtatagatgtttattgtttagagtcggtatcgttggggagatcgagcgatttgcgcggcgtatagtgcggcgttggtagggttttgggttttcggt

SEQ ID NO: 8322 - DNA, 235 bp, Artificial Sequence
  Description of Artificial Sequence: Synthetic polynucleotide
ttaggtcgggaggggttaggatagtttcggtcgcgcggtggacggaggggttattttttcgggcgttagtaaataaattttattcgagttaatatcgtttagcgaacggtgtttttttttagttattcgagaacgagaggtatttttaattagaaattaattaatgagtagttgttttttttcgttttattgtaattattcgttttaattataaatgagatttatgaaaggatat

SEQ ID NO: 8323 - DNA, 270 bp, Artificial Sequence
  Description of Artificial Sequence: Synthetic polynucleotide
gtcgtagattttggttagtggtattgcgggttattttgagttttcgaggttttagggggatagcgttcgggcgttttcgttgcgcgtcgttttcgcggagtcgagcggcggtggttgcggaagcgattggggttgcgcggatattagcgttttagagttcgcgaggagtttggggttttcgggttggagtaagagtcgagtatcggcgtagtttgcgggattggtatttatcgggttttttaatttttagattttgttattgtagttgga

SEQ ID NO: 8324 - DNA, 270 bp, Artificial Sequence
  Description of Artificial Sequence: Synthetic polynucleotide
tgggtacgttggagtttttggtgtcggtgagtgttttcggtagacgtagggggacgttcgggcggcgcggggcgcgggtttcggagtggttgcgggaaggacgcgcggtattgtttgtgcggggattcgggacgggtcggggtattataggcgcgggaatttacgtgtggattttgcgttcgcgggcgcggtgattttcgcggggatttgttggtgtttcgagatttattgagttgcgggggttttggagatttttaggtttgaaaagtt

SEQ ID NO: 8325 - DNA, 149 bp, Artificial Sequence
  Description of Artificial Sequence: Synthetic polynucleotide
gggcgttaggttttgggtttttgggcgaagtcgacgttagaatatgtttggtttcgtatttagtttatcgtatttttagcgcgcgtgggtggggggcgtcggttgaggtggggagggtatagtttagttttaggttatagtgtttcggg

SEQ ID NO: 8326 - DNA, 232 bp, Artificial Sequence
  Description of Artificial Sequence: Synthetic polynucleotide
tttatagagagggatttttgggtttttggtgggggtttgggagacggtcgaagggggttcgggtagaagtttcgcggtcgggtcggcggagggaagggggcggtcgcgttcgggattcggtttttttcggttttatttatttgtttcgaagagtggttttagttttgcgtttttttttgcgattttatatatagggatagttttaggtatagttttagtagtaggagtatgg

SEQ ID NO: 8327 - DNA, 189 bp, Artificial Sequence
  Description of Artificial Sequence: Synthetic polynucleotide
tggatattgttatttattttaagattgttgttttcgtcgtcgtcgtcgtcgtcgttgttgtcgtcgtcgtcgtcgttattatttgttatagttagtaacgggtagtcggcgtaggggttcgggggagtttttttcgtcgttagcgttattttaaatatttattaatagttatattgttgttattgttgt

SEQ ID NO: 8328 - DNA, 260 bp, Artificial Sequence
  Description of Artificial Sequence: Synthetic polynucleotide
gttaaattttagttttaaagtgtagtgtggtattagcgaatgtggtggatttcggtaggtttggggtaggggaattttcggtaatattttttagtatcgaaggtaggatttttcggttattttcgtcggttggaatttttttaagtattgttttgagtttatttttaaatgaaagggggaaaaatttaaattagattagaatttgaaatagttgaaatagttatcgatttttagtttgtttttaagtttggtagagattg

SEQ ID NO: 8329 - DNA, 187 bp, Artificial Sequence
  Description of Artificial Sequence: Synthetic polynucleotide
aggaggtcggaatttttgtttttattttttatcggggttcggttggttagaggtaagtttcgagattttttattaattattattatcgttgcgagggtcggtgaggttgtagataacgtttgtaaggacgggagtcggggagggtgtagggcgagtttaaaggacgggtagagtaagtttcgggaag

SEQ ID NO: 8330 - DNA, 249 bp, Artificial Sequence
  Description of Artificial Sequence: Synthetic polynucleotide
tatttcgggaggtttaggggtacggcgaggggtcggggaaaggcgatcgtttattatagttcgcgcgtttagattgagggaggagtcgggttgtagaatcggcggcggatggagacgggagggaggttgcgaggtcgttcgaggagagattaaggttttagaaacggagaagcgggcgttttgcgggaggcggcggcgttgtcgttggtcgttaagggcgggaagtgttttgggatttttattaggggt

SEQ ID NO: 8331 - DNA, 196 bp, Artificial Sequence
  Description of Artificial Sequence: Synthetic polynucleotide
gtcgtttttagggttgttggttgcgttttttattgtttcgcggttgttgttcggggtgggcggcgaggcgggggggaggtgtcggtttggtcgtcggggagggtttatcgttcgggcggatttttattgcgagagcgatgcgggtttaggcgcggcgcgcgggggttgtagggcgtttagtattgggggttgtcgg

SEQ ID NO: 8332 - DNA, 176 bp, Artificial Sequence
  Description of Artificial Sequence: Synthetic polynucleotide
gcgattgtatttggggtagtttcgtcgcgttttagtcgtttttcggtaggaagcgtaggtgtgtgagtcgattcggagcgagtcgcgttttcgggttagcgtgggtagggcgtcgtagtttgcgtagtttcgaggatttcgcgtcgttttttcgagttagggtttttaggagcggg

SEQ ID NO: 8333 - DNA, 152 bp, Artificial Sequence
  Description of Artificial Sequence: Synthetic polynucleotide
aaagttatttgtagttgtaggatttgttcgatggtttcgacggattttgtgtgttcgattgtaaaatgggcgttaggtatgcgtgttttgttaggtcggttggggggattaagtaggggttcggggtcgggatagttgtttgagggggattt

SEQ ID NO: 8334 - DNA, 232 bp, Artificial Sequence
  Description of Artificial Sequence: Synthetic polynucleotide
ttatttgaggatagtatagggggtgagatggggtggtggttggtgaacgttggttattttattttatattattttattttgagagttgttataattatcggcgttatttttcgtgtattttgaggtttggttggcgagtcgttgttgggagttttttgtaaatattttttaaagtttgaaggcgggttttaaacgtaggcgtcggggattatgggagtttttaaatagttgt

SEQ ID NO: 8335 - DNA, 265 bp, Homo sapiens
accgggagcccagagccctgccagcgccgcactgtgcgccgcgcaagtcgctcgatctccccagcggtaccggctctaagcagtaaacatctgtgcgcttctgagccagggacgcgcgtggggggtgggcgtgcacgcgggtgggccagcgcagagtgggagcttgtgggtgctttccgtcgggatttccaactcagctgcctccgagagcctaagctgagcgccgcacgtgctcgtgccatctgctgtactggacgcagtctaa

SEQ ID NO: 8336 - DNA, 235 bp, Homo sapiens
gtgtcctttcataggtctcatttgtaattgagacgaatgattacagtggggcgggaaggagcagctgctcattaattaatttctaattaaaagtgcctctcgttctcgggtgactaaagagaaacaccgttcgctgggcgatattgactcggatggaatttatttgctaacgcccggaggaatggcccctccgtccaccgcgcggccgggactgtcctggcccctcccggcctga

SEQ ID NO: 8337 - DNA, 270 bp, Homo sapiens
tccaactgcagtggcaaggtctggggattgagaggcccggtgagtgccagtcccgcaggctgcgccggtgctcggctcttactccagcccgggggccccaggctcctcgcgggctctggggcgctggtgtccgcgcagccccagtcgcttccgcagccaccgccgctcggctccgcggaggcggcgcgcagcgggggcgcccgggcgctgtccccctgaggcctcgggggctcagggtggcccgcagtgccactggccagggtctgcgac

SEQ ID NO: 8338 - DNA, 270 bp, Homo sapiens
aacttttcagacctggaggtctccaaggcccccgcaactcagtgagtctcggggcaccaacaaatccccgcgggggtcaccgcgcccgcgaacgcagagtccacacgtggattcccgcgcctgtgatgccccgacccgtcccgggtccccgcacagacaatgccgcgcgtccttcccgcagccactccgggacccgcgccccgcgccgcccggacgtccccctgcgtctgccggggacactcaccgacaccaggaactccagcgtgccca

SEQ ID NO: 8339 - DNA, 149 bp, Homo sapiens
cccggggcactatggcctggggctggactatgccctccccacctcagccggcgccccccacccacgcgcgctgagggtgcggtgagctgagtgcggggccaagcatgttctggcgtcgacttcgcccaggggcccaggacctggcgccc

SEQ ID NO: 8340 - DNA, 232 bp, Homo sapiens
ccatgctcctgctgctggggctgtgcctggggctgtccctgtgtgtggggtcgcaggaagaggcgcagagctggggccactcttcggagcaggtaagtggagccgaggggagccgggtcccgggcgcggccgcccccttccctccgccggcccggccgcggagcttctgcccgggcccccttcgaccgtctcccaggcccccaccagaggcccaggggtccctctctgtggg

SEQ ID NO: 8341 - DNA, 189 bp, Homo sapiens
gcagcagtagcagcaatatggctgttgatgggtgtttggggtggcgctggcggcgggaggagctcccccgagcccctgcgccggctgcccgttgctagctatggcaaatggtggcggcggcggcggcggcagcagcggcggcggcggcggcggcggaggcagcagtcttagaatgagtagcaatatcca

SEQ ID NO: 8342 - DNA, 260 bp, Homo sapiens
cagtctctgccagacttgaaagcaagctggaaatcgatagctgtttcagctgtttcagattctaatctggtttgggtttttccccctttcatttgaaaatagactcagggcaatgcttaagagaattccaaccgacggaagtggccgggaaatcctgccttcggtactgagggatgttaccggagattcccctgccccaggcctgccggagtccaccacattcgctaatgccacactgcactttagaactagagtttggc

SEQ ID NO: 8343 - DNA, 187 bp, Homo sapiens
cttcccggggcttgctctgcccgtcctttaaactcgccctacaccctccccgactcccgtccttgcaagcgttatctgcagcctcaccggccctcgcaacggtggtggtggttggtggggggtctcgaagcttgcctctggccagccggaccccggtgggagatggaggcagaaattccggcctcct

SEQ ID NO: 8344 - DNA, 249 bp, Homo sapiens
gcccctaatgagagtcccagaacacttcccgcccttgacggccagcggcagcgccgccgcctcccgcagagcgcccgcttctccgtttctagagccttagtctctcctcgagcgacctcgcagcctccctcccgtctccatccgccgccggttctgcagcccggctcctccctcagtctaggcgcgcgggctgtagtgggcgatcgcctttccccgacccctcgccgtgcccctgggcctcccgaagtg

SEQ ID NO: 8345 - DNA, 196 bp, Homo sapiens
ccggcaacccccagtgctaggcgccctgcagcccccgcgcgccgcgcctgggcccgcatcgctctcgcagtgagggtccgcccgagcggtaagccctccccggcggccaagccgacacctcccccccgcctcgccgcccaccccgggcagcagccgcggaacaatggagagcgcagccagcagccctggagacggc

SEQ ID NO: 8346 - DNA, 176 bp, Homo sapiens
cccgctcctgagaaccctggctcgggagagcgacgcggggtcctcggggctgcgcaggctgcggcgccctgcccacgctggcccgagggcgcggctcgctccgggtcggctcacacacctacgcttcctgccgggaggcggctgggacgcggcggggctgccccaagtgcagtcgc

SEQ ID NO: 8347 - DNA, 152 bp, Homo sapiens
gggtccccctcaagcagctgtcccggccccggacccctacttgatccccccaaccgacctggcagggcacgcatacctgacgcccattttgcagtcgagcacacaaggtccgtcgaagccatcgagcaggtcctgcagctgcaggtagcttt

SEQ ID NO: 8348 - DNA, 232 bp, Homo sapiens
gcagctatttgaaggctcccatggtccccggcgcctgcgtttgaagcccgccttcaggctttggggggtatttgcagaaaactcccagcagcggctcgccaaccagacctcagggtgcacggggggtggcgccggtaattatggcaactctcaaaataaaataatataaaataaagtaaccaacgttcaccaaccaccaccccatctcaccccctgtactgtcctcaggtag

SEQ ID NO: 8349 - DNA, 265 bp, Artificial Sequence
  Description of Artificial Sequence: Synthetic polynucleotide
atygggagtttagagttttgttagygtygtattgtgygtygygtaagtygttygatttttttagyggtatyggttttaagtagtaaatatttgtgygtttttgagttagggaygygygtggggggtgggygtgtaygygggtgggttagygtagagtgggagtttgtgggtgtttttygtygggatttttaatttagttgttttygagagtttaagttgagygtygtaygtgttygtgttatttgttgtattggaygtagtttaa

SEQ ID NO: 8350 - DNA, 235 bp, Artificial Sequence
  Description of Artificial Sequence: Synthetic polynucleotide
gtgtttttttataggttttatttgtaattgagaygaatgattatagtggggygggaaggagtagttgtttattaattaatttttaattaaaagtgtttttygttttygggtgattaaagagaaatatygttygttgggygatattgattyggatggaatttatttgttaaygttyggaggaatggttttttygtttatygygyggtygggattgttttggtttttttyggtttga

SEQ ID NO: 8351 - DNA, 270 bp, Artificial Sequence
  Description of Artificial Sequence: Synthetic polynucleotide
tttaattgtagtggtaaggtttggggattgagaggttyggtgagtgttagtttygtaggttgygtyggtgttyggtttttattttagttygggggttttaggtttttygygggttttggggygttggtgttygygtagttttagtygttttygtagttatygtygttyggtttygyggaggyggygygtagygggggygttygggygttgtttttttgaggtttygggggtttagggtggttygtagtgttattggttagggtttgygat

SEQ ID NO: 8352 - DNA, 270 bp, Artificial Sequence
  Description of Artificial Sequence: Synthetic polynucleotide
aattttttagatttggaggtttttaaggttttygtaatttagtgagtttyggggtattaataaattttygygggggttatygygttygygaaygtagagtttataygtggattttygygtttgtgatgtttygattygtttygggttttygtatagataatgtygygygtttttttygtagttatttygggattygygtttygygtygttyggaygtttttttgygtttgtyggggatatttatygatattaggaattttagygtgttta

SEQ ID NO: 8353 - DNA, 149 bp, Artificial Sequence
  Description of Artificial Sequence: Synthetic polynucleotide
ttyggggtattatggtttggggttggattatgttttttttattttagtyggygttttttatttaygygygttgagggtgyggtgagttgagtgyggggttaagtatgttttggygtygatttygtttaggggtttaggatttggygttt

SEQ ID NO: 8354 - DNA, 232 bp, Artificial Sequence
  Description of Artificial Sequence: Synthetic polynucleotide
ttatgtttttgttgttggggttgtgtttggggttgtttttgtgtgtggggtygtaggaagaggygtagagttggggttatttttyggagtaggtaagtggagtygaggggagtygggtttygggygyggtygttttttttttttygtyggttyggtygyggagtttttgttygggtttttttygatygttttttaggtttttattagaggtttaggggtttttttttgtggg

SEQ ID NO: 8355 - DNA, 189 bp, Artificial Sequence
  Description of Artificial Sequence: Synthetic polynucleotide
gtagtagtagtagtaatatggttgttgatgggtgtttggggtggygttggyggygggaggagttttttygagtttttgygtyggttgttygttgttagttatggtaaatggtggyggyggyggyggyggtagtagyggyggyggyggyggyggyggaggtagtagttttagaatgagtagtaatattta

SEQ ID NO: 8356 - DNA, 260 bp, Artificial Sequence
  Description of Artificial Sequence: Synthetic polynucleotide
tagtttttgttagatttgaaagtaagttggaaatygatagttgttttagttgttttagattttaatttggtttgggttttttttttttttatttgaaaatagatttagggtaatgtttaagagaattttaatygayggaagtggtygggaaattttgttttyggtattgagggatgttatyggagatttttttgttttaggtttgtyggagtttattatattygttaatgttatattgtattttagaattagagtttggt

SEQ ID NO: 8357 - DNA, 187 bp, Artificial Sequence
  Description of Artificial Sequence: Synthetic polynucleotide
tttttyggggtttgttttgttygttttttaaattygttttatatttttttygattttygtttttgtaagygttatttgtagttttatyggttttygtaayggtggtggtggttggtggggggtttygaagtttgtttttggttagtyggatttyggtgggagatggaggtagaaatttyggtttttt

SEQ ID NO: 8358 - DNA, 249 bp, Artificial Sequence
  Description of Artificial Sequence: Synthetic polynucleotide
gtttttaatgagagttttagaatatttttygtttttgayggttagyggtagygtygtygtttttygtagagygttygttttttygtttttagagttttagttttttttygagygatttygtagtttttttttygtttttattygtygtyggttttgtagttyggttttttttttagtttaggygygygggttgtagtgggygatygttttttttygatttttygtygtgtttttgggtttttygaagtg

SEQ ID NO: 8359 - DNA, 196 bp, Artificial Sequence
  Description of Artificial Sequence: Synthetic polynucleotide
tyggtaatttttagtgttaggygttttgtagttttygygygtygygtttgggttygtatygttttygtagtgagggttygttygagyggtaagtttttttyggyggttaagtygatatttttttttygtttygtygtttatttygggtagtagtygyggaataatggagagygtagttagtagttttggagayggt

SEQ ID NO: 8360 - DNA, 176 bp, Artificial Sequence
  Description of Artificial Sequence: Synthetic polynucleotide
ttygtttttgagaattttggttygggagagygaygyggggttttyggggttgygtaggttgyggygttttgtttaygttggttygagggygyggttygtttygggtyggtttatatatttaygttttttgtygggaggyggttgggaygyggyggggttgttttaagtgtagtygt

SEQ ID NO: 8361 - DNA, 152 bp, Artificial Sequence
  Description of Artificial Sequence: Synthetic polynucleotide
gggttttttttaagtagttgtttyggtttyggatttttatttgatttttttaatygatttggtagggtaygtatatttgaygtttattttgtagtygagtatataaggttygtygaagttatygagtaggttttgtagttgtaggtagtttt

SEQ ID NO: 8362 - DNA, 232 bp, Artificial Sequence
  Description of Artificial Sequence: Synthetic polynucleotide
gtagttatttgaaggtttttatggttttyggygtttgygtttgaagttygtttttaggttttggggggtatttgtagaaaatttttagtagyggttygttaattagattttagggtgtayggggggtggygtyggtaattatggtaatttttaaaataaaataatataaaataaagtaattaaygtttattaattattattttattttattttttgtattgtttttaggtag

SEQ ID NO: 8363 - DNA, 265 bp, Artificial Sequence
  Description of Artificial Sequence: Synthetic polynucleotide
atcgggagtttagagttttgttagcgtcgtattgtgcgtcgcgtaagtcgttcgatttttttagcggtatcggttttaagtagtaaatatttgtgcgtttttgagttagggacgcgcgtggggggtgggcgtgtacgcgggtgggttagcgtagagtgggagtttgtgggtgtttttcgtcgggatttttaatttagttgttttcgagagtttaagttgagcgtcgtacgtgttcgtgttatttgttgtattggacgtagtttaa

SEQ ID NO: 8364 - DNA, 235 bp, Artificial Sequence
  Description of Artificial Sequence: Synthetic polynucleotide
gtgtttttttataggttttatttgtaattgagacgaatgattatagtggggcgggaaggagtagttgtttattaattaatttttaattaaaagtgtttttcgttttcgggtgattaaagagaaatatcgttcgttgggcgatattgattcggatggaatttatttgttaacgttcggaggaatggttttttcgtttatcgcgcggtcgggattgttttggtttttttcggtttga

SEQ ID NO: 8365 - DNA, 270 bp, Artificial Sequence
  Description of Artificial Sequence: Synthetic polynucleotide
tttaattgtagtggtaaggtttggggattgagaggttcggtgagtgttagtttcgtaggttgcgtcggtgttcggtttttattttagttcgggggttttaggtttttcgcgggttttggggcgttggtgttcgcgtagttttagtcgttttcgtagttatcgtcgttcggtttcgcggaggcggcgcgtagcgggggcgttcgggcgttgtttttttgaggtttcgggggtttagggtggttcgtagtgttattggttagggtttgcgat

SEQ ID NO: 8366 - DNA, 270 bp, Artificial Sequence
  Description of Artificial Sequence: Synthetic polynucleotide
aattttttagatttggaggtttttaaggttttcgtaatttagtgagtttcggggtattaataaattttcgcgggggttatcgcgttcgcgaacgtagagtttatacgtggattttcgcgtttgtgatgtttcgattcgtttcgggttttcgtatagataatgtcgcgcgtttttttcgtagttatttcgggattcgcgtttcgcgtcgttcggacgtttttttgcgtttgtcggggatatttatcgatattaggaattttagcgtgttta

SEQ ID NO: 8367 - DNA, 149 bp, Artificial Sequence
  Description of Artificial Sequence: Synthetic polynucleotide
ttcggggtattatggtttggggttggattatgttttttttattttagtcggcgttttttatttacgcgcgttgagggtgcggtgagttgagtgcggggttaagtatgttttggcgtcgatttcgtttaggggtttaggatttggcgttt

SEQ ID NO: 8368 - DNA, 232 bp, Artificial Sequence
  Description of Artificial Sequence: Synthetic polynucleotide
ttatgtttttgttgttggggttgtgtttggggttgtttttgtgtgtggggtcgtaggaagaggcgtagagttggggttatttttcggagtaggtaagtggagtcgaggggagtcgggtttcgggcgcggtcgttttttttttttcgtcggttcggtcgcggagtttttgttcgggtttttttcgatcgttttttaggtttttattagaggtttaggggtttttttttgtggg

SEQ ID NO: 8369 - DNA, 189 bp, Artificial Sequence
  Description of Artificial Sequence: Synthetic polynucleotide
gtagtagtagtagtaatatggttgttgatgggtgtttggggtggcgttggcggcgggaggagttttttcgagtttttgcgtcggttgttcgttgttagttatggtaaatggtggcggcggcggcggcggtagtagcggcggcggcggcggcggcggaggtagtagttttagaatgagtagtaatattta

SEQ ID NO: 8370 - DNA, 260 bp, Artificial Sequence
  Description of Artificial Sequence: Synthetic polynucleotide
tagtttttgttagatttgaaagtaagttggaaatcgatagttgttttagttgttttagattttaatttggtttgggttttttttttttttatttgaaaatagatttagggtaatgtttaagagaattttaatcgacggaagtggtcgggaaattttgttttcggtattgagggatgttatcggagatttttttgttttaggtttgtcggagtttattatattcgttaatgttatattgtattttagaattagagtttggt

SEQ ID NO: 8371 - DNA, 187 bp, Artificial Sequence
  Description of Artificial Sequence: Synthetic polynucleotide
tttttcggggtttgttttgttcgttttttaaattcgttttatatttttttcgattttcgtttttgtaagcgttatttgtagttttatcggttttcgtaacggtggtggtggttggtggggggtttcgaagtttgtttttggttagtcggatttcggtgggagatggaggtagaaatttcggtttttt

SEQ ID NO: 8372 - DNA, 249 bp, Artificial Sequence
  Description of Artificial Sequence: Synthetic polynucleotide
gtttttaatgagagttttagaatatttttcgtttttgacggttagcggtagcgtcgtcgtttttcgtagagcgttcgttttttcgtttttagagttttagttttttttcgagcgatttcgtagtttttttttcgtttttattcgtcgtcggttttgtagttcggttttttttttagtttaggcgcgcgggttgtagtgggcgatcgttttttttcgatttttcgtcgtgtttttgggtttttcgaagtg

SEQ ID NO: 8373 - DNA, 196 bp, Artificial Sequence
  Description of Artificial Sequence: Synthetic polynucleotide
tcggtaatttttagtgttaggcgttttgtagttttcgcgcgtcgcgtttgggttcgtatcgttttcgtagtgagggttcgttcgagcggtaagtttttttcggcggttaagtcgatatttttttttcgtttcgtcgtttatttcgggtagtagtcgcggaataatggagagcgtagttagtagttttggagacggt

SEQ ID NO: 8374 - DNA, 176 bp, Artificial Sequence
  Description of Artificial Sequence: Synthetic polynucleotide
ttcgtttttgagaattttggttcgggagagcgacgcggggttttcggggttgcgtaggttgcggcgttttgtttacgttggttcgagggcgcggttcgtttcgggtcggtttatatatttacgttttttgtcgggaggcggttgggacgcggcggggttgttttaagtgtagtcgt

SEQ ID NO: 8375 - DNA, 152 bp, Artificial Sequence
  Description of Artificial Sequence: Synthetic polynucleotide
gggttttttttaagtagttgtttcggtttcggatttttatttgatttttttaatcgatttggtagggtacgtatatttgacgtttattttgtagtcgagtatataaggttcgtcgaagttatcgagtaggttttgtagttgtaggtagtttt

SEQ ID NO: 8376 - DNA, 232 bp, Artificial Sequence
  Description of Artificial Sequence: Synthetic polynucleotide
gtagttatttgaaggtttttatggttttcggcgtttgcgtttgaagttcgtttttaggttttggggggtatttgtagaaaatttttagtagcggttcgttaattagattttagggtgtacggggggtggcgtcggtaattatggtaatttttaaaataaaataatataaaataaagtaattaacgtttattaattattattttattttattttttgtattgtttttaggtag

SEQ ID NO: 8377 - DNA, 28 bp, Artificial Sequence
  Description of Artificial Sequence: Synthetic primer
ttagattgygtttagtatagtagatggt

SEQ ID NO: 8378 - DNA, 24 bp, Artificial Sequence
  Description of Artificial Sequence: Synthetic primer
ttaggtygggaggggttaggatag

SEQ ID NO: 8379 - DNA, 25 bp, Artificial Sequence
  Description of Artificial Sequence: Synthetic primer
gtygtagattttggttagtggtatt

SEQ ID NO: 8380 - DNA, 22 bp, Artificial Sequence
  Description of Artificial Sequence: Synthetic primer
tgggtaygttggagtttttggt

SEQ ID NO: 8381 - DNA, 22 bp, Artificial Sequence
  Description of Artificial Sequence: Synthetic primer
gggygttaggttttgggttttt

SEQ ID NO: 8382 - DNA, 29 bp, Artificial Sequence
  Description of Artificial Sequence: Synthetic primer
tttatagagagggatttttgggtttttgg

SEQ ID NO: 8383 - DNA, 32 bp, Artificial Sequence
  Description of Artificial Sequence: Synthetic primer
ggatattgttatttattttaagattgttgttt

SEQ ID NO: 8384 - DNA, 31 bp, Artificial Sequence
  Description of Artificial Sequence: Synthetic primer
gttaaattttagttttaaagtgtagtgtggt

SEQ ID NO: 8385 - DNA, 25 bp, Artificial Sequence
  Description of Artificial Sequence: Synthetic primer
aggaggtyggaatttttgtttttat

SEQ ID NO: 8386 - DNA, 22 bp, Artificial Sequence
  Description of Artificial Sequence: Synthetic primer
tatttygggaggtttaggggta

SEQ ID NO: 8387 - DNA, 22 bp, Artificial Sequence
  Description of Artificial Sequence: Synthetic primer
gtygtttttagggttgttggtt

SEQ ID NO: 8388 - DNA, 22 bp, Artificial Sequence
  Description of Artificial Sequence: Synthetic primer
gygattgtatttggggtagttt

SEQ ID NO: 8389 - DNA, 28 bp, Artificial Sequence
  Description of Artificial Sequence: Synthetic primer
aaagttatttgtagttgtaggatttgtt

SEQ ID NO: 8390 - DNA, 27 bp, Artificial Sequence
  Description of Artificial Sequence: Synthetic primer
ttatttgaggatagtatagggggtgag

SEQ ID NO: 8391 - DNA, 24 bp, Artificial Sequence
  Description of Artificial Sequence: Synthetic primer
accraaaacccaaaaccctaccaa

SEQ ID NO: 8392 - DNA, 33 bp, Artificial Sequence
  Description of Artificial Sequence: Synthetic primer
atatcctttcataaatctcatttataattaaaa

SEQ ID NO: 8393 - DNA, 33 bp, Artificial Sequence
  Description of Artificial Sequence: Synthetic primer
tccaactacaataacaaaatctaaaaattaaaa

SEQ ID NO: 8394 - DNA, 30 bp, Artificial Sequence
  Description of Artificial Sequence: Synthetic primer
aacttttcaaacctaaaaatctccaaaacc

SEQ ID NO: 8395 - DNA, 34 bp, Artificial Sequence
  Description of Artificial Sequence: Synthetic primer
cccraaacactataacctaaaactaaactatacc

SEQ ID NO: 8396 - DNA, 36 bp, Artificial Sequence
  Description of Artificial Sequence: Synthetic primer
ccatactcctactactaaaactatacctaaaactat

SEQ ID NO: 8397 - DNA, 36 bp, Artificial Sequence
  Description of Artificial Sequence: Synthetic primer
acaacaataacaacaatataactattaataaatatt

SEQ ID NO: 8398 - DNA, 31 bp, Artificial Sequence
  Description of Artificial Sequence: Synthetic primer
caatctctaccaaacttaaaaacaaactaaa

SEQ ID NO: 8399 - DNA, 22 bp, Artificial Sequence
  Description of Artificial Sequence: Synthetic primer
cttcccraaacttactctaccc

SEQ ID NO: 8400 - DNA, 25 bp, Artificial Sequence
  Description of Artificial Sequence: Synthetic primer
acccctaataaaaatcccaaaacac

SEQ ID NO: 8401 - DNA, 22 bp, Artificial Sequence
  Description of Artificial Sequence: Synthetic primer
ccracaacccccaatactaaac

SEQ ID NO: 8402 - DNA, 22 bp, Artificial Sequence
  Description of Artificial Sequence: Synthetic primer
cccrctcctaaaaaccctaact

SEQ ID NO: 8403 - DNA, 22 bp, Artificial Sequence
  Description of Artificial Sequence: Synthetic primer
aaatccccctcaaacaactatc

SEQ ID NO: 8404 - DNA, 28 bp, Artificial Sequence
  Description of Artificial Sequence: Synthetic primer
acaactatttaaaaactcccataatccc

SEQ ID NO: 8405 - DNA, 116 bp, Homo sapiens
agggacagccccaggcacagccccagcagcaggagcatggcggggcgagggcgcgggacgctcggggacccggcgggacacgctttgcagcgcccagggctccagccactgcggga

SEQ ID NO: 8406 - DNA, 272 bp, Homo sapiens
gggggaaaaacccaaaccagattagaatctgaaacagctgaaacagctatcgatttccagcttgctttcaagtctggcagagactgtgaaagtcctaacttctccgcgatgtcagccacggcccgcggcggtcacggagccacttcagcacctcgcgatggacagtgacccccggcgtggcgcgagttccctgcggtccccacgcgggcctgggcggcgggtccctccacggctccgtccagacacccggaggcacctgccaaagctgcgga

SEQ ID NO: 8407 - DNA, 209 bp, Homo sapiens
agtgttctgggactctcattaggggccgcgagcctcgagcgtcaaattcccgcggcgtccgcctagcgcgctgctgtggcgggcgcggagggcgcgcgccggcagtgggggctgcggcggcggagggcacgggcccccgctcagcgtcctcaccttcttggtgcagctgcctcccgcgagccgagacactcctgtcagggaagaggagc

SEQ ID NO: 8408 - DNA, 114 bp, Homo sapiens
ggcagcggcagagcagtggcagcagccgccactgccgctgttactgcggtcgccgccgctggagagaggaggacgaggagggcaaggggcagaagcaggtcctgctctgtctgc

SEQ ID NO: 8409 - DNA, 184 bp, Homo sapiens
gatgccggtcctcagggagttttaaggcggcgggcaccagcgggctgatcctgaagcgctgctcggagccggagcgctactgcctggcgcggctgatggctgacgcgctgcgcggctgcgtgcctgccttccacggcgtggtggagcgcgacggcgaaagctacctgcagctgcaggacctgct

SEQ ID NO: 8410 - DNA, 116 bp, Artificial Sequence
  Description of Artificial Sequence: Synthetic polynucleotide
agggatagttttaggtatagttttagtagtaggagtatggyggggygagggygygggaygttyggggattyggygggataygttttgtagygtttagggttttagttattgyggga

SEQ ID NO: 8411 - DNA, 272 bp, Artificial Sequence
  Description of Artificial Sequence: Synthetic polynucleotide
gggggaaaaatttaaattagattagaatttgaaatagttgaaatagttatygatttttagtttgtttttaagtttggtagagattgtgaaagttttaattttttygygatgttagttayggttygyggyggttayggagttattttagtatttygygatggatagtgattttyggygtggygygagttttttgyggtttttaygygggtttgggyggygggtttttttayggtttygtttagatattyggaggtatttgttaaagttgygga

SEQ ID NO: 8412 - DNA, 209 bp, Artificial Sequence
  Description of Artificial Sequence: Synthetic polynucleotide
agtgttttgggatttttattaggggtygygagtttygagygttaaattttygyggygttygtttagygygttgttgtggygggygyggagggygygygtyggtagtgggggttgyggyggyggagggtaygggttttygtttagygtttttatttttttggtgtagttgtttttygygagtygagatatttttgttagggaagaggagt

SEQ ID NO: 8413 - DNA, 114 bp, Artificial Sequence
  Description of Artificial Sequence: Synthetic polynucleotide
ggtagyggtagagtagtggtagtagtygttattgtygttgttattgyggtygtygtygttggagagaggaggaygaggagggtaaggggtagaagtaggttttgttttgtttgt

SEQ ID NO: 8414 - DNA, 184 bp, Artificial Sequence
  Description of Artificial Sequence: Synthetic polynucleotide
gatgtyggtttttagggagttttaaggyggygggtattagygggttgattttgaagygttgttyggagtyggagygttattgtttggygyggttgatggttgaygygttgygyggttgygtgtttgttttttayggygtggtggagygygayggygaaagttatttgtagttgtaggatttgtt

SEQ ID NO: 8415 - DNA, 116 bp, Artificial Sequence
  Description of Artificial Sequence: Synthetic polynucleotide
agggatagttttaggtatagttttagtagtaggagtatggcggggcgagggcgcgggacgttcggggattcggcgggatacgttttgtagcgtttagggttttagttattgcggga

SEQ ID NO: 8416 - DNA, 272 bp, Artificial Sequence
  Description of Artificial Sequence: Synthetic polynucleotide
gggggaaaaatttaaattagattagaatttgaaatagttgaaatagttatcgatttttagtttgtttttaagtttggtagagattgtgaaagttttaattttttcgcgatgttagttacggttcgcggcggttacggagttattttagtatttcgcgatggatagtgattttcggcgtggcgcgagttttttgcggtttttacgcgggtttgggcggcgggtttttttacggtttcgtttagatattcggaggtatttgttaaagttgcgga

SEQ ID NO: 8417 - DNA, 209 bp, Artificial Sequence
  Description of Artificial Sequence: Synthetic polynucleotide
agtgttttgggatttttattaggggtcgcgagtttcgagcgttaaattttcgcggcgttcgtttagcgcgttgttgtggcgggcgcggagggcgcgcgtcggtagtgggggttgcggcggcggagggtacgggttttcgtttagcgtttttatttttttggtgtagttgtttttcgcgagtcgagatatttttgttagggaagaggagt

SEQ ID NO: 8418 - DNA, 114 bp, Artificial Sequence
  Description of Artificial Sequence: Synthetic polynucleotide
ggtagcggtagagtagtggtagtagtcgttattgtcgttgttattgcggtcgtcgtcgttggagagaggaggacgaggagggtaaggggtagaagtaggttttgttttgtttgt

SEQ ID NO: 8419 - DNA, 184 bp, Artificial Sequence
  Description of Artificial Sequence: Synthetic polynucleotide
gatgtcggtttttagggagttttaaggcggcgggtattagcgggttgattttgaagcgttgttcggagtcggagcgttattgtttggcgcggttgatggttgacgcgttgcgcggttgcgtgtttgttttttacggcgtggtggagcgcgacggcgaaagttatttgtagttgtaggatttgtt

SEQ ID NO: 8420 - DNA, 116 bp, Homo sapiens
tcccgcagtggctggagccctgggcgctgcaaagcgtgtcccgccgggtccccgagcgtcccgcgccctcgccccgccatgctcctgctgctggggctgtgcctggggctgtccct

SEQ ID NO: 8421 - DNA, 272 bp, Homo sapiens
tccgcagctttggcaggtgcctccgggtgtctggacggagccgtggagggacccgccgcccaggcccgcgtggggaccgcagggaactcgcgccacgccgggggtcactgtccatcgcgaggtgctgaagtggctccgtgaccgccgcgggccgtggctgacatcgcggagaagttaggactttcacagtctctgccagacttgaaagcaagctggaaatcgatagctgtttcagctgtttcagattctaatctggtttgggtttttccccc

SEQ ID NO: 8422 - DNA, 209 bp, Homo sapiens
gctcctcttccctgacaggagtgtctcggctcgcgggaggcagctgcaccaagaaggtgaggacgctgagcgggggcccgtgccctccgccgccgcagcccccactgccggcgcgcgccctccgcgcccgccacagcagcgcgctaggcggacgccgcgggaatttgacgctcgaggctcgcggcccctaatgagagtcccagaacact

SEQ ID NO: 8423 - DNA, 114 bp, Homo sapiens
gcagacagagcaggacctgcttctgccccttgccctcctcgtcctcctctctccagcggcggcgaccgcagtaacagcggcagtggcggctgctgccactgctctgccgctgcc

SEQ ID NO: 8424 - DNA, 184 bp, Homo sapiens
agcaggtcctgcagctgcaggtagctttcgccgtcgcgctccaccacgccgtggaaggcaggcacgcagccgcgcagcgcgtcagccatcagccgcgccaggcagtagcgctccggctccgagcagcgcttcaggatcagcccgctggtgcccgccgccttaaaactccctgaggaccggcatc

SEQ ID NO: 8425 - DNA, 116 bp, Artificial Sequence
  Description of Artificial Sequence: Synthetic polynucleotide
tttygtagtggttggagttttgggygttgtaaagygtgtttygtygggttttygagygtttygygttttygtttygttatgtttttgttgttggggttgtgtttggggttgttttt

SEQ ID NO: 8426 - DNA, 272 bp, Artificial Sequence
  Description of Artificial Sequence: Synthetic polynucleotide
ttygtagttttggtaggtgttttygggtgtttggayggagtygtggagggattygtygtttaggttygygtggggatygtagggaattygygttaygtygggggttattgtttatygygaggtgttgaagtggtttygtgatygtygygggtygtggttgatatygyggagaagttaggatttttatagtttttgttagatttgaaagtaagttggaaatygatagttgttttagttgttttagattttaatttggtttgggtttttttttt

SEQ ID NO: 8427 - DNA, 209 bp, Artificial Sequence
  Description of Artificial Sequence: Synthetic polynucleotide
gttttttttttttgataggagtgtttyggttygygggaggtagttgtattaagaaggtgaggaygttgagygggggttygtgtttttygtygtygtagtttttattgtyggygygygtttttygygttygttatagtagygygttaggyggaygtygygggaatttgaygttygaggttygyggtttttaatgagagttttagaatatt

SEQ ID NO: 8428 - DNA, 114 bp, Artificial Sequence
  Description of Artificial Sequence: Synthetic polynucleotide
gtagatagagtaggatttgtttttgttttttgtttttttygtttttttttttttagyggyggygatygtagtaatagyggtagtggyggttgttgttattgttttgtygttgtt

SEQ ID NO: 8429 - DNA, 184 bp, Artificial Sequence
  Description of Artificial Sequence: Synthetic polynucleotide
agtaggttttgtagttgtaggtagttttygtygtygygttttattaygtygtggaaggtaggtaygtagtygygtagygygttagttattagtygygttaggtagtagygtttyggtttygagtagygttttaggattagttygttggtgttygtygttttaaaattttttgaggatyggtatt

SEQ ID NO: 8430 - DNA, 116 bp, Artificial Sequence
  Description of Artificial Sequence: Synthetic polynucleotide
tttcgtagtggttggagttttgggcgttgtaaagcgtgtttcgtcgggttttcgagcgtttcgcgttttcgtttcgttatgtttttgttgttggggttgtgtttggggttgttttt

SEQ ID NO: 8431 - DNA, 272 bp, Artificial Sequence
  Description of Artificial Sequence: Synthetic polynucleotide
ttcgtagttttggtaggtgttttcgggtgtttggacggagtcgtggagggattcgtcgtttaggttcgcgtggggatcgtagggaattcgcgttacgtcgggggttattgtttatcgcgaggtgttgaagtggtttcgtgatcgtcgcgggtcgtggttgatatcgcggagaagttaggatttttatagtttttgttagatttgaaagtaagttggaaatcgatagttgttttagttgttttagattttaatttggtttgggtttttttttt

SEQ ID NO: 8432 - DNA, 209 bp, Artificial Sequence
  Description of Artificial Sequence: Synthetic polynucleotide
gttttttttttttgataggagtgtttcggttcgcgggaggtagttgtattaagaaggtgaggacgttgagcgggggttcgtgtttttcgtcgtcgtagtttttattgtcggcgcgcgtttttcgcgttcgttatagtagcgcgttaggcggacgtcgcgggaatttgacgttcgaggttcgcggtttttaatgagagttttagaatatt

SEQ ID NO: 8433 - DNA, 114 bp, Artificial Sequence
  Description of Artificial Sequence: Synthetic polynucleotide
gtagatagagtaggatttgtttttgttttttgtttttttcgtttttttttttttagcggcggcgatcgtagtaatagcggtagtggcggttgttgttattgttttgtcgttgtt

SEQ ID NO: 8434 - DNA, 184 bp, Artificial Sequence
  Description of Artificial Sequence: Synthetic polynucleotide
agtaggttttgtagttgtaggtagttttcgtcgtcgcgttttattacgtcgtggaaggtaggtacgtagtcgcgtagcgcgttagttattagtcgcgttaggtagtagcgtttcggtttcgagtagcgttttaggattagttcgttggtgttcgtcgttttaaaattttttgaggatcggtatt

SEQ ID NO: 8435 - DNA, 30 bp, Artificial Sequence
  Description of Artificial Sequence: Synthetic primer
agggatagttttaggtatagttttagtagt

SEQ ID NO: 8436 - DNA, 31 bp, Artificial Sequence
  Description of Artificial Sequence: Synthetic primer
gggggaaaaatttaaattagattagaatttg

SEQ ID NO: 8437 - DNA, 25 bp, Artificial Sequence
  Description of Artificial Sequence: Synthetic primer
agtgttttgggatttttattagggg

SEQ ID NO: 8438 - DNA, 25 bp, Artificial Sequence
  Description of Artificial Sequence: Synthetic primer
ggtagyggtagagtagtggtagtag

SEQ ID NO: 8439 - DNA, 22 bp, Artificial Sequence
  Description of Artificial Sequence: Synthetic primer
gatgtyggtttttagggagttt

SEQ ID NO: 8440 - DNA, 23 bp, Artificial Sequence
  Description of Artificial Sequence: Synthetic primer
tcccrcaataactaaaaccctaa

SEQ ID NO: 8441 - DNA, 23 bp, Artificial Sequence
  Description of Artificial Sequence: Synthetic primer
tccrcaactttaacaaatacctc

SEQ ID NO: 8442 - DNA, 25 bp, Artificial Sequence
  Description of Artificial Sequence: Synthetic primer
actcctcttccctaacaaaaatatc

SEQ ID NO: 8443 - DNA, 27 bp, Artificial Sequence
  Description of Artificial Sequence: Synthetic primer
acaaaacaaaacctacttctacccctt

SEQ ID NO: 8444 - DNA, 28 bp, Artificial Sequence
  Description of Artificial Sequence: Synthetic primer
aacaaatcctacaactacaaataacttt

SEQ ID NO: 8445 - DNA, 22 bp, Artificial Sequence
  Description of Artificial Sequence: Synthetic primer
ctcrtcctcctaccrcaaaata

SEQ ID NO: 8446 - DNA, 19 bp, Artificial Sequence
  Description of Artificial Sequence: Synthetic primer
gttgtttaggttgtaggtg

SEQ ID NO: 8447 - DNA, 20 bp, Homo sapiens
cgtggtgcgcgcggcgggcg

SEQ ID NO: 8448 - DNA, 116 bp, Homo sapiens
cgagcgccgtgggcggggctccagggcggcggcgcctcgcggggagggtcctccgtgctgggggcgaggccacccgaggcagctccccgcccgcccccaaccccgccccgctctcg

SEQ ID NO: 8449 - DNA, 2 bp, Homo sapiens
cg

SEQ ID NO: 8450 - DNA, 2 bp, Homo sapiens
cg

SEQ ID NO: 8451 - DNA, 2 bp, Homo sapiens
cg

SEQ ID NO: 8452 - DNA, 2 bp, Homo sapiens
cg

SEQ ID NO: 8453 - DNA, 2 bp, Homo sapiens
cg

SEQ ID NO: 8454 - DNA, 2 bp, Homo sapiens
cg

SEQ ID NO: 8455 - DNA, 2 bp, Homo sapiens
cg

SEQ ID NO: 8456 - DNA, 2 bp, Homo sapiens
cg

SEQ ID NO: 8457 - DNA, 2 bp, Homo sapiens
cg

SEQ ID NO: 8458 - DNA, 2 bp, Homo sapiens
cg

SEQ ID NO: 8459 - DNA, 44 bp, Homo sapiens
cgcgcgccccccgggccccgctcgcacccctcacgcgccccccg

SEQ ID NO: 8460 - DNA, 2 bp, Homo sapiens
cg

SEQ ID NO: 8461 - DNA, 2 bp, Homo sapiens
cg

SEQ ID NO: 8462 - DNA, 2 bp, Homo sapiens
cg

SEQ ID NO: 8463 - DNA, 2 bp, Homo sapiens
cg

SEQ ID NO: 8464 - DNA, 2 bp, Homo sapiens
cg

SEQ ID NO: 8465 - DNA, 2 bp, Homo sapiens
cg

SEQ ID NO: 8466 - DNA, 2 bp, Homo sapiens
cg

SEQ ID NO: 8467 - DNA, 2 bp, Homo sapiens
cg

SEQ ID NO: 8468 - DNA, 2 bp, Homo sapiens
cg

SEQ ID NO: 8469 - DNA, 2 bp, Homo sapiens
cg

SEQ ID NO: 8470 - DNA, 34 bp, Homo sapiens
cgtctgctcggcggctctagaaggtcgggctgcg

SEQ ID NO: 8471 - DNA, 2 bp, Homo sapiens
cg

SEQ ID NO: 8472 - DNA, 2 bp, Homo sapiens
cg

SEQ ID NO: 8473 - DNA, 2 bp, Homo sapiens
cg

SEQ ID NO: 8474 - DNA, 2 bp, Homo sapiens
cg

SEQ ID NO: 8475 - DNA, 2 bp, Homo sapiens
cg

SEQ ID NO: 8476 - DNA, 2 bp, Homo sapiens
cg

SEQ ID NO: 8477 - DNA, 2 bp, Homo sapiens
cg

SEQ ID NO: 8478 - DNA, 2 bp, Homo sapiens
cg

SEQ ID NO: 8479 - DNA, 2 bp, Homo sapiens
cg

SEQ ID NO: 8480 - DNA, 2 bp, Homo sapiens
cg

SEQ ID NO: 8481 - DNA, 211 bp, Homo sapiens
cgatccccggcgcagacacagaggccgcccccagccccgccgcctcgtggtcccgcccccgctgcacgctcccttacccctcggacctcgcagggccgcggcggacacggcccgatcggggacgtgaacgcgcagaactacatttcccagcgtcccgctcgcgctggaactacacttcccggggggctcggcggtgcacccgccggggtcg

SEQ ID NO: 8482 - DNA, 2 bp, Homo sapiens
cg

SEQ ID NO: 8483 - DNA, 2 bp, Homo sapiens
cg

SEQ ID NO: 8484 - DNA, 2 bp, Homo sapiens
cg

SEQ ID NO: 8485 - DNA, 2 bp, Homo sapiens
cg

SEQ ID NO: 8486 - DNA, 2 bp, Homo sapiens
cg

SEQ ID NO: 8487 - DNA, 2 bp, Homo sapiens
cg

SEQ ID NO: 8488 - DNA, 2 bp, Homo sapiens
cg

SEQ ID NO: 8489 - DNA, 2 bp, Homo sapiens
cg

SEQ ID NO: 8490 - DNA, 2 bp, Homo sapiens
cg

SEQ ID NO: 8491 - DNA, 2 bp, Homo sapiens
cg

SEQ ID NO: 8492 - DNA, 95 bp, Homo sapiens
cgggaaaaggggcgcggaagaggggcggggcgggccacggcgcgcagggcccttccctcccgcctcggactcaattaattgggcttgagcttccg

SEQ ID NO: 8493 - DNA, 2 bp, Homo sapiens
cg

SEQ ID NO: 8494 - DNA, 2 bp, Homo sapiens
cg

SEQ ID NO: 8495 - DNA, 2 bp, Homo sapiens
cg

SEQ ID NO: 8496 - DNA, 2 bp, Homo sapiens
cg

SEQ ID NO: 8497 - DNA, 2 bp, Homo sapiens
cg

SEQ ID NO: 8498 - DNA, 2 bp, Homo sapiens
cg

SEQ ID NO: 8499 - DNA, 2 bp, Homo sapiens
cg

SEQ ID NO: 8500 - DNA, 2 bp, Homo sapiens
cg

SEQ ID NO: 8501 - DNA, 2 bp, Homo sapiens
cg

SEQ ID NO: 8502 - DNA, 2 bp, Homo sapiens
cg

SEQ ID NO: 8503 - DNA, 264 bp, Homo sapiens
cgggctgcaaggcggtgtactacgtgtgcgcgctcagcatgtacgccagcgtgctgctcaccggcctgctcagcctgcagcgctgcctcgcagtcacccgccccttcctggcgcctcggctgcgcagcccggccctggcccgccgcctgctgctggcggtctggctggccgccctgttgctcgccgtcccggccgccgtctaccgccacctgtggagggaccgcgtatgccagctgtgccacccgtcgccggtccacgccgccg

SEQ ID NO: 8504 - DNA, 2 bp, Homo sapiens
cg

SEQ ID NO: 8505 - DNA, 2 bp, Homo sapiens
cg

SEQ ID NO: 8506 - DNA, 2 bp, Homo sapiens
cg

SEQ ID NO: 8507 - DNA, 2 bp, Homo sapiens
cg

SEQ ID NO: 8508 - DNA, 2 bp, Homo sapiens
cg

SEQ ID NO: 8509 - DNA, 2 bp, Homo sapiens
cg

SEQ ID NO: 8510 - DNA, 2 bp, Homo sapiens
cg

SEQ ID NO: 8511 - DNA, 2 bp, Homo sapiens
cg

SEQ ID NO: 8512 - DNA, 2 bp, Homo sapiens
cg

SEQ ID NO: 8513 - DNA, 2 bp, Homo sapiens
cg

SEQ ID NO: 8514 - DNA, 59 bp, Homo sapiens
cgttccccgtcccggagctgccggcggcatgatccgacacgccggggcgcccgcgcgcg

SEQ ID NO: 8515 - DNA, 2 bp, Homo sapiens
cg

SEQ ID NO: 8516 - DNA, 2 bp, Homo sapiens
cg

SEQ ID NO: 8517 - DNA, 2 bp, Homo sapiens
cg

SEQ ID NO: 8518 - DNA, 2 bp, Homo sapiens
cg

SEQ ID NO: 8519 - DNA, 2 bp, Homo sapiens
cg

SEQ ID NO: 8520 - DNA, 2 bp, Homo sapiens
cg

SEQ ID NO: 8521 - DNA, 2 bp, Homo sapiens
cg

SEQ ID NO: 8522 - DNA, 2 bp, Homo sapiens
cg

SEQ ID NO: 8523 - DNA, 2 bp, Homo sapiens
cg

SEQ ID NO: 8524 - DNA, 2 bp, Homo sapiens
cg

SEQ ID NO: 8525 - DNA, 4 bp, Homo sapiens
cgcg

SEQ ID NO: 8526 - DNA, 2 bp, Homo sapiens
cg

SEQ ID NO: 8527 - DNA, 2 bp, Homo sapiens
cg

SEQ ID NO: 8528 - DNA, 2 bp, Homo sapiens
cg

SEQ ID NO: 8529 - DNA, 2 bp, Homo sapiens
cg

SEQ ID NO: 8530 - DNA, 2 bp, Homo sapiens
cg

SEQ ID NO: 8531 - DNA, 2 bp, Homo sapiens
cg

SEQ ID NO: 8532 - DNA, 2 bp, Homo sapiens
cg

SEQ ID NO: 8533 - DNA, 2 bp, Homo sapiens
cg

SEQ ID NO: 8534 - DNA, 2 bp, Homo sapiens
cg

SEQ ID NO: 8535 - DNA, 2 bp, Homo sapiens
cg

SEQ ID NO: 8536 - DNA, 324 bp, Homo sapiens
cggcgaaggccccgtgtcccacgagatccctcttgctgtactcgaagtcacccaccacctccatggccgcgcccccggggcacacagcggacgggcgggcggcgcagtgcggcgcaggtatcagcaccgcggctccgcgggcccggagcgcgccagcgtgcggcgggtctggggcagccgcagccccgggcccgggcggactctcatgccgagagaccggagcggaaactggggaagctgccgcgcggagccagggtcagcgaggcccggcccggcccctgccgctcatggcccggcctgccgccggccgctggctgtctggcg

SEQ ID NO: 8537 - DNA, 2 bp, Homo sapiens
cg

SEQ ID NO: 8538 - DNA, 2 bp, Homo sapiens
cg

SEQ ID NO: 8539 - DNA, 2 bp, Homo sapiens
cg

SEQ ID NO: 8540 - DNA, 2 bp, Homo sapiens
cg

SEQ ID NO: 8541 - DNA, 2 bp, Homo sapiens
cg

SEQ ID NO: 8542 - DNA, 2 bp, Homo sapiens
cg

SEQ ID NO: 8543 - DNA, 2 bp, Homo sapiens
cg

SEQ ID NO: 8544 - DNA, 102 bp, Homo sapiens
cgttgagtccgcgctgaacaagattctctcgcagctctgcgtcccgcgccgggtgaaggggcgtgttcctgcaggcgctcggggctcggcctggagctggcg

SEQ ID NO: 8545 - DNA, 24 bp, Homo sapiens
cgcaacgactcgctgccgcccacg

SEQ ID NO: 8546 - DNA, 521 bp, Homo sapiens
cgtggtgggggtgttagctgcaggggtgccctcggtgggtgggagttggtggcctctcgctggtgccatgggactcgcatgttcgccctgcgcccctcggctcttgagcccacaggccgggatcctgcctgccagccgcgtgcgctgccgtttaacccttgcaggcgcagagcgcgcggcggcggtgacagagaactttgtttggctgcccaaatacagcctcctgcagaaggaccctgcgcccggggaaggggaggaatctcttcccctctgggcgcccgccctcctcgccatggcccggcctccacatccgcccacatctggccgcagcggggcgcccggggggaggggctgaggccgcgtctctcgccgtcccctgggcgcgggccaggcggggaggaggggggcgctccggtcgtgtgcccaggactgtcccccagcggccactcgggccccagccccccaggcctggccttgacaggcgggcggagcagccagtgcgagacagggaggccggtgcg

SEQ ID NO: 8547 - DNA, 1484 bp, Homo sapiens
cgcaagggcgccggggagcgggaggggcgctgggggcggcaaggggtcccagatcccaggccacgaactgttttccttttccccgggcaagagccccgctcccttcaactgacagaaattcactggggcaggggggcgagtggggagagaggtcgctcagggctcgctactggctgcgcctcccccggctctggtctgggaagcggctctgggccctccgggcgagcagcttgggcgccggcgccccctgcgaggaagatcgcggggtgacggtcggtacccgttcggctgggccgcgctgccgctccgatccacctcccttccgcgcccgcgccctcccccttcctttcactaggagtccgggattcggagagggcgcgggaggcaggcacacgggcccgaccccactccagcgctcaccggggacgcgggcgggcggcgacgggacgcggcgggggcgcggggcgggcgcggccatggagcagcagcggcggcggcggcggcggcggcggcaacactagcgaccgcgggcggacgagcgggcgggcagggccgccgggctcagcggaccgaactgcacagctcagcaaaagcgccctcgccctccgcgcgccgcctcctgcgagcccaaacccaccaacattttttaacgctccaacccatcctttgaagaaaagcaaaaaaaaaaaaaaaaaaaaaaaaaaaagcaaaaaaagaaaaagcattgatcggagagacggggatatatatatatatatatatatatatatatatataaaattttttttggctcctgctaaaattagcagggctcgccgcgcgcctgtgtgccagtgtgtgcgagtgtgtgtgcgtgcgggcgtgtgtgtgtgaatgtgattactccaggactcctcgggctccggagacgccattttcccccttgatatctctctccataaatcggtggcgcggcggaggcggcagagtcgggcgggaagcgcggggccggccggggcgcccgccgctcgccgccgcctccgcgcgcccgggggccccggcgccccccgagctagggcggccagctcgcggctcgccgtttgacagatgctcatcgccatggagttgccgcagcagcacctttgggggctcgggcgagcgacgggagccgggatctgagcgagcgccggggccagcggagccggagccgccgggacatgggtgagcacgcgcggcgaccttggcccgggagcccgggcgcccagcctccctccgcgccgcgggcccccgcactcccggaaccgggggcgacgtgtgtgccctgcatgcaaaagttcacgtcgccttgctgggtctttgactttgcacccggcgggaagggggagaccgggccgagggggcgggatgccggtccgggcgaggttgcaggagatgggcgcgattccggcgggccggcgggtgggcggcgatgctggctcaattggagtggctcgttggtggcggcg

SEQ ID NO: 8548 - DNA, 34 bp, Homo sapiens
cgcgtcgcccgctcccgctccccccgcctccccg

SEQ ID NO: 8549 - DNA, 14 bp, Homo sapiens
cggcgaggggctcg

SEQ ID NO: 8550 - DNA, 37 bp, Homo sapiens
cgtggcgcgcccactccacggtgctgaagagcagccg

SEQ ID NO: 8551 - DNA, 34 bp, Homo sapiens
cgggatttgtccgcttctttgtctttggctgccg

SEQ ID NO: 8552 - DNA, 538 bp, Homo sapiens
cgcggggccacctcaccgcgagctcctcccgcagcccggcccgggtcacctcgactcgccaggcttaactcaataaccacaacaccggaaaaggaagcaaaggtcgaagttcatccgcggccctgaggcctgtgggaaacgtagtccaacaacgaaagagccctgaagctcaagcggagcccgctggccgcaggggccgcaccacgccccagaccctggagtttccgggtgcgcagacccttgccatcagcagaggctgccgctgcgcgtcccctaggcgcggaagaggcggctggtggtccctgacggcaaggtgaagtcgaggcagtaatcgggaacccaggttgggaggacagaatggggaacaggaagctggggcgagggtggtcttgggggaggtggggggccgcggaattctaggtggcccctgcctcacctctggaaagaaccggaagcccgggccggggagggtgaagggagtcgcggacccggctgctcagccgaggaggaaacccggaccccaggctgagggaggccg

SEQ ID NO: 8553 - DNA, 109 bp, Homo sapiens
cggcgtccggagcgctggactacatttcccagaggcaccgctcccggagcgtagcttcatttccgttagtttgcgagatttggaggcctcgcgtggggagagggccgcg

SEQ ID NO: 8554 - DNA, 901 bp, Homo sapiens
cgcgcggggctccggggccggccctccctcgccgggcgcctcgggctcgccgcccgggttctccgcggacagcggccggtcgcgcaggcccacggcgcgcaccaggccgcccgccagctcttccagctcctccggccgcagcgccccgagccgcgcggcgccgcggaacgcgcccagggcttcggggaggcggccggcgcgggccagcgcgtcccccagcctcaggcacaggccgcggtccggctgcgccagcccggctagcatggagcgaaagagctcggctgccatctcgtagtcgcccgcgcggaaggcctcgtcgccctcctctaagcgctgggcgatcggctccgcgcggtcgcagccaggacactggggcggcggcggcggcgggaccggctcggggctcatcaccgcggggctgcgacgacgcgggtccggagcgaaggcgcggagcagggaggatgcgctgctgctgggaactggccggcgggagcgcggtctcagccctcgccagcagccacgcgcgtctgggggcggcgcgctgcgagcggctgagaccgcgggcgggggcgggcgcctggcttgggcagcgtcctcagcgcggtgtgggcggcgagccccgcagggctgcaatcgttccggggtgggggccgggacaggcaccgcgggcgcaatctgagcccctgcccacgcgcagcggcctctcagtcccgccggcttaggtaacccaggtcgctgcggtaacgcagtgaccgcgctccaggtccgcgtctcttgcgatgcttcccccactcgcctgagggctcctgcgcgactgcgcgcgcgtcctctgcctgccgcctccccgcagaggtgccggggccctgggagcaggtggccttggccgcgggctgctggcgcg

SEQ ID NO: 8555 - DNA, 15 bp, Homo sapiens
cgggcggcgcgggcg

SEQ ID NO: 8556 - DNA, 383 bp, Homo sapiens
cgggacatccccgaaggcggcgcgctggaggcggggagcggccggggcgcacggagagggcggggagcccgcgggagggggaggagggggaggagggggaggaggcgcgaggtgggggggagcgcggcgggcggcagggagggagcgggagggaggcaagaaagtagcagaaagtgaggctggcaggcggcggcaaaggagccggcgcgcggcggcggcaggaagtctgtgcccgagaacagcagaaataagagccagggagggaccgcggccgcggcggcggcggcgagagcgaaagaggaaactgcagaggaggaagctgcgccgcagcccgagccgcccggcatccccgccgcctctgcgcccgcgccgcgcccccggcg

SEQ ID NO: 8557 - DNA, 4 bp, Homo sapiens
cgcg

SEQ ID NO: 8558 - DNA, 624 bp, Homo sapiens
cgcggaggtgggcgagcgggcgtgcgcgcactcacttgccggcgcgagggagtgtcgggggggaagggagtggtctccaaaagggggaggggagaaggcagggggcggggagaagccggccctttaggacccggctgcggcggcgagggaggaggaagaagcggaggaggcggctcccgcgctcgcagggccgtgccacctgcccgcccgcccgctcgctcgctcgcccgccgcgccgcgctgccgaccgccagcatgctgccgagagtgggctgccccgcgctgccgctgccgccgccgccgctgctgccgctgctgctgctgctactgggcgcgagtggcggcggcggcggggcgcgcgcggaggtgctgttccgctgcccgccctgcacacccgagcgcctggccgcctgcgggcccccgccggttgcgccgcccgccgcggtggccgcagtggccggaggcgcccgcatgccatgcgcggagctcgtccgggagccgggctgcggctgctgctcggtgtgcgcccggctggagggcgaggcgtgcggcgtctacaccccgcgctgcggccaggggctgcgctgctatccccacccgggctccgagctgcccctgcaggcg

SEQ ID NO: 8559 - DNA, 94 bp, Homo sapiens
cgagatagccagcgagttcaggcggtccttgcagcgctgggagaggaatgtgcgcgaaatcaaccagagcgaaatcagccggaggagccggccg

SEQ ID NO: 8560 - DNA, 63 bp, Homo sapiens
cgtgcagggcgcagagctgggccgagccgtcgccggcgccacgcgagtcccgcagccgccgcg

SEQ ID NO: 8561 - DNA, 41 bp, Homo sapiens
cgccgcggcttctggggtccccgccctcttgtccgccatcg

SEQ ID NO: 8562 - DNA, 1041 bp, Homo sapiens
cgcgcagggaccgggccgggtagagtcgggcggggtggagaggcaagcggagcgcgcggtggggctgaggggaggcgtggggcgagtgcccgttgctcgctctctagctctcttgctcttacgctctctcgctcgcagccgctcgcagctcggcggtgcagctgtgctggatccggcggcgccgcagccttttatcgcctcctgatgtcactggggtgcgggggcccgggcggcccggtgcgcgggccaatagctgcacggcctccgcggcccagcggcgcagggcggggcgcgcctgacagctcccccgccccccgcgtcagctgactggcggcccgagcggccccggagcggcggaggcctggcggagcgctggagcggagtgggacggccagcctgggcccacccccgtaccctgcaggtcccggcccacgcacgctcgcctggagtgcgcgccccacctctaggccaaatcaccgctttcccctcctcgcgcactctcctccctcagttccctttgcaccccacccccatcccgtgtcacccccaaggaggctcagaatgagcgccgggacaacgcctcctgggccctttgttcccaagcggcccccgcccagtgggcgacgctctgtgtgtcctcgcggcttctggccgtgtgtgtcgtgcgttcctgtttctggagatctgcgcgtatttgtatgttggggagggcgggctcgaggctccgagagttgtgttcagacccaactcttaacctcaggggacctttctcaggccaagcgagggcccctcctggcgggtgcagtcgcagagccctgaggttcgactccactggccccgccgctccccgcgttcaccccaccgcacaatgttcacagtgaaggcgacgggaaaagcagcagcccaaaggctctgaattcctcttccccgccacacgcacggaatcctgagcccccggagcctcggggccgaggccggcccgggacggtgctccgagtagctctccactgctggggagccggccctgtttttgtttgaacg

SEQ ID NO: 8563 - DNA, 23 bp, Homo sapiens
cgccttcggctcgggccatggcg

SEQ ID NO: 8564 - DNA, 515 bp, Homo sapiens
cgcagcagaataccctgacccaaaataaaaatactatgacaaaaatactccaggaggcagccggctttacttcgtttaaagccggatttcgcttagtcccgtgaaagcgaaggagcaccagcgcttcctgattccgcacagttctctcggcagagacggcccgtcctctccaagaaccggaagccggacagcgtcaggacgttttattcttctcacctgggattcagagaggcagcggccaaggacagggcccccgccgaggccaccgggcagcgtccaggtctcggcctttgggaggggagcagcgggggaggggcacggggaggggcgagggcggggcgcgcctgggcctcggcgctgggctcctcctctgcccgctccgggggacacccacaggattcttgcagacctctgccgaggcaggatggaggcctgcagggatgcaccgcgggcccgcgacccgggcggccggaacatagttctttctggccggagatcggcccggtcgtgagtcg

SEQ ID NO: 8565 - DNA, 1017 bp, Homo sapiens
cgggccaggtctgcggaggacgcccccgggcgcgcacacacagcccgaggacgcgccctgtattttaagacgcagggtcggatttcaccccgaaacttggctcccacagccccaggccgaactgtgtctggttctcagcccccgagcccgagttctacgccgcaaagagatggggccccattgtgcctagctggcctcctagcacggacgtgtattttcttttggtctgtcttttgctaaaaaccggcagtgcgcttcgcctccctgcccagccgcagcctgccgtcccctagacaaaaagcggcgaccgcggcccggccacccgagccccgccgcgctgcgcctttgttgggcggtccacagatggtgcccagcacggggccgcgccgagggcgggggcgggaggccgcgaagagggtcgggcgggaggggaggagacggcggagcagccaatccgcgcgcggcccatcagctgaccgcctttgcttacaccaggtgcacgccggctgcggggagcacaaagcggggcgcaccgcgggcgccggcaacgagccggtgaacgaggcgaggcccgtgcgcccgcggctgcaagcgcccgcctggcggggagaggggccgacggcgtcagcccgggcggcggcatccctaggcgcctggggcgccttcctccggacctggccgctcgctgccccgccctctgcaccccacttctccgaccctccttcccagtcctgcctccccctgccctggcctctgagagccgactgagcccagccccgtgcagcagcggttgcctgtgtcgccgcctagtctccggtcttggtgctctcccgggggtgccccaaggagccagtgcgcgctgcgggctgggaaggaggcgccgctcagctagtcctcctcctcctcctcgtctttctcctcctcctgctgctgctgccgccgccgccgccgtgggtgccgggtccgcgcgcaccccaacacccccaccagctgggcctcggggtaagtccctggccg

SEQ ID NO: 8566 - DNA, 8 bp, Homo sapiens
cgcgctcg

SEQ ID NO: 8567 - DNA, 54 bp, Homo sapiens
cgagcgcaggcgggcggagagcagaccacgcggaagaggccgagagagaaagcg

SEQ ID NO: 8568 - DNA, 10 bp, Homo sapiens
cgcgttgtcg

SEQ ID NO: 8569 - DNA, 26 bp, Homo sapiens
cgggcaggttcgaccaggcggccgcg

SEQ ID NO: 8570 - DNA, 934 bp, Homo sapiens
cgaatcccggcggccgccgcgctttcccgcttcgcggagaccgacgcaggcgcccgcccccgaggccgaagggcactgggcggcgagggctgcggtagctggcgactccgggggcgtctgcgcggcgcgcgctagacgaggctgccccggcggccaccccgcgaccccgcgtcgccgggatttgcgcgcggagaacgccggttctggagggagcacgcctccccaaagtgcagaggagggtccggcggcgcgtctccgcggaaaccctctccactgtagttaccccggatgccgacttagtagtttgttttccgagaaaagagaggggatctgggcagaagggccccgtttgccccaaaagaaggtgcaaggatcagaagataacgaaacgtccacttcctgaagggtgggaaaaaaagaaaaagaaaaaggagccacccacgctggagatgtccgttttagatcttcttattttcttccctttcgcttcggtttttcttctcgaggctcatttaatctgctagagaaggaggaggagcagaagatgggggccgaggaggaggggaagagaaagagaagtttgccaagaataaagtttttgccggcaagcgcggggactccgcagtggagggcactgcggagtctcggggagtcacagcgggggcctcgggcccaaatgcctctgcccggagctcgagccgacacacacactcagtccgacccctctttgttcccggctcgagtttctcagcctggctcgccggctcgccgctctgcacgcctccgccggccagctctgtcaaagcaaagagctgcgccccttgagttcgcccggccgaggggaggggacgccccgagcttggccgcgtgcgaggctccgggcgcgtcctggttcctcggcccgagagcgcgcagcccgggtccctcctccgcg

SEQ ID NO: 8571 - DNA, 279 bp, Homo sapiens
cgcggggtaaggaatccgcgggcagttacctccgccaggggcagggtccggccagtcaggcgcgagaaggctaggcgaggccgactgcgcggggtgaagacgccaggccgacagctgcgggccctaccgccagccctgacgcgagcctgcgtcctggcgacggcggagggcgggcagggggcgcgggcgctgccacggcgcctgctcagaaccggccgggaacgccgcgggcgggtctccccggtcctccgcccctccagccctgctctcaggcctccg

SEQ ID NO: 8572 - DNA, 2 bp, Homo sapiens
cg

SEQ ID NO: 8573 - DNA, 9 bp, Homo sapiens
cgccccgcg

SEQ ID NO: 8574 - DNA, 11 bp, Homo sapiens
cgagcgcatcg

SEQ ID NO: 8575 - DNA, 30 bp, Homo sapiens
cgcttgtaatctcagctactcaggaggccg

SEQ ID NO: 8576 - DNA, 10 bp, Homo sapiens
cgctcccgcg

SEQ ID NO: 8577 - DNA, 56 bp, Homo sapiens
cggcgtctgatgagcggcgggcccggacacgaggggacggggccgatttgtgggcg

SEQ ID NO: 8578 - DNA, 98 bp, Homo sapiens
cggccagcagggcggggcaggaggctgggagagggacgggtgcgggggtgggggagaggaagggagcggtcacgtgtgaggggcggcccgaggtcacg

SEQ ID NO: 8579 - DNA, 33 bp, Homo sapiens
cgggaggacgcgcaggggcggccgccgccgtcg

SEQ ID NO: 8580 - DNA, 48 bp, Homo sapiens
cgtcccaccccctccaccacacacgcaccccccaccccaattccttcg

SEQ ID NO: 8581 - DNA, 93 bp, Homo sapiens
cgacctgccccggccgcacccgcctccgctccagcacgcgacgctgcccggcgcgacccctgctcccccggcccagccccaccgctgccctcg

SEQ ID NO: 8582 - DNA, 2 bp, Homo sapiens
cg

SEQ ID NO: 8583 - DNA, 2 bp, Homo sapiens
cg

SEQ ID NO: 8584 - DNA, 2 bp, Homo sapiens
cg

SEQ ID NO: 8585 - DNA, 2 bp, Homo sapiens
cg

SEQ ID NO: 8586 - DNA, 2 bp, Homo sapiens
cg

SEQ ID NO: 8587 - DNA, 2 bp, Homo sapiens
cg

SEQ ID NO: 8588 - DNA, 2 bp, Homo sapiens
cg

SEQ ID NO: 8589 - DNA, 42 bp, Homo sapiens
cggagcgaggcgcgcgcccggccagagagcgagcgcgcaacg

SEQ ID NO: 8590 - DNA, 2 bp, Homo sapiens
cg

SEQ ID NO: 8591 - DNA, 2 bp, Homo sapiens
cg

SEQ ID NO: 8592 - DNA, 2 bp, Homo sapiens
cg

SEQ ID NO: 8593 - DNA, 2 bp, Homo sapiens
cg

SEQ ID NO: 8594 - DNA, 2 bp, Homo sapiens
cg

SEQ ID NO: 8595 - DNA, 2 bp, Homo sapiens
cg

SEQ ID NO: 8596 - DNA, 2 bp, Homo sapiens
cg

SEQ ID NO: 8597 - DNA, 2 bp, Homo sapiens
cg

SEQ ID NO: 8598 - DNA, 2 bp, Homo sapiens
cg

SEQ ID NO: 8599 - DNA, 2 bp, Homo sapiens
cg

SEQ ID NO: 8600 - DNA, 40 bp, Homo sapiens
cggcgcactggcgctgggagcagggccgcactccggcgcg

SEQ ID NO: 8601 - DNA, 2 bp, Homo sapiens
cg

SEQ ID NO: 8602 - DNA, 2 bp, Homo sapiens
cg

SEQ ID NO: 8603 - DNA, 2 bp, Homo sapiens
cg

SEQ ID NO: 8604 - DNA, 2 bp, Homo sapiens
cg

SEQ ID NO: 8605 - DNA, 2 bp, Homo sapiens
cg

SEQ ID NO: 8606 - DNA, 2 bp, Homo sapiens
cg

SEQ ID NO: 8607 - DNA, 2 bp, Homo sapiens
cg

SEQ ID NO: 8608 - DNA, 2 bp, Homo sapiens
cg

SEQ ID NO: 8609 - DNA, 2 bp, Homo sapiens
cg

SEQ ID NO: 8610 - DNA, 2 bp, Homo sapiens
cg

SEQ ID NO: 8611 - DNA, 2 bp, Homo sapiens
cg

SEQ ID NO: 8612 - DNA, 2 bp, Homo sapiens
cg

SEQ ID NO: 8613 - DNA, 2 bp, Homo sapiens
cg

SEQ ID NO: 8614 - DNA, 2 bp, Homo sapiens
cg

SEQ ID NO: 8615 - DNA, 2 bp, Homo sapiens
cg

SEQ ID NO: 8616 - DNA, 2 bp, Homo sapiens
cg

SEQ ID NO: 8617 - DNA, 2 bp, Homo sapiens
cg

SEQ ID NO: 8618 - DNA, 2 bp, Homo sapiens
cg

SEQ ID NO: 8619 - DNA, 2 bp, Homo sapiens
cg

SEQ ID NO: 8620 - DNA, 2 bp, Homo sapiens
cg

SEQ ID NO: 8621 - DNA, 2 bp, Homo sapiens
cg

SEQ ID NO: 8622 - DNA, 42 bp, Homo sapiens
cgggcgggcggcgttcggtctgagggagcggggcggtctccg

SEQ ID NO: 8623 - DNA, 2 bp, Homo sapiens
cg

SEQ ID NO: 8624 - DNA, 2 bp, Homo sapiens
cg

SEQ ID NO: 8625 - DNA, 2 bp, Homo sapiens
cg

SEQ ID NO: 8626 - DNA, 2 bp, Homo sapiens
cg

SEQ ID NO: 8627 - DNA, 2 bp, Homo sapiens
cg

SEQ ID NO: 8628 - DNA, 2 bp, Homo sapiens
cg

SEQ ID NO: 8629 - DNA, 2 bp, Homo sapiens
cg

SEQ ID NO: 8630 - DNA, 2 bp, Homo sapiens
cg

SEQ ID NO: 8631 - DNA, 2 bp, Homo sapiens
cg

SEQ ID NO: 8632 - DNA, 2 bp, Homo sapiens
cg

SEQ ID NO: 8633 - DNA, 20 bp, Homo sapiens
cgcccgccgcgcgcaccacg

SEQ ID NO: 8634 - DNA, 116 bp, Homo sapiens
cgagagcggggcggggttgggggcgggcggggagctgcctcgggtggcctcgcccccagcacggaggaccctccccgcgaggcgccgccgccctggagccccgcccacggcgctcg

SEQ ID NO: 8635 - DNA, 2 bp, Homo sapiens
cg

SEQ ID NO: 8636 - DNA, 2 bp, Homo sapiens
cg

SEQ ID NO: 8637 - DNA, 2 bp, Homo sapiens
cg

SEQ ID NO: 8638 - DNA, 2 bp, Homo sapiens
cg

SEQ ID NO: 8639 - DNA, 2 bp, Homo sapiens
cg

SEQ ID NO: 8640 - DNA, 2 bp, Homo sapiens
cg

SEQ ID NO: 8641 - DNA, 2 bp, Homo sapiens
cg

SEQ ID NO: 8642 - DNA, 2 bp, Homo sapiens
cg

SEQ ID NO: 8643 - DNA, 2 bp, Homo sapiens
cg

SEQ ID NO: 8644 - DNA, 2 bp, Homo sapiens
cg

SEQ ID NO: 8645 - DNA, 44 bp, Homo sapiens
cggggggcgcgtgaggggtgcgagcggggcccggggggcgcgcg

SEQ ID NO: 8646 - DNA, 2 bp, Homo sapiens
cg

SEQ ID NO: 8647 - DNA, 2 bp, Homo sapiens
cg

SEQ ID NO: 8648 - DNA, 2 bp, Homo sapiens
cg

SEQ ID NO: 8649 - DNA, 2 bp, Homo sapiens
cg

SEQ ID NO: 8650 - DNA, 2 bp, Homo sapiens
cg

SEQ ID NO: 8651 - DNA, 2 bp, Homo sapiens
cg

SEQ ID NO: 8652 - DNA, 2 bp, Homo sapiens
cg

SEQ ID NO: 8653 - DNA, 2 bp, Homo sapiens
cg

SEQ ID NO: 8654 - DNA, 2 bp, Homo sapiens
cg

SEQ ID NO: 8655 - DNA, 2 bp, Homo sapiens
cg

SEQ ID NO: 8656 - DNA, 34 bp, Homo sapiens
cgcagcccgaccttctagagccgccgagcagacg

SEQ ID NO: 8657 - DNA, 2 bp, Homo sapiens
cg

SEQ ID NO: 8658 - DNA, 2 bp, Homo sapiens
cg

SEQ ID NO: 8659 - DNA, 2 bp, Homo sapiens
cg

SEQ ID NO: 8660 - DNA, 2 bp, Homo sapiens
cg

SEQ ID NO: 8661 - DNA, 2 bp, Homo sapiens
cg

SEQ ID NO: 8662 - DNA, 2 bp, Homo sapiens
cg

SEQ ID NO: 8663 - DNA, 2 bp, Homo sapiens
cg

SEQ ID NO: 8664 - DNA, 2 bp, Homo sapiens
cg

SEQ ID NO: 8665 - DNA, 2 bp, Homo sapiens
cg

SEQ ID NO: 8666 - DNA, 2 bp, Homo sapiens
cg

SEQ ID NO: 8667 - DNA, 211 bp, Homo sapiens
cgaccccggcgggtgcaccgccgagccccccgggaagtgtagttccagcgcgagcgggacgctgggaaatgtagttctgcgcgttcacgtccccgatcgggccgtgtccgccgcggccctgcgaggtccgaggggtaagggagcgtgcagcgggggcgggaccacgaggcggcggggctgggggcggcctctgtgtctgcgccggggatcg

SEQ ID NO: 8668 - DNA, 2 bp, Homo sapiens
cg

SEQ ID NO: 8669 - DNA, 2 bp, Homo sapiens
cg

SEQ ID NO: 8670 - DNA, 2 bp, Homo sapiens
cg

SEQ ID NO: 8671 - DNA, 2 bp, Homo sapiens
cg

SEQ ID NO: 8672 - DNA, 2 bp, Homo sapiens
cg

SEQ ID NO: 8673 - DNA, 2 bp, Homo sapiens
cg

SEQ ID NO: 8674 - DNA, 2 bp, Homo sapiens
cg

SEQ ID NO: 8675 - DNA, 2 bp, Homo sapiens
cg

SEQ ID NO: 8676 - DNA, 2 bp, Homo sapiens
cg

SEQ ID NO: 8677 - DNA, 2 bp, Homo sapiens
cg

SEQ ID NO: 8678 - DNA, 95 bp, Homo sapiens
cggaagctcaagcccaattaattgagtccgaggcgggagggaagggccctgcgcgccgtggcccgccccgcccctcttccgcgccccttttcccg

SEQ ID NO: 8679 - DNA, 2 bp, Homo sapiens
cg

SEQ ID NO: 8680 - DNA, 2 bp, Homo sapiens
cg

SEQ ID NO: 8681 - DNA, 2 bp, Homo sapiens
cg

SEQ ID NO: 8682 - DNA, 2 bp, Homo sapiens
cg

SEQ ID NO: 8683 - DNA, 2 bp, Homo sapiens
cg

SEQ ID NO: 8684 - DNA, 2 bp, Homo sapiens
cg

SEQ ID NO: 8685 - DNA, 2 bp, Homo sapiens
cg

SEQ ID NO: 8686 - DNA, 2 bp, Homo sapiens
cg

SEQ ID NO: 8687 - DNA, 2 bp, Homo sapiens
cg

SEQ ID NO: 8688 - DNA, 2 bp, Homo sapiens
cg

SEQ ID NO: 8689 - DNA, 264 bp, Homo sapiens
cggcggcgtggaccggcgacgggtggcacagctggcatacgcggtccctccacaggtggcggtagacggcggccgggacggcgagcaacagggcggccagccagaccgccagcagcaggcggcgggccagggccgggctgcgcagccgaggcgccaggaaggggcgggtgactgcgaggcagcgctgcaggctgagcaggccggtgagcagcacgctggcgtacatgctgagcgcgcacacgtagtacaccgccttgcagcccg

SEQ ID NO: 8690 - DNA, 2 bp, Homo sapiens
cg

SEQ ID NO: 8691 - DNA, 2 bp, Homo sapiens
cg

SEQ ID NO: 8692 - DNA, 2 bp, Homo sapiens
cg

SEQ ID NO: 8693 - DNA, 2 bp, Homo sapiens
cg

SEQ ID NO: 8694 - DNA, 2 bp, Homo sapiens
cg

SEQ ID NO: 8695 - DNA, 2 bp, Homo sapiens
cg

SEQ ID NO: 8696 - DNA, 2 bp, Homo sapiens
cg

SEQ ID NO: 8697 - DNA, 2 bp, Homo sapiens
cg

SEQ ID NO: 8698 - DNA, 2 bp, Homo sapiens
cg

SEQ ID NO: 8699 - DNA, 2 bp, Homo sapiens
cg

SEQ ID NO: 8700 - DNA, 59 bp, Homo sapiens
cgcgcgcgggcgccccggcgtgtcggatcatgccgccggcagctccgggacggggaacg

SEQ ID NO: 8701 - DNA, 2 bp, Homo sapiens
cg

SEQ ID NO: 8702 - DNA, 2 bp, Homo sapiens
cg

SEQ ID NO: 8703 - DNA, 2 bp, Homo sapiens
cg

SEQ ID NO: 8704 - DNA, 2 bp, Homo sapiens
cg

SEQ ID NO: 8705 - DNA, 2 bp, Homo sapiens
cg

SEQ ID NO: 8706 - DNA, 2 bp, Homo sapiens
cg

SEQ ID NO: 8707 - DNA, 2 bp, Homo sapiens
cg

SEQ ID NO: 8708 - DNA, 2 bp, Homo sapiens
cg

SEQ ID NO: 8709 - DNA, 2 bp, Homo sapiens
cg

SEQ ID NO: 8710 - DNA, 2 bp, Homo sapiens
cg

SEQ ID NO: 8711 - DNA, 4 bp, Homo sapiens
cgcg

SEQ ID NO: 8712 - DNA, 2 bp, Homo sapiens
cg

SEQ ID NO: 8713 - DNA, 2 bp, Homo sapiens
cg

SEQ ID NO: 8714 - DNA, 2 bp, Homo sapiens
cg

SEQ ID NO: 8715 - DNA, 2 bp, Homo sapiens
cg

SEQ ID NO: 8716 - DNA, 2 bp, Homo sapiens
cg

SEQ ID NO: 8717 - DNA, 2 bp, Homo sapiens
cg

SEQ ID NO: 8718 - DNA, 2 bp, Homo sapiens
cg

SEQ ID NO: 8719 - DNA, 2 bp, Homo sapiens
cg

SEQ ID NO: 8720 - DNA, 2 bp, Homo sapiens
cg

SEQ ID NO: 8721 - DNA, 2 bp, Homo sapiens
cg

SEQ ID NO: 8722 - DNA, 324 bp, Homo sapiens
cgccagacagccagcggccggcggcaggccgggccatgagcggcaggggccgggccgggcctcgctgaccctggctccgcgcggcagcttccccagtttccgctccggtctctcggcatgagagtccgcccgggcccggggctgcggctgccccagacccgccgcacgctggcgcgctccgggcccgcggagccgcggtgctgatacctgcgccgcactgcgccgcccgcccgtccgctgtgtgccccgggggcgcggccatggaggtggtgggtgacttcgagtacagcaagagggatctcgtgggacacggggccttcgccg

SEQ ID NO: 8723 - DNA, 2 bp, Homo sapiens
cg

SEQ ID NO: 8724 - DNA, 2 bp, Homo sapiens
cg

SEQ ID NO: 8725 - DNA, 2 bp, Homo sapiens
cg

SEQ ID NO: 8726 - DNA, 2 bp, Homo sapiens
cg

SEQ ID NO: 8727 - DNA, 2 bp, Homo sapiens
cg

SEQ ID NO: 8728 - DNA, 2 bp, Homo sapiens
cg

SEQ ID NO: 8729 - DNA, 2 bp, Homo sapiens
cg

SEQ ID NO: 8730 - DNA, 102 bp, Homo sapiens
cgccagctccaggccgagccccgagcgcctgcaggaacacgccccttcacccggcgcgggacgcagagctgcgagagaatcttgttcagcgcggactcaacg

SEQ ID NO: 8731 - DNA, 24 bp, Homo sapiens
cgtgggcggcagcgagtcgttgcg

SEQ ID NO: 8732 - DNA, 521 bp, Homo sapiens
cgcaccggcctccctgtctcgcactggctgctccgcccgcctgtcaaggccaggcctggggggctggggcccgagtggccgctgggggacagtcctgggcacacgaccggagcgcccccctcctccccgcctggcccgcgcccaggggacggcgagagacgcggcctcagcccctccccccgggcgccccgctgcggccagatgtgggcggatgtggaggccgggccatggcgaggagggcgggcgcccagaggggaagagattcctccccttccccgggcgcagggtccttctgcaggaggctgtatttgggcagccaaacaaagttctctgtcaccgccgccgcgcgctctgcgcctgcaagggttaaacggcagcgcacgcggctggcaggcaggatcccggcctgtgggctcaagagccgaggggcgcagggcgaacatgcgagtcccatggcaccagcgagaggccaccaactcccacccaccgagggcacccctgcagctaacacccccaccacg

SEQ ID NO: 8733 - DNA, 1484 bp, Homo sapiens
cgccgccaccaacgagccactccaattgagccagcatcgccgcccacccgccggcccgccggaatcgcgcccatctcctgcaacctcgcccggaccggcatcccgccccctcggcccggtctcccccttcccgccgggtgcaaagtcaaagacccagcaaggcgacgtgaacttttgcatgcagggcacacacgtcgcccccggttccgggagtgcgggggcccgcggcgcggagggaggctgggcgcccgggctcccgggccaaggtcgccgcgcgtgctcacccatgtcccggcggctccggctccgctggccccggcgctcgctcagatcccggctcccgtcgctcgcccgagcccccaaaggtgctgctgcggcaactccatggcgatgagcatctgtcaaacggcgagccgcgagctggccgccctagctcggggggcgccggggcccccgggcgcgcggaggcggcggcgagcggcgggcgccccggccggccccgcgcttcccgcccgactctgccgcctccgccgcgccaccgatttatggagagagatatcaagggggaaaatggcgtctccggagcccgaggagtcctggagtaatcacattcacacacacacgcccgcacgcacacacactcgcacacactggcacacaggcgcgcggcgagccctgctaattttagcaggagccaaaaaaaattttatatatatatatatatatatatatatatatatatccccgtctctccgatcaatgctttttctttttttgcttttttttttttttttttttttttttttgcttttcttcaaaggatgggttggagcgttaaaaaatgttggtgggtttgggctcgcaggaggcggcgcgcggagggcgagggcgcttttgctgagctgtgcagttcggtccgctgagcccggcggccctgcccgcccgctcgtccgcccgcggtcgctagtgttgccgccgccgccgccgccgccgccgctgctgctccatggccgcgcccgccccgcgcccccgccgcgtcccgtcgccgcccgcccgcgtccccggtgagcgctggagtggggtcgggcccgtgtgcctgcctcccgcgccctctccgaatcccggactcctagtgaaaggaagggggagggcgcgggcgcggaagggaggtggatcggagcggcagcgcggcccagccgaacgggtaccgaccgtcaccccgcgatcttcctcgcagggggcgccggcgcccaagctgctcgcccggagggcccagagccgcttcccagaccagagccgggggaggcgcagccagtagcgagccctgagcgacctctctccccactcgcccccctgccccagtgaatttctgtcagttgaagggagcggggctcttgcccggggaaaaggaaaacagttcgtggcctgggatctgggaccccttgccgcccccagcgcccctcccgctccccggcgcccttgcg

SEQ ID NO: 8734 - DNA, 34 bp, Homo sapiens
cggggaggcggggggagcgggagcgggcgacgcg

SEQ ID NO: 8735 - DNA, 14 bp, Homo sapiens
cgagcccctcgccg

SEQ ID NO: 8736 - DNA, 37 bp, Homo sapiens
cggctgctcttcagcaccgtggagtgggcgcgccacg

SEQ ID NO: 8737 - DNA, 34 bp, Homo sapiens
cggcagccaaagacaaagaagcggacaaatcccg

SEQ ID NO: 8738 - DNA, 538 bp, Homo sapiens
cggcctccctcagcctggggtccgggtttcctcctcggctgagcagccgggtccgcgactcccttcaccctccccggcccgggcttccggttctttccagaggtgaggcaggggccacctagaattccgcggccccccacctcccccaagaccaccctcgccccagcttcctgttccccattctgtcctcccaacctgggttcccgattactgcctcgacttcaccttgccgtcagggaccaccagccgcctcttccgcgcctaggggacgcgcagcggcagcctctgctgatggcaagggtctgcgcacccggaaactccagggtctggggcgtggtgcggcccctgcggccagcgggctccgcttgagcttcagggctctttcgttgttggactacgtttcccacaggcctcagggccgcggatgaacttcgacctttgcttccttttccggtgttgtggttattgagttaagcctggcgagtcgaggtgacccgggccgggctgcgggaggagctcgcggtgaggtggccccgcg

SEQ ID NO: 8739 - DNA, 109 bp, Homo sapiens
cgcggccctctccccacgcgaggcctccaaatctcgcaaactaacggaaatgaagctacgctccgggagcggtgcctctgggaaatgtagtccagcgctccggacgccg

SEQ ID NO: 8740 - DNA, 901 bp, Homo sapiens
cgcgccagcagcccgcggccaaggccacctgctcccagggccccggcacctctgcggggaggcggcaggcagaggacgcgcgcgcagtcgcgcaggagccctcaggcgagtgggggaagcatcgcaagagacgcggacctggagcgcggtcactgcgttaccgcagcgacctgggttacctaagccggcgggactgagaggccgctgcgcgtgggcaggggctcagattgcgcccgcggtgcctgtcccggcccccaccccggaacgattgcagccctgcggggctcgccgcccacaccgcgctgaggacgctgcccaagccaggcgcccgcccccgcccgcggtctcagccgctcgcagcgcgccgcccccagacgcgcgtggctgctggcgagggctgagaccgcgctcccgccggccagttcccagcagcagcgcatcctccctgctccgcgccttcgctccggacccgcgtcgtcgcagccccgcggtgatgagccccgagccggtcccgccgccgccgccgccccagtgtcctggctgcgaccgcgcggagccgatcgcccagcgcttagaggagggcgacgaggccttccgcgcgggcgactacgagatggcagccgagctctttcgctccatgctagccgggctggcgcagccggaccgcggcctgtgcctgaggctgggggacgcgctggcccgcgccggccgcctccccgaagccctgggcgcgttccgcggcgccgcgcggctcggggcgctgcggccggaggagctggaagagctggcgggcggcctggtgcgcgccgtgggcctgcgcgaccggccgctgtccgcggagaacccgggcggcgagcccgaggcgcccggcgagggagggccggccccggagccccgcgcg

SEQ ID NO: 8741 - DNA, 15 bp, Homo sapiens
cgcccgcgccgcccg

SEQ ID NO: 8742 - DNA, 383 bp, Homo sapiens
cgccgggggcgcggcgcgggcgcagaggcggcggggatgccgggcggctcgggctgcggcgcagcttcctcctctgcagtttcctctttcgctctcgccgccgccgccgcggccgcggtccctccctggctcttatttctgctgttctcgggcacagacttcctgccgccgccgcgcgccggctcctttgccgccgcctgccagcctcactttctgctactttcttgcctccctcccgctccctccctgccgcccgccgcgctcccccccacctcgcgcctcctccccctcctccccctcctccccctcccgcgggctccccgccctctccgtgcgccccggccgctccccgcctccagcgcgccgccttcggggatgtcccg

SEQ ID NO: 8743 - DNA, 4 bp, Homo sapiens
cgcg

SEQ ID NO: 8744 - DNA, 624 bp, Homo sapiens
cgcctgcaggggcagctcggagcccgggtggggatagcagcgcagcccctggccgcagcgcggggtgtagacgccgcacgcctcgccctccagccgggcgcacaccgagcagcagccgcagcccggctcccggacgagctccgcgcatggcatgcgggcgcctccggccactgcggccaccgcggcgggcggcgcaaccggcgggggcccgcaggcggccaggcgctcgggtgtgcagggcgggcagcggaacagcacctccgcgcgcgccccgccgccgccgccactcgcgcccagtagcagcagcagcagcggcagcagcggcggcggcggcagcggcagcgcggggcagcccactctcggcagcatgctggcggtcggcagcgcggcgcggcgggcgagcgagcgagcgggcgggcgggcaggtggcacggccctgcgagcgcgggagccgcctcctccgcttcttcctcctccctcgccgccgcagccgggtcctaaagggccggcttctccccgccccctgccttctcccctcccccttttggagaccactcccttcccccccgacactccctcgcgccggcaagtgagtgcgcgcacgcccgctcgcccacctccgcg

SEQ ID NO: 8745 - DNA, 94 bp, Homo sapiens
cggccggctcctccggctgatttcgctctggttgatttcgcgcacattcctctcccagcgctgcaaggaccgcctgaactcgctggctatctcg

SEQ ID NO: 8746 - DNA, 63 bp, Homo sapiens
cgcggcggctgcgggactcgcgtggcgccggcgacggctcggcccagctctgcgccctgcacg

SEQ ID NO: 8747 - DNA, 41 bp, Homo sapiens
cgatggcggacaagagggcggggaccccagaagccgcggcg

SEQ ID NO: 8748 - DNA, 1041 bp, Homo sapiens
cgttcaaacaaaaacagggccggctccccagcagtggagagctactcggagcaccgtcccgggccggcctcggccccgaggctccgggggctcaggattccgtgcgtgtggcggggaagaggaattcagagcctttgggctgctgcttttcccgtcgccttcactgtgaacattgtgcggtggggtgaacgcggggagcggcggggccagtggagtcgaacctcagggctctgcgactgcacccgccaggaggggccctcgcttggcctgagaaaggtcccctgaggttaagagttgggtctgaacacaactctcggagcctcgagcccgccctccccaacatacaaatacgcgcagatctccagaaacaggaacgcacgacacacacggccagaagccgcgaggacacacagagcgtcgcccactgggcgggggccgcttgggaacaaagggcccaggaggcgttgtcccggcgctcattctgagcctccttgggggtgacacgggatgggggtggggtgcaaagggaactgagggaggagagtgcgcgaggaggggaaagcggtgatttggcctagaggtggggcgcgcactccaggcgagcgtgcgtgggccgggacctgcagggtacgggggtgggcccaggctggccgtcccactccgctccagcgctccgccaggcctccgccgctccggggccgctcgggccgccagtcagctgacgcggggggcgggggagctgtcaggcgcgccccgccctgcgccgctgggccgcggaggccgtgcagctattggcccgcgcaccgggccgcccgggcccccgcaccccagtgacatcaggaggcgataaaaggctgcggcgccgccggatccagcacagctgcaccgccgagctgcgagcggctgcgagcgagagagcgtaagagcaagagagctagagagcgagcaacgggcactcgccccacgcctcccctcagccccaccgcgcgctccgcttgcctctccaccccgcccgactctacccggcccggtccctgcgcg

SEQ ID NO: 8749 - DNA, 23 bp, Homo sapiens
cgccatggcccgagccgaaggcg

SEQ ID NO: 8750 - DNA, 515 bp, Homo sapiens
cgactcacgaccgggccgatctccggccagaaagaactatgttccggccgcccgggtcgcgggcccgcggtgcatccctgcaggcctccatcctgcctcggcagaggtctgcaagaatcctgtgggtgtcccccggagcgggcagaggaggagcccagcgccgaggcccaggcgcgccccgccctcgcccctccccgtgcccctcccccgctgctcccctcccaaaggccgagacctggacgctgcccggtggcctcggcgggggccctgtccttggccgctgcctctctgaatcccaggtgagaagaataaaacgtcctgacgctgtccggcttccggttcttggagaggacgggccgtctctgccgagagaactgtgcggaatcaggaagcgctggtgctccttcgctttcacgggactaagcgaaatccggctttaaacgaagtaaagccggctgcctcctggagtatttttgtcatagtatttttattttgggtcagggtattctgctgcg

SEQ ID NO: 8751 - DNA, 1017 bp, Homo sapiens
cggccagggacttaccccgaggcccagctggtgggggtgttggggtgcgcgcggacccggcacccacggcggcggcggcggcagcagcagcaggaggaggagaaagacgaggaggaggaggaggactagctgagcggcgcctccttcccagcccgcagcgcgcactggctccttggggcacccccgggagagcaccaagaccggagactaggcggcgacacaggcaaccgctgctgcacggggctgggctcagtcggctctcagaggccagggcagggggaggcaggactgggaaggagggtcggagaagtggggtgcagagggcggggcagcgagcggccaggtccggaggaaggcgccccaggcgcctagggatgccgccgcccgggctgacgccgtcggcccctctccccgccaggcgggcgcttgcagccgcgggcgcacgggcctcgcctcgttcaccggctcgttgccggcgcccgcggtgcgccccgctttgtgctccccgcagccggcgtgcacctggtgtaagcaaaggcggtcagctgatgggccgcgcgcggattggctgctccgccgtctcctcccctcccgcccgaccctcttcgcggcctcccgcccccgccctcggcgcggccccgtgctgggcaccatctgtggaccgcccaacaaaggcgcagcgcggcggggctcgggtggccgggccgcggtcgccgctttttgtctaggggacggcaggctgcggctgggcagggaggcgaagcgcactgccggtttttagcaaaagacagaccaaaagaaaatacacgtccgtgctaggaggccagctaggcacaatggggccccatctctttgcggcgtagaactcgggctcgggggctgagaaccagacacagttcggcctggggctgtgggagccaagtttcggggtgaaatccgaccctgcgtcttaaaatacagggcgcgtcctcgggctgtgtgtgcgcgcccgggggcgtcctccgcagacctggcccg

SEQ ID NO: 8752 - DNA, 8 bp, Homo sapiens
cgagcgcg

SEQ ID NO: 8753 - DNA, 54 bp, Homo sapiens
cgctttctctctcggcctcttccgcgtggtctgctctccgcccgcctgcgctcg

SEQ ID NO: 8754 - DNA, 10 bp, Homo sapiens
cgacaacgcg

SEQ ID NO: 8755 - DNA, 26 bp, Homo sapiens
cgcggccgcctggtcgaacctgcccg

SEQ ID NO: 8756 - DNA, 934 bp, Homo sapiens
cgcggaggagggacccgggctgcgcgctctcgggccgaggaaccaggacgcgcccggagcctcgcacgcggccaagctcggggcgtcccctcccctcggccgggcgaactcaaggggcgcagctctttgctttgacagagctggccggcggaggcgtgcagagcggcgagccggcgagccaggctgagaaactcgagccgggaacaaagaggggtcggactgagtgtgtgtgtcggctcgagctccgggcagaggcatttgggcccgaggcccccgctgtgactccccgagactccgcagtgccctccactgcggagtccccgcgcttgccggcaaaaactttattcttggcaaacttctctttctcttcccctcctcctcggcccccatcttctgctcctcctccttctctagcagattaaatgagcctcgagaagaaaaaccgaagcgaaagggaagaaaataagaagatctaaaacggacatctccagcgtgggtggctcctttttctttttctttttttcccacccttcaggaagtggacgtttcgttatcttctgatccttgcaccttcttttggggcaaacggggcccttctgcccagatcccctctcttttctcggaaaacaaactactaagtcggcatccggggtaactacagtggagagggtttccgcggagacgcgccgccggaccctcctctgcactttggggaggcgtgctccctccagaaccggcgttctccgcgcgcaaatcccggcgacgcggggtcgcggggtggccgccggggcagcctcgtctagcgcgcgccgcgcagacgcccccggagtcgccagctaccgcagccctcgccgcccagtgcccttcggcctcgggggcgggcgcctgcgtcggtctccgcgaagcgggaaagcgcggcggccgccgggattcg

SEQ ID NO: 8757 - DNA, 279 bp, Homo sapiens
cggaggcctgagagcagggctggaggggcggaggaccggggagacccgcccgcggcgttcccggccggttctgagcaggcgccgtggcagcgcccgcgccccctgcccgccctccgccgtcgccaggacgcaggctcgcgtcagggctggcggtagggcccgcagctgtcggcctggcgtcttcaccccgcgcagtcggcctcgcctagccttctcgcgcctgactggccggaccctgcccctggcggaggtaactgcccgcggattccttaccccgcg

SEQ ID NO: 8758 - DNA, 2 bp, Homo sapiens
cg

SEQ ID NO: 8759 - DNA, 9 bp, Homo sapiens
cgcggggcg

SEQ ID NO: 8760 - DNA, 11 bp, Homo sapiens
cgatgcgctcg

SEQ ID NO: 8761 - DNA, 30 bp, Homo sapiens
cggcctcctgagtagctgagattacaagcg

SEQ ID NO: 8762 - DNA, 10 bp, Homo sapiens
cgcgggagcg

SEQ ID NO: 8763 - DNA, 56 bp, Homo sapiens
cgcccacaaatcggccccgtcccctcgtgtccgggcccgccgctcatcagacgccg

SEQ ID NO: 8764 - DNA, 98 bp, Homo sapiens
cgtgacctcgggccgcccctcacacgtgaccgctcccttcctctcccccacccccgcacccgtccctctcccagcctcctgccccgccctgctggccg

SEQ ID NO: 8765 - DNA, 33 bp, Homo sapiens
cgacggcggcggccgcccctgcgcgtcctcccg

SEQ ID NO: 8766 - DNA, 48 bp, Homo sapiens
cgaaggaattggggtggggggtgcgtgtgtggtggagggggtgggacg

SEQ ID NO: 8767 - DNA, 93 bp, Homo sapiens
cgagggcagcggtggggctgggccgggggagcaggggtcgcgccgggcagcgtcgcgtgctggagcggaggcgggtgcggccggggcaggtcg

SEQ ID NO: 8768 - DNA, 2 bp, Homo sapiens
cg

SEQ ID NO: 8769 - DNA, 2 bp, Homo sapiens
cg

SEQ ID NO: 8770 - DNA, 2 bp, Homo sapiens
cg

SEQ ID NO: 8771 - DNA, 2 bp, Homo sapiens
cg

SEQ ID NO: 8772 - DNA, 2 bp, Homo sapiens
cg

SEQ ID NO: 8773 - DNA, 2 bp, Homo sapiens
cg

SEQ ID NO: 8774 - DNA, 2 bp, Homo sapiens
cg

SEQ ID NO: 8775 - DNA, 42 bp, Homo sapiens
cgttgcgcgctcgctctctggccgggcgcgcgcctcgctccg

SEQ ID NO: 8776 - DNA, 2 bp, Homo sapiens
cg

SEQ ID NO: 8777 - DNA, 2 bp, Homo sapiens
cg

SEQ ID NO: 8778 - DNA, 2 bp, Homo sapiens
cg

SEQ ID NO: 8779 - DNA, 2 bp, Homo sapiens
cg

SEQ ID NO: 8780 - DNA, 2 bp, Homo sapiens
cg

SEQ ID NO: 8781 - DNA, 2 bp, Homo sapiens
cg

SEQ ID NO: 8782 - DNA, 2 bp, Homo sapiens
cg

SEQ ID NO: 8783 - DNA, 2 bp, Homo sapiens
cg

SEQ ID NO: 8784 - DNA, 2 bp, Homo sapiens
cg

SEQ ID NO: 8785 - DNA, 2 bp, Homo sapiens
cg

SEQ ID NO: 8786 - DNA, 40 bp, Homo sapiens
cgcgccggagtgcggccctgctcccagcgccagtgcgccg

SEQ ID NO: 8787 - DNA, 2 bp, Homo sapiens
cg

SEQ ID NO: 8788 - DNA, 2 bp, Homo sapiens
cg

SEQ ID NO: 8789 - DNA, 2 bp, Homo sapiens
cg

SEQ ID NO: 8790 - DNA, 2 bp, Homo sapiens
cg

SEQ ID NO: 8791 - DNA, 2 bp, Homo sapiens
cg

SEQ ID NO: 8792 - DNA, 2 bp, Homo sapiens
cg

SEQ ID NO: 8793 - DNA, 2 bp, Homo sapiens
cg

SEQ ID NO: 8794 - DNA, 2 bp, Homo sapiens
cg

SEQ ID NO: 8795 - DNA, 2 bp, Homo sapiens
cg

SEQ ID NO: 8796 - DNA, 2 bp, Homo sapiens
cg

SEQ ID NO: 8797 - DNA, 2 bp, Homo sapiens
cg

SEQ ID NO: 8798 - DNA, 2 bp, Homo sapiens
cg

SEQ ID NO: 8799 - DNA, 2 bp, Homo sapiens
cg

SEQ ID NO: 8800 - DNA, 2 bp, Homo sapiens
cg

SEQ ID NO: 8801 - DNA, 2 bp, Homo sapiens
cg

SEQ ID NO: 8802 - DNA, 2 bp, Homo sapiens
cg

SEQ ID NO: 8803 - DNA, 2 bp, Homo sapiens
cg

SEQ ID NO: 8804 - DNA, 2 bp, Homo sapiens
cg

SEQ ID NO: 8805 - DNA, 2 bp, Homo sapiens
cg

SEQ ID NO: 8806 - DNA, 2 bp, Homo sapiens
cg

SEQ ID NO: 8807 - DNA, 2 bp, Homo sapiens
cg

SEQ ID NO: 8808 - DNA, 42 bp, Homo sapiens
cggagaccgccccgctccctcagaccgaacgccgcccgcccg

SEQ ID NO: 8809 - DNA, 2 bp, Homo sapiens
cg

SEQ ID NO: 8810 - DNA, 2 bp, Homo sapiens
cg

SEQ ID NO: 8811 - DNA, 2 bp, Homo sapiens
cg

SEQ ID NO: 8812 - DNA, 2 bp, Homo sapiens
cg

SEQ ID NO: 8813 - DNA, 2 bp, Homo sapiens
cg

SEQ ID NO: 8814 - DNA, 2 bp, Homo sapiens
cg

SEQ ID NO: 8815 - DNA, 2 bp, Homo sapiens
cg

SEQ ID NO: 8816 - DNA, 2 bp, Homo sapiens
cg

SEQ ID NO: 8817 - DNA, 2 bp, Homo sapiens
cg

SEQ ID NO: 8818 - DNA, 2 bp, Homo sapiens
cg

SEQ ID NO: 8819 - DNA, 20 bp, Artificial Sequence
  Description of Artificial Sequence: Synthetic oligonucleotide
ygtggtgygygyggygggyg

SEQ ID NO: 8820 - DNA, 116 bp, Artificial Sequence
  Description of Artificial Sequence: Synthetic polynucleotide
ygagygtygtgggyggggttttagggyggyggygtttygyggggagggtttttygtgttgggggygaggttattygaggtagtttttygttygtttttaatttygtttygttttyg

SEQ ID NO: 8821 - DNA, 2 bp, Artificial Sequence
  Description of Artificial Sequence: Synthetic oligonucleotide
yg

SEQ ID NO: 8822 - DNA, 2 bp, Artificial Sequence
  Description of Artificial Sequence: Synthetic oligonucleotide
yg

SEQ ID NO: 8823 - DNA, 2 bp, Artificial Sequence
  Description of Artificial Sequence: Synthetic oligonucleotide
yg

SEQ ID NO: 8824 - DNA, 2 bp, Artificial Sequence
  Description of Artificial Sequence: Synthetic oligonucleotide
yg

SEQ ID NO: 8825 - DNA, 2 bp, Artificial Sequence
  Description of Artificial Sequence: Synthetic oligonucleotide
yg

SEQ ID NO: 8826 - DNA, 2 bp, Artificial Sequence
  Description of Artificial Sequence: Synthetic oligonucleotide
yg

SEQ ID NO: 8827 - DNA, 2 bp, Artificial Sequence
  Description of Artificial Sequence: Synthetic oligonucleotide
yg

SEQ ID NO: 8828 - DNA, 2 bp, Artificial Sequence
  Description of Artificial Sequence: Synthetic oligonucleotide
yg

SEQ ID NO: 8829 - DNA, 2 bp, Artificial Sequence
  Description of Artificial Sequence: Synthetic oligonucleotide
yg

SEQ ID NO: 8830 - DNA, 2 bp, Artificial Sequence
  Description of Artificial Sequence: Synthetic oligonucleotide
yg

SEQ ID NO: 8831 - DNA, 44 bp, Artificial Sequence
  Description of Artificial Sequence: Synthetic oligonucleotide
ygygygtttttygggtttygttygtattttttaygygtttttyg

SEQ ID NO: 8832 - DNA, 2 bp, Artificial Sequence
  Description of Artificial Sequence: Synthetic oligonucleotide
yg

SEQ ID NO: 8833 - DNA, 2 bp, Artificial Sequence
  Description of Artificial Sequence: Synthetic oligonucleotide
yg

SEQ ID NO: 8834 - DNA, 2 bp, Artificial Sequence
  Description of Artificial Sequence: Synthetic oligonucleotide
yg

SEQ ID NO: 8835 - DNA, 2 bp, Artificial Sequence
  Description of Artificial Sequence: Synthetic oligonucleotide
yg

SEQ ID NO: 8836 - DNA, 2 bp, Artificial Sequence
  Description of Artificial Sequence: Synthetic oligonucleotide
yg

SEQ ID NO: 8837 - DNA, 2 bp, Artificial Sequence
  Description of Artificial Sequence: Synthetic oligonucleotide
yg

SEQ ID NO: 8838 - DNA, 2 bp, Artificial Sequence
  Description of Artificial Sequence: Synthetic oligonucleotide
yg

SEQ ID NO: 8839 - DNA, 2 bp, Artificial Sequence
  Description of Artificial Sequence: Synthetic oligonucleotide
yg

SEQ ID NO: 8840 - DNA, 2 bp, Artificial Sequence
  Description of Artificial Sequence: Synthetic oligonucleotide
tg

SEQ ID NO: 8841 - DNA, 2 bp, Artificial Sequence
  Description of Artificial Sequence: Synthetic oligonucleotide
yg

SEQ ID NO: 8842 - DNA, 34 bp, Artificial Sequence
  Description of Artificial Sequence: Synthetic oligonucleotide
ygtttgttyggyggttttagaaggtygggttgyg

SEQ ID NO: 8843 - DNA, 2 bp, Artificial Sequence
  Description of Artificial Sequence: Synthetic oligonucleotide
yg

SEQ ID NO: 8844 - DNA, 2 bp, Artificial Sequence
  Description of Artificial Sequence: Synthetic oligonucleotide
yg

SEQ ID NO: 8845 - DNA, 2 bp, Artificial Sequence
  Description of Artificial Sequence: Synthetic oligonucleotide
yg

SEQ ID NO: 8846 - DNA, 2 bp, Artificial Sequence
  Description of Artificial Sequence: Synthetic oligonucleotide
yg

SEQ ID NO: 8847 - DNA, 2 bp, Artificial Sequence
  Description of Artificial Sequence: Synthetic oligonucleotide
yg

SEQ ID NO: 8848 - DNA, 2 bp, Artificial Sequence
  Description of Artificial Sequence: Synthetic oligonucleotide
yg

SEQ ID NO: 8849 - DNA, 2 bp, Artificial Sequence
  Description of Artificial Sequence: Synthetic oligonucleotide
yg

SEQ ID NO: 8850 - DNA, 2 bp, Artificial Sequence
  Description of Artificial Sequence: Synthetic oligonucleotide
yg

SEQ ID NO: 8851 - DNA, 2 bp, Artificial Sequence
  Description of Artificial Sequence: Synthetic oligonucleotide
yg

SEQ ID NO: 8852 - DNA, 2 bp, Artificial Sequence
  Description of Artificial Sequence: Synthetic oligonucleotide
yg

SEQ ID NO: 8853 - DNA, 211 bp, Artificial Sequence
  Description of Artificial Sequence: Synthetic polynucleotide
ygattttyggygtagatatagaggtygtttttagtttygtygtttygtggtttygttttygttgtaygtttttttatttttyggatttygtagggtygyggyggatayggttygatyggggaygtgaaygygtagaattatattttttagygtttygttygygttggaattatatttttyggggggttyggyggtgtattygtyggggtyg

SEQ ID NO: 8854 - DNA, 2 bp, Artificial Sequence
  Description of Artificial Sequence: Synthetic oligonucleotide
yg

SEQ ID NO: 8855 - DNA, 2 bp, Artificial Sequence
  Description of Artificial Sequence: Synthetic oligonucleotide
yg

SEQ ID NO: 8856 - DNA, 2 bp, Artificial Sequence
  Description of Artificial Sequence: Synthetic oligonucleotide
yg

SEQ ID NO: 8857 - DNA, 2 bp, Artificial Sequence
  Description of Artificial Sequence: Synthetic oligonucleotide
yg

SEQ ID NO: 8858 - DNA, 2 bp, Artificial Sequence
  Description of Artificial Sequence: Synthetic oligonucleotide
yg

SEQ ID NO: 8859 - DNA, 2 bp, Artificial Sequence
  Description of Artificial Sequence: Synthetic oligonucleotide
yg

SEQ ID NO: 8860 - DNA, 2 bp, Artificial Sequence
  Description of Artificial Sequence: Synthetic oligonucleotide
yg

SEQ ID NO: 8861 - DNA, 2 bp, Artificial Sequence
  Description of Artificial Sequence: Synthetic oligonucleotide
yg

SEQ ID NO: 8862 - DNA, 2 bp, Artificial Sequence
  Description of Artificial Sequence: Synthetic oligonucleotide
yg

SEQ ID NO: 8863 - DNA, 2 bp, Artificial Sequence
  Description of Artificial Sequence: Synthetic oligonucleotide
yg

SEQ ID NO: 8864 - DNA, 95 bp, Artificial Sequence
  Description of Artificial Sequence: Synthetic oligonucleotide
ygggaaaaggggygyggaagaggggyggggygggttayggygygtagggtttttttttttygtttyggatttaattaattgggtttgagtttttg

SEQ ID NO: 8865 - DNA, 2 bp, Artificial Sequence
  Description of Artificial Sequence: Synthetic oligonucleotide
yg

SEQ ID NO: 8866 - DNA, 2 bp, Artificial Sequence
  Description of Artificial Sequence: Synthetic oligonucleotide
yg

SEQ ID NO: 8867 - DNA, 2 bp, Artificial Sequence
  Description of Artificial Sequence: Synthetic oligonucleotide
yg

SEQ ID NO: 8868 - DNA, 2 bp, Artificial Sequence
  Description of Artificial Sequence: Synthetic oligonucleotide
yg

SEQ ID NO: 8869 - DNA, 2 bp, Artificial Sequence
  Description of Artificial Sequence: Synthetic oligonucleotide
yg

SEQ ID NO: 8870 - DNA, 2 bp, Artificial Sequence
  Description of Artificial Sequence: Synthetic oligonucleotide
yg

SEQ ID NO: 8871 - DNA, 2 bp, Artificial Sequence
  Description of Artificial Sequence: Synthetic oligonucleotide
yg

SEQ ID NO: 8872 - DNA, 2 bp, Artificial Sequence
  Description of Artificial Sequence: Synthetic oligonucleotide
yg

SEQ ID NO: 8873 - DNA, 2 bp, Artificial Sequence
  Description of Artificial Sequence: Synthetic oligonucleotide
yg

SEQ ID NO: 8874 - DNA, 2 bp, Artificial Sequence
  Description of Artificial Sequence: Synthetic oligonucleotide
yg

SEQ ID NO: 8875 - DNA, 264 bp, Artificial Sequence
  Description of Artificial Sequence: Synthetic polynucleotide
ygggttgtaaggyggtgtattaygtgtgygygtttagtatgtaygttagygtgttgtttatyggtttgtttagtttgtagygttgtttygtagttattygtttttttttggygtttyggttgygtagttyggttttggttygtygtttgttgttggyggtttggttggtygttttgttgttygtygtttyggtygtygtttatygttatttgtggagggatygygtatgttagttgtgttattygtygtyggtttaygtygtyg

SEQ ID NO: 8876 - DNA, 2 bp, Artificial Sequence
  Description of Artificial Sequence: Synthetic oligonucleotide
yg

SEQ ID NO: 8877 - DNA, 2 bp, Artificial Sequence
  Description of Artificial Sequence: Synthetic oligonucleotide
yg

SEQ ID NO: 8878 - DNA, 2 bp, Artificial Sequence
  Description of Artificial Sequence: Synthetic oligonucleotide
yg

SEQ ID NO: 8879 - DNA, 2 bp, Artificial Sequence
  Description of Artificial Sequence: Synthetic oligonucleotide
yg

SEQ ID NO: 8880 - DNA, 2 bp, Artificial Sequence
  Description of Artificial Sequence: Synthetic oligonucleotide
yg

SEQ ID NO: 8881 - DNA, 2 bp, Artificial Sequence
  Description of Artificial Sequence: Synthetic oligonucleotide
yg

SEQ ID NO: 8882 - DNA, 2 bp, Artificial Sequence
  Description of Artificial Sequence: Synthetic oligonucleotide
yg

SEQ ID NO: 8883 - DNA, 2 bp, Artificial Sequence
  Description of Artificial Sequence: Synthetic oligonucleotide
yg

SEQ ID NO: 8884 - DNA, 2 bp, Artificial Sequence
  Description of Artificial Sequence: Synthetic oligonucleotide
yg

SEQ ID NO: 8885 - DNA, 2 bp, Artificial Sequence
  Description of Artificial Sequence: Synthetic oligonucleotide
yg

SEQ ID NO: 8886 - DNA, 59 bp, Artificial Sequence
  Description of Artificial Sequence: Synthetic oligonucleotide
ygtttttygtttyggagttgtyggyggtatgattygataygtyggggygttygygygyg

SEQ ID NO: 8887 - DNA, 2 bp, Artificial Sequence
  Description of Artificial Sequence: Synthetic oligonucleotide
yg

SEQ ID NO: 8888 - DNA, 2 bp, Artificial Sequence
  Description of Artificial Sequence: Synthetic oligonucleotide
yg

SEQ ID NO: 8889 - DNA, 2 bp, Artificial Sequence
  Description of Artificial Sequence: Synthetic oligonucleotide
yg

SEQ ID NO: 8890 - DNA, 2 bp, Artificial Sequence
  Description of Artificial Sequence: Synthetic oligonucleotide
yg

SEQ ID NO: 8891 - DNA, 2 bp, Artificial Sequence
  Description of Artificial Sequence: Synthetic oligonucleotide
yg

SEQ ID NO: 8892 - DNA, 2 bp, Artificial Sequence
  Description of Artificial Sequence: Synthetic oligonucleotide
yg

SEQ ID NO: 8893 - DNA, 2 bp, Artificial Sequence
  Description of Artificial Sequence: Synthetic oligonucleotide
yg

SEQ ID NO: 8894 - DNA, 2 bp, Artificial Sequence
  Description of Artificial Sequence: Synthetic oligonucleotide
yg

SEQ ID NO: 8895 - DNA, 2 bp, Artificial Sequence
  Description of Artificial Sequence: Synthetic oligonucleotide
yg

SEQ ID NO: 8896 - DNA, 2 bp, Artificial Sequence
  Description of Artificial Sequence: Synthetic oligonucleotide
yg

SEQ ID NO: 8897 - DNA, 4 bp, Artificial Sequence
  Description of Artificial Sequence: Synthetic oligonucleotide
ygyg

SEQ ID NO: 8898 - DNA, 2 bp, Artificial Sequence
  Description of Artificial Sequence: Synthetic oligonucleotide
yg

SEQ ID NO: 8899 - DNA, 2 bp, Artificial Sequence
  Description of Artificial Sequence: Synthetic oligonucleotide
yg

SEQ ID NO: 8900 - DNA, 2 bp, Artificial Sequence
  Description of Artificial Sequence: Synthetic oligonucleotide
yg

SEQ ID NO: 8901 - DNA, 2 bp, Artificial Sequence
  Description of Artificial Sequence: Synthetic oligonucleotide
yg

SEQ ID NO: 8902 - DNA, 2 bp, Artificial Sequence
  Description of Artificial Sequence: Synthetic oligonucleotide
yg

SEQ ID NO: 8903 - DNA, 2 bp, Artificial Sequence
  Description of Artificial Sequence: Synthetic oligonucleotide
yg

SEQ ID NO: 8904 - DNA, 2 bp, Artificial Sequence
  Description of Artificial Sequence: Synthetic oligonucleotide
yg

SEQ ID NO: 8905 - DNA, 2 bp, Artificial Sequence
  Description of Artificial Sequence: Synthetic oligonucleotide
yg

SEQ ID NO: 8906 - DNA, 2 bp, Artificial Sequence
  Description of Artificial Sequence: Synthetic oligonucleotide
yg

SEQ ID NO: 8907 - DNA, 2 bp, Artificial Sequence
  Description of Artificial Sequence: Synthetic oligonucleotide
yg

SEQ ID NO: 8908 - DNA, 324 bp, Artificial Sequence
  Description of Artificial Sequence: Synthetic polynucleotide
yggygaaggtttygtgttttaygagattttttttgttgtattygaagttatttattatttttatggtygygttttyggggtatatagyggaygggygggyggygtagtgyggygtaggtattagtatygyggtttygygggttyggagygygttagygtgyggygggtttggggtagtygtagtttygggttygggyggatttttatgtygagagatyggagyggaaattggggaagttgtygygyggagttagggttagygaggttyggttyggtttttgtygtttatggttyggtttgtygtyggtygttggttgtttggyg

SEQ ID NO: 8909 - DNA, 2 bp, Artificial Sequence
  Description of Artificial Sequence: Synthetic oligonucleotide
yg

SEQ ID NO: 8910 - DNA, 2 bp, Artificial Sequence
  Description of Artificial Sequence: Synthetic oligonucleotide
yg

SEQ ID NO: 8911 - DNA, 2 bp, Artificial Sequence
  Description of Artificial Sequence: Synthetic oligonucleotide
yg

SEQ ID NO: 8912 - DNA, 2 bp, Artificial Sequence
  Description of Artificial Sequence: Synthetic oligonucleotide
yg

SEQ ID NO: 8913 - DNA, 2 bp, Artificial Sequence
  Description of Artificial Sequence: Synthetic oligonucleotide
yg

SEQ ID NO: 8914 - DNA, 2 bp, Artificial Sequence
  Description of Artificial Sequence: Synthetic oligonucleotide
yg

SEQ ID NO: 8915 - DNA, 2 bp, Artificial Sequence
  Description of Artificial Sequence: Synthetic oligonucleotide
yg

SEQ ID NO: 8916 - DNA, 102 bp, Artificial Sequence
  Description of Artificial Sequence: Synthetic polynucleotide
ygttgagttygygttgaataagattttttygtagttttgygtttygygtygggtgaaggggygtgtttttgtaggygttyggggttyggtttggagttggyg

SEQ ID NO: 8917 - DNA, 24 bp, Artificial Sequence
  Description of Artificial Sequence: Synthetic oligonucleotide
ygtaaygattygttgtygtttayg

SEQ ID NO: 8918 - DNA, 521 bp, Artificial Sequence
  Description of Artificial Sequence: Synthetic polynucleotide
ygtggtgggggtgttagttgtaggggtgttttyggtgggtgggagttggtggtttttygttggtgttatgggattygtatgttygttttgygtttttyggtttttgagtttataggtygggattttgtttgttagtygygtgygttgtygtttaatttttgtaggygtagagygygyggyggyggtgatagagaattttgtttggttgtttaaatatagttttttgtagaaggattttgygttyggggaaggggaggaatttttttttttttgggygttygtttttttygttatggttyggtttttatattygtttatatttggtygtagyggggygttyggggggaggggttgaggtygygtttttygtygttttttgggygygggttaggyggggaggaggggggygtttyggtygtgtgtttaggattgttttttagyggttattygggttttagttttttaggtttggttttgataggygggyggagtagttagtgygagatagggaggtyggtgyg

SEQ ID NO: 8919 - DNA, 1484 bp, Artificial Sequence
  Description of Artificial Sequence: Synthetic polynucleotide
ygtaagggygtyggggagygggaggggygttgggggyggtaaggggttttagattttaggttaygaattgtttttttttttttygggtaagagtttygttttttttaattgatagaaatttattggggtaggggggygagtggggagagaggtygtttagggttygttattggttgygtttttttyggttttggtttgggaagyggttttgggtttttygggygagtagtttgggygtyggygttttttgygaggaagatygyggggtgayggtyggtattygttyggttgggtygygttgtygtttygatttatttttttttygygttygygtttttttttttttttttattaggagttygggattyggagagggygygggaggtaggtataygggttygattttattttagygtttatyggggaygygggygggyggygaygggaygyggygggggygyggggygggygyggttatggagtagtagyggyggyggyggyggyggyggyggtaatattagygatygygggyggaygagygggygggtagggtygtygggtttagyggatygaattgtatagtttagtaaaagygttttygtttttygygygtygttttttgygagtttaaatttattaatattttttaaygttttaatttattttttgaagaaaagtaaaaaaaaaaaaaaaaaaaaaaaaaaaagtaaaaaaagaaaaagtattgatyggagagayggggatatatatatatatatatatatatatatatatataaaattttttttggtttttgttaaaattagtagggttygtygygygtttgtgtgttagtgtgtgygagtgtgtgtgygtgygggygtgtgtgtgtgaatgtgattattttaggatttttygggtttyggagaygttatttttttttttgatatttttttttataaatyggtggygyggyggaggyggtagagtygggygggaagygyggggtyggtyggggygttygtygttygtygtygttttygygygttygggggtttyggygtttttygagttagggyggttagttygyggttygtygtttgatagatgtttatygttatggagttgtygtagtagtatttttgggggttygggygagygaygggagtygggatttgagygagygtyggggttagyggagtyggagtygtygggatatgggtgagtaygygyggygattttggttygggagttygggygtttagttttttttygygtygygggttttygtattttyggaatygggggygaygtgtgtgttttgtatgtaaaagtttaygtygttttgttgggtttttgattttgtattyggygggaagggggagatygggtygagggggygggatgtyggttygggygaggttgtaggagatgggygygatttyggygggtyggygggtgggyggygatgttggtttaattggagtggttygttggtggyggyg

SEQ ID NO: 8920 - DNA, 34 bp, Artificial Sequence
  Description of Artificial Sequence: Synthetic oligonucleotide
ygygtygttygttttygtttttttygttttttyg

SEQ ID NO: 8921 - DNA, 14 bp, Artificial Sequence
  Description of Artificial Sequence: Synthetic oligonucleotide
yggygaggggttyg

SEQ ID NO: 8922 - DNA, 37 bp, Artificial Sequence
  Description of Artificial Sequence: Synthetic oligonucleotide
ygtggygygtttattttayggtgttgaagagtagtyg

SEQ ID NO: 8923 - DNA, 34 bp, Artificial Sequence
  Description of Artificial Sequence: Synthetic oligonucleotide
ygggatttgttygtttttttgtttttggttgtyg

SEQ ID NO: 8924 - DNA, 538 bp, Artificial Sequence
  Description of Artificial Sequence: Synthetic polynucleotide
ygyggggttattttatygygagtttttttygtagttyggttygggttatttygattygttaggtttaatttaataattataatatyggaaaaggaagtaaaggtygaagtttattygyggttttgaggtttgtgggaaaygtagtttaataaygaaagagttttgaagtttaagyggagttygttggtygtaggggtygtattaygttttagattttggagttttygggtgygtagatttttgttattagtagaggttgtygttgygygttttttaggygyggaagaggyggttggtggtttttgayggtaaggtgaagtygaggtagtaatygggaatttaggttgggaggatagaatggggaataggaagttggggygagggtggttttgggggaggtggggggtygyggaattttaggtggtttttgttttatttttggaaagaatyggaagttygggtyggggagggtgaagggagtygyggattyggttgtttagtygaggaggaaattyggattttaggttgagggaggtyg

SEQ ID NO: 8925 - DNA, 109 bp, Artificial Sequence
  Description of Artificial Sequence: Synthetic polynucleotide
yggygttyggagygttggattatattttttagaggtatygttttyggagygtagttttattttygttagtttgygagatttggaggtttygygtggggagagggtygyg

SEQ ID NO: 8926 - DNA, 901 bp, Artificial Sequence
  Description of Artificial Sequence: Synthetic polynucleotide
ygygyggggtttyggggtyggttttttttygtygggygtttygggttygtygttygggtttttygyggatagyggtyggtygygtaggtttayggygygtattaggtygttygttagtttttttagttttttyggtygtagygtttygagtygygyggygtygyggaaygygtttagggtttyggggaggyggtyggygygggttagygygttttttagttttaggtataggtygyggttyggttgygttagttyggttagtatggagygaaagagttyggttgttatttygtagtygttygygyggaaggtttygtygtttttttttaagygttgggygatyggtttygygyggtygtagttaggatattggggyggyggyggyggygggatyggttyggggtttattatygyggggttgygaygaygygggttyggagygaaggygyggagtagggaggatgygttgttgttgggaattggtyggygggagygyggttttagttttygttagtagttaygygygtttgggggyggygygttgygagyggttgagatygygggygggggygggygtttggtttgggtagygtttttagygyggtgtgggyggygagtttygtagggttgtaatygtttyggggtgggggtygggataggtatygygggygtaatttgagtttttgtttaygygtagyggttttttagtttygtyggtttaggtaatttaggtygttgyggtaaygtagtgatygygttttaggttygygttttttgygatgttttttttattygtttgagggtttttgygygattgygygygygttttttgtttgtygttttttygtagaggtgtyggggttttgggagtaggtggttttggtygygggttgttggygyg

SEQ ID NO: 8927 - DNA, 15 bp, Artificial Sequence
  Description of Artificial Sequence: Synthetic oligonucleotide
ygggyggygygggyg

SEQ ID NO: 8928 - DNA, 383 bp, Artificial Sequence
  Description of Artificial Sequence: Synthetic polynucleotide
ygggatattttygaaggyggygygttggaggyggggagyggtyggggygtayggagagggyggggagttygygggagggggaggagggggaggagggggaggaggygygaggtgggggggagygyggygggyggtagggagggagygggagggaggtaagaaagtagtagaaagtgaggttggtaggyggyggtaaaggagtyggygygyggyggyggtaggaagtttgtgttygagaatagtagaaataagagttagggagggatygyggtygyggyggyggyggygagagygaaagaggaaattgtagaggaggaagttgygtygtagttygagtygttyggtattttygtygtttttgygttygygtygygttttyggyg

SEQ ID NO: 8929 - DNA, 4 bp, Artificial Sequence
  Description of Artificial Sequence: Synthetic oligonucleotide
ygyg

SEQ ID NO: 8930 - DNA, 624 bp, Artificial Sequence
  Description of Artificial Sequence: Synthetic polynucleotide
ygyggaggtgggygagygggygtgygygtatttatttgtyggygygagggagtgtygggggggaagggagtggtttttaaaagggggaggggagaaggtagggggyggggagaagtyggttttttaggattyggttgyggyggygagggaggaggaagaagyggaggaggyggttttygygttygtagggtygtgttatttgttygttygttygttygttygttygttygttgygtygygttgtygatygttagtatgttgtygagagtgggttgtttygygttgtygttgtygtygtygtygttgttgtygttgttgttgttgttattgggygygagtggyggyggyggyggggygygygyggaggtgttgtttygttgttygttttgtatattygagygtttggtygtttgygggttttygtyggttgygtygttygtygyggtggtygtagtggtyggaggygttygtatgttatgygyggagttygttygggagtygggttgyggttgttgttyggtgtgygttyggttggagggygaggygtgyggygtttatatttygygttgyggttaggggttgygttgttatttttattygggtttygagttgtttttgtaggyg

SEQ ID NO: 8931 - DNA, 94 bp, Artificial Sequence
  Description of Artificial Sequence: Synthetic oligonucleotide
ygagatagttagygagtttaggyggtttttgtagygttgggagaggaatgtgygygaaattaattagagygaaattagtyggaggagtyggtyg

SEQ ID NO: 8932 - DNA, 63 bp, Artificial Sequence
  Description of Artificial Sequence: Synthetic oligonucleotide
ygtgtagggygtagagttgggtygagtygtygtyggygttaygygagtttygtagtygtygyg

SEQ ID NO: 8933 - DNA, 41 bp, Artificial Sequence
  Description of Artificial Sequence: Synthetic oligonucleotide
ygtygyggtttttggggttttygtttttttgttygttatyg

SEQ ID NO: 8934 - DNA, 1041 bp, Artificial Sequence
  Description of Artificial Sequence: Synthetic polynucleotide
ygygtagggatygggtygggtagagtygggyggggtggagaggtaagyggagygygyggtggggttgaggggaggygtggggygagtgttygttgttygttttttagtttttttgtttttaygttttttygttygtagtygttygtagttyggyggtgtagttgtgttggattyggyggygtygtagttttttatygttttttgatgttattggggtgygggggttygggyggttyggtgygygggttaatagttgtayggttttygyggtttagyggygtagggyggggygygtttgatagttttttygtttttygygttagttgattggyggttygagyggtttyggagyggyggaggtttggyggagygttggagyggagtgggayggttagtttgggtttattttygtattttgtaggtttyggtttaygtaygttygtttggagtgygygttttatttttaggttaaattatygttttttttttttygygtattttttttttttagttttttttgtattttatttttatttygtgttatttttaaggaggtttagaatgagygtygggataaygttttttgggttttttgtttttaagyggttttygtttagtgggygaygttttgtgtgttttygyggtttttggtygtgtgtgtygtgygtttttgtttttggagatttgygygtatttgtatgttggggagggygggttygaggtttygagagttgtgtttagatttaatttttaattttaggggattttttttaggttaagygagggttttttttggygggtgtagtygtagagttttgaggttygattttattggtttygtygtttttygygtttattttatygtataatgtttatagtgaaggygaygggaaaagtagtagtttaaaggttttgaatttttttttttygttataygtayggaattttgagttttyggagtttyggggtygaggtyggttygggayggtgtttygagtagttttttattgttggggagtyggttttgtttttgtttgaayg

SEQ ID NO: 8935 - DNA, 23 bp, Artificial Sequence
  Description of Artificial Sequence: Synthetic oligonucleotide
ygttttyggttygggttatggyg

SEQ ID NO: 8936 - DNA, 515 bp, Artificial Sequence
  Description of Artificial Sequence: Synthetic polynucleotide
ygtagtagaatattttgatttaaaataaaaatattatgataaaaatattttaggaggtagtyggttttatttygtttaaagtyggatttygtttagtttygtgaaagygaaggagtattagygttttttgatttygtatagttttttyggtagagayggttygttttttttaagaatyggaagtyggatagygttaggaygttttattttttttatttgggatttagagaggtagyggttaaggatagggttttygtygaggttatygggtagygtttaggtttyggtttttgggaggggagtagygggggaggggtayggggaggggygagggyggggygygtttgggtttyggygttgggttttttttttgttygtttygggggatatttataggatttttgtagatttttgtygaggtaggatggaggtttgtagggatgtatygygggttygygattygggyggtyggaatatagttttttttggtyggagatyggttyggtygtgagtyg

SEQ ID NO: 8937 - DNA, 1017 bp, Artificial Sequence
  Description of Artificial Sequence: Synthetic polynucleotide
ygggttaggtttgyggaggaygttttygggygygtatatatagttygaggaygygttttgtattttaagaygtagggtyggattttatttygaaatttggtttttatagttttaggtygaattgtgtttggtttttagttttygagttygagttttaygtygtaaagagatggggttttattgtgtttagttggttttttagtayggaygtgtatttttttttggtttgttttttgttaaaaatyggtagtgygtttygtttttttgtttagtygtagtttgtygttttttagataaaaagyggygatygyggttyggttattygagtttygtygygttgygtttttgttgggyggtttatagatggtgtttagtayggggtygygtygagggygggggygggaggtygygaagagggtygggygggaggggaggagayggyggagtagttaattygygygyggtttattagttgatygtttttgtttatattaggtgtaygtyggttgyggggagtataaagyggggygtatygygggygtyggtaaygagtyggtgaaygaggygaggttygtgygttygyggttgtaagygttygtttggyggggagaggggtygayggygttagttygggyggyggtatttttaggygtttggggygttttttttyggatttggtygttygttgtttygttttttgtattttattttttygatttttttttttagttttgtttttttttgttttggtttttgagagtygattgagtttagtttygtgtagtagyggttgtttgtgtygtygtttagttttyggttttggtgttttttygggggtgttttaaggagttagtgygygttgygggttgggaaggaggygtygtttagttagttttttttttttttttygttttttttttttttttgttgttgttgtygtygtygtygtygtgggtgtygggttygygygtattttaatatttttattagttgggtttyggggtaagtttttggtyg

SEQ ID NO: 8938 - DNA, 8 bp, Artificial Sequence
  Description of Artificial Sequence: Synthetic oligonucleotide
ygygttyg

SEQ ID NO: 8939 - DNA, 54 bp, Artificial Sequence
  Description of Artificial Sequence: Synthetic oligonucleotide
ygagygtaggygggyggagagtagattaygyggaagaggtygagagagaaagyg

SEQ ID NO: 8940 - DNA, 10 bp, Artificial Sequence
  Description of Artificial Sequence: Synthetic oligonucleotide
ygygttgtyg

SEQ ID NO: 8941 - DNA, 26 bp, Artificial Sequence
  Description of Artificial Sequence: Synthetic oligonucleotide
ygggtaggttygattaggyggtygyg

SEQ ID NO: 8942 - DNA, 934 bp, Artificial Sequence
  Description of Artificial Sequence: Synthetic polynucleotide
ygaatttyggyggtygtygygttttttygtttygyggagatygaygtaggygttygttttygaggtygaagggtattgggyggygagggttgyggtagttggygatttygggggygtttgygyggygygygttagaygaggttgtttyggyggttatttygygatttygygtygtygggatttgygygyggagaaygtyggttttggagggagtaygtttttttaaagtgtagaggagggttyggyggygygttttygyggaaattttttttattgtagttatttyggatgtygatttagtagtttgtttttygagaaaagagaggggatttgggtagaagggtttygtttgttttaaaagaaggtgtaaggattagaagataaygaaaygtttattttttgaagggtgggaaaaaaagaaaaagaaaaaggagttatttaygttggagatgttygttttagatttttttatttttttttttttygtttyggttttttttttygaggtttatttaatttgttagagaaggaggaggagtagaagatgggggtygaggaggaggggaagagaaagagaagtttgttaagaataaagtttttgtyggtaagygyggggatttygtagtggagggtattgyggagtttyggggagttatagygggggtttygggtttaaatgtttttgttyggagttygagtygatatatatatttagttygatttttttttgttttyggttygagttttttagtttggttygtyggttygtygttttgtaygttttygtyggttagttttgttaaagtaaagagttgygttttttgagttygttyggtygaggggaggggaygtttygagtttggtygygtgygaggtttygggygygttttggtttttyggttygagagygygtagttygggtttttttttygyg

SEQ ID NO: 8943 - DNA, 279 bp, Artificial Sequence
  Description of Artificial Sequence: Synthetic polynucleotide
ygyggggtaaggaattygygggtagttattttygttaggggtagggttyggttagttaggygygagaaggttaggygaggtygattgygyggggtgaagaygttaggtygatagttgygggttttatygttagttttgaygygagtttgygttttggygayggyggagggygggtagggggygygggygttgttayggygtttgtttagaatyggtygggaaygtygygggygggttttttyggtttttygtttttttagttttgtttttaggttttyg

SEQ ID NO: 8944 - DNA, 2 bp, Artificial Sequence
  Description of Artificial Sequence: Synthetic oligonucleotide
yg

SEQ ID NO: 8945 - DNA, 9 bp, Artificial Sequence
  Description of Artificial Sequence: Synthetic oligonucleotide
ygtttygyg

SEQ ID NO: 8946 - DNA, 11 bp, Artificial Sequence
  Description of Artificial Sequence: Synthetic oligonucleotide
ygagygtatyg

SEQ ID NO: 8947 - DNA, 30 bp, Artificial Sequence
  Description of Artificial Sequence: Synthetic oligonucleotide
ygtttgtaattttagttatttaggaggtyg

SEQ ID NO: 8948 - DNA, 10 bp, Artificial Sequence
  Description of Artificial Sequence: Synthetic oligonucleotide
ygttttygyg

SEQ ID NO: 8949 - DNA, 56 bp, Artificial Sequence
  Description of Artificial Sequence: Synthetic oligonucleotide
yggygtttgatgagyggygggttyggataygaggggayggggtygatttgtgggyg

SEQ ID NO: 8950 - DNA, 98 bp, Artificial Sequence
  Description of Artificial Sequence: Synthetic oligonucleotide
yggttagtagggyggggtaggaggttgggagagggaygggtgygggggtgggggagaggaagggagyggttaygtgtgaggggyggttygaggttayg

SEQ ID NO: 8951 - DNA, 33 bp, Artificial Sequence
  Description of Artificial Sequence: Synthetic oligonucleotide
ygggaggaygygtaggggyggtygtygtygtyg

SEQ ID NO: 8952 - DNA, 48 bp, Artificial Sequence
  Description of Artificial Sequence: Synthetic oligonucleotide
ygttttattttttttattatataygtattttttattttaattttttyg

SEQ ID NO: 8953 - DNA, 93 bp, Artificial Sequence
  Description of Artificial Sequence: Synthetic oligonucleotide
ygatttgtttyggtygtattygttttygttttagtaygygaygttgttyggygygatttttgttttttyggtttagttttatygttgttttyg

SEQ ID NO: 8954 - DNA, 2 bp, Artificial Sequence
  Description of Artificial Sequence: Synthetic oligonucleotide
yg

SEQ ID NO: 8955 - DNA, 2 bp, Artificial Sequence
  Description of Artificial Sequence: Synthetic oligonucleotide
yg

SEQ ID NO: 8956 - DNA, 2 bp, Artificial Sequence
  Description of Artificial Sequence: Synthetic oligonucleotide
yg

SEQ ID NO: 8957 - DNA, 2 bp, Artificial Sequence
  Description of Artificial Sequence: Synthetic oligonucleotide
yg

SEQ ID NO: 8958 - DNA, 2 bp, Artificial Sequence
  Description of Artificial Sequence: Synthetic oligonucleotide
yg

SEQ ID NO: 8959 - DNA, 2 bp, Artificial Sequence
  Description of Artificial Sequence: Synthetic oligonucleotide
yg

SEQ ID NO: 8960 - DNA, 2 bp, Artificial Sequence
  Description of Artificial Sequence: Synthetic oligonucleotide
yg

SEQ ID NO: 8961 - DNA, 42 bp, Artificial Sequence
  Description of Artificial Sequence: Synthetic oligonucleotide
yggagygaggygygygttyggttagagagygagygygtaayg

SEQ ID NO: 8962 - DNA, 2 bp, Artificial Sequence
  Description of Artificial Sequence: Synthetic oligonucleotide
yg

SEQ ID NO: 8963 - DNA, 2 bp, Artificial Sequence
  Description of Artificial Sequence: Synthetic oligonucleotide
yg

SEQ ID NO: 8964 - DNA, 2 bp, Artificial Sequence
  Description of Artificial Sequence: Synthetic oligonucleotide
yg

SEQ ID NO: 8965 - DNA, 2 bp, Artificial Sequence
  Description of Artificial Sequence: Synthetic oligonucleotide
yg

SEQ ID NO: 8966 - DNA, 2 bp, Artificial Sequence
  Description of Artificial Sequence: Synthetic oligonucleotide
yg

SEQ ID NO: 8967 - DNA, 2 bp, Artificial Sequence
  Description of Artificial Sequence: Synthetic oligonucleotide
yg

SEQ ID NO: 8968 - DNA, 2 bp, Artificial Sequence
  Description of Artificial Sequence: Synthetic oligonucleotide
yg

SEQ ID NO: 8969 - DNA, 2 bp, Artificial Sequence
  Description of Artificial Sequence: Synthetic oligonucleotide
yg

SEQ ID NO: 8970 - DNA, 2 bp, Artificial Sequence
  Description of Artificial Sequence: Synthetic oligonucleotide
yg

SEQ ID NO: 8971 - DNA, 2 bp, Artificial Sequence
  Description of Artificial Sequence: Synthetic oligonucleotide
yg

SEQ ID NO: 8972 - DNA, 40 bp, Artificial Sequence
  Description of Artificial Sequence: Synthetic oligonucleotide
yggygtattggygttgggagtagggtygtatttyggygyg

SEQ ID NO: 8973 - DNA, 2 bp, Artificial Sequence
  Description of Artificial Sequence: Synthetic oligonucleotide
yg

SEQ ID NO: 8974 - DNA, 2 bp, Artificial Sequence
  Description of Artificial Sequence: Synthetic oligonucleotide
yg

SEQ ID NO: 8975 - DNA, 2 bp, Artificial Sequence
  Description of Artificial Sequence: Synthetic oligonucleotide
yg

SEQ ID NO: 8976 - DNA, 2 bp, Artificial Sequence
  Description of Artificial Sequence: Synthetic oligonucleotide
yg

SEQ ID NO: 8977 - DNA, 2 bp, Artificial Sequence
  Description of Artificial Sequence: Synthetic oligonucleotide
yg

SEQ ID NO: 8978 - DNA, 2 bp, Artificial Sequence
  Description of Artificial Sequence: Synthetic oligonucleotide
yg

SEQ ID NO: 8979 - DNA, 2 bp, Artificial Sequence
  Description of Artificial Sequence: Synthetic oligonucleotide
yg

SEQ ID NO: 8980 - DNA, 2 bp, Artificial Sequence
  Description of Artificial Sequence: Synthetic oligonucleotide
yg

SEQ ID NO: 8981 - DNA, 2 bp, Artificial Sequence
  Description of Artificial Sequence: Synthetic oligonucleotide
yg

SEQ ID NO: 8982 - DNA, 2 bp, Artificial Sequence
  Description of Artificial Sequence: Synthetic oligonucleotide
yg

SEQ ID NO: 8983 - DNA, 2 bp, Artificial Sequence
  Description of Artificial Sequence: Synthetic oligonucleotide
yg

SEQ ID NO: 8984 - DNA, 2 bp, Artificial Sequence
  Description of Artificial Sequence: Synthetic oligonucleotide
yg

SEQ ID NO: 8985 - DNA, 2 bp, Artificial Sequence
  Description of Artificial Sequence: Synthetic oligonucleotide
yg

SEQ ID NO: 8986 - DNA, 2 bp, Artificial Sequence
  Description of Artificial Sequence: Synthetic oligonucleotide
yg

SEQ ID NO: 8987 - DNA, 2 bp, Artificial Sequence
  Description of Artificial Sequence: Synthetic oligonucleotide
yg

SEQ ID NO: 8988 - DNA, 2 bp, Artificial Sequence
  Description of Artificial Sequence: Synthetic oligonucleotide
yg

SEQ ID NO: 8989 - DNA, 2 bp, Artificial Sequence
  Description of Artificial Sequence: Synthetic oligonucleotide
yg

SEQ ID NO: 8990 - DNA, 2 bp, Artificial Sequence
  Description of Artificial Sequence: Synthetic oligonucleotide
yg

SEQ ID NO: 8991 - DNA, 2 bp, Artificial Sequence
  Description of Artificial Sequence: Synthetic oligonucleotide
yg

SEQ ID NO: 8992 - DNA, 2 bp, Artificial Sequence
  Description of Artificial Sequence: Synthetic oligonucleotide
yg

SEQ ID NO: 8993 - DNA, 2 bp, Artificial Sequence
  Description of Artificial Sequence: Synthetic oligonucleotide
yg

SEQ ID NO: 8994 - DNA, 42 bp, Artificial Sequence
  Description of Artificial Sequence: Synthetic oligonucleotide
ygggygggyggygttyggtttgagggagyggggyggttttyg

SEQ ID NO: 8995 - DNA, 2 bp, Artificial Sequence
  Description of Artificial Sequence: Synthetic oligonucleotide
yg

SEQ ID NO: 8996 - DNA, 2 bp, Artificial Sequence
  Description of Artificial Sequence: Synthetic oligonucleotide
yg

SEQ ID NO: 8997 - DNA, 2 bp, Artificial Sequence
  Description of Artificial Sequence: Synthetic oligonucleotide
yg

SEQ ID NO: 8998 - DNA, 2 bp, Artificial Sequence
  Description of Artificial Sequence: Synthetic oligonucleotide
yg

SEQ ID NO: 8999 - DNA, 2 bp, Artificial Sequence
  Description of Artificial Sequence: Synthetic oligonucleotide
yg

SEQ ID NO: 9000 - DNA, 2 bp, Artificial Sequence
  Description of Artificial Sequence: Synthetic oligonucleotide
yg

SEQ ID NO: 9001 - DNA, 2 bp, Artificial Sequence
  Description of Artificial Sequence: Synthetic oligonucleotide
yg

SEQ ID NO: 9002 - DNA, 2 bp, Artificial Sequence
  Description of Artificial Sequence: Synthetic oligonucleotide
yg

SEQ ID NO: 9003 - DNA, 2 bp, Artificial Sequence
  Description of Artificial Sequence: Synthetic oligonucleotide
yg

SEQ ID NO: 9004 - DNA, 2 bp, Artificial Sequence
  Description of Artificial Sequence: Synthetic oligonucleotide
yg

SEQ ID NO: 9005 - DNA, 20 bp, Artificial Sequence
  Description of Artificial Sequence: Synthetic oligonucleotide
cgtggtgcgcgcggcgggcg

SEQ ID NO: 9006 - DNA, 116 bp, Artificial Sequence
  Description of Artificial Sequence: Synthetic polynucleotide
cgagcgtcgtgggcggggttttagggcggcggcgtttcgcggggagggtttttcgtgttgggggcgaggttattcgaggtagtttttcgttcgtttttaatttcgtttcgttttcg

SEQ ID NO: 9007 - DNA, 2 bp, Artificial Sequence
  Description of Artificial Sequence: Synthetic oligonucleotide
cg

SEQ ID NO: 9008 - DNA, 2 bp, Artificial Sequence
  Description of Artificial Sequence: Synthetic oligonucleotide
cg

SEQ ID NO: 9009 - DNA, 2 bp, Artificial Sequence
  Description of Artificial Sequence: Synthetic oligonucleotide
cg

SEQ ID NO: 9010 - DNA, 2 bp, Artificial Sequence
  Description of Artificial Sequence: Synthetic oligonucleotide
cg

SEQ ID NO: 9011 - DNA, 2 bp, Artificial Sequence
  Description of Artificial Sequence: Synthetic oligonucleotide
cg

SEQ ID NO: 9012 - DNA, 2 bp, Artificial Sequence
  Description of Artificial Sequence: Synthetic oligonucleotide
cg

SEQ ID NO: 9013 - DNA, 2 bp, Artificial Sequence
  Description of Artificial Sequence: Synthetic oligonucleotide
cg

SEQ ID NO: 9014 - DNA, 2 bp, Artificial Sequence
  Description of Artificial Sequence: Synthetic oligonucleotide
cg

SEQ ID NO: 9015 - DNA, 2 bp, Artificial Sequence
  Description of Artificial Sequence: Synthetic oligonucleotide
cg

SEQ ID NO: 9016 - DNA, 2 bp, Artificial Sequence
  Description of Artificial Sequence: Synthetic oligonucleotide
cg

SEQ ID NO: 9017 - DNA, 44 bp, Artificial Sequence
  Description of Artificial Sequence: Synthetic oligonucleotide
cgcgcgtttttcgggtttcgttcgtattttttacgcgtttttcg

SEQ ID NO: 9018 - DNA, 2 bp, Artificial Sequence
  Description of Artificial Sequence: Synthetic oligonucleotide
cg

SEQ ID NO: 9019 - DNA, 2 bp, Artificial Sequence
  Description of Artificial Sequence: Synthetic oligonucleotide
cg

SEQ ID NO: 9020 - DNA, 2 bp, Artificial Sequence
  Description of Artificial Sequence: Synthetic oligonucleotide
cg

SEQ ID NO: 9021 - DNA, 2 bp, Artificial Sequence
  Description of Artificial Sequence: Synthetic oligonucleotide
cg

SEQ ID NO: 9022 - DNA, 2 bp, Artificial Sequence
  Description of Artificial Sequence: Synthetic oligonucleotide
cg

SEQ ID NO: 9023 - DNA, 2 bp, Artificial Sequence
  Description of Artificial Sequence: Synthetic oligonucleotide
cg

SEQ ID NO: 9024 - DNA, 2 bp, Artificial Sequence
  Description of Artificial Sequence: Synthetic oligonucleotide
cg

SEQ ID NO: 9025 - DNA, 2 bp, Artificial Sequence
  Description of Artificial Sequence: Synthetic oligonucleotide
cg

SEQ ID NO: 9026 - DNA, 2 bp, Artificial Sequence
  Description of Artificial Sequence: Synthetic oligonucleotide
tg

SEQ ID NO: 9027 - DNA, 2 bp, Artificial Sequence
  Description of Artificial Sequence: Synthetic oligonucleotide
cg

SEQ ID NO: 9028 - DNA, 34 bp, Artificial Sequence
  Description of Artificial Sequence: Synthetic oligonucleotide
cgtttgttcggcggttttagaaggtcgggttgcg

SEQ ID NO: 9029 - DNA, 2 bp, Artificial Sequence
  Description of Artificial Sequence: Synthetic oligonucleotide
cg

SEQ ID NO: 9030 - DNA, 2 bp, Artificial Sequence
  Description of Artificial Sequence: Synthetic oligonucleotide
cg

SEQ ID NO: 9031 - DNA, 2 bp, Artificial Sequence
  Description of Artificial Sequence: Synthetic oligonucleotide
cg

SEQ ID NO: 9032 - DNA, 2 bp, Artificial Sequence
  Description of Artificial Sequence: Synthetic oligonucleotide
cg

SEQ ID NO: 9033 - DNA, 2 bp, Artificial Sequence
  Description of Artificial Sequence: Synthetic oligonucleotide
cg

SEQ ID NO: 9034 - DNA, 2 bp, Artificial Sequence
  Description of Artificial Sequence: Synthetic oligonucleotide
cg

SEQ ID NO: 9035 - DNA, 2 bp, Artificial Sequence
  Description of Artificial Sequence: Synthetic oligonucleotide
cg

SEQ ID NO: 9036 - DNA, 2 bp, Artificial Sequence
  Description of Artificial Sequence: Synthetic oligonucleotide
cg

SEQ ID NO: 9037 - DNA, 2 bp, Artificial Sequence
  Description of Artificial Sequence: Synthetic oligonucleotide
cg

SEQ ID NO: 9038 - DNA, 2 bp, Artificial Sequence
  Description of Artificial Sequence: Synthetic oligonucleotide
cg

SEQ ID NO: 9039 - DNA, 211 bp, Artificial Sequence
  Description of Artificial Sequence: Synthetic polynucleotide
cgattttcggcgtagatatagaggtcgtttttagtttcgtcgtttcgtggtttcgttttcgttgtacgtttttttatttttcggatttcgtagggtcgcggcggatacggttcgatcggggacgtgaacgcgtagaattatattttttagcgtttcgttcgcgttggaattatatttttcggggggttcggcggtgtattcgtcggggtcg

SEQ ID NO: 9040 - DNA, 2 bp, Artificial Sequence
  Description of Artificial Sequence: Synthetic oligonucleotide
cg

SEQ ID NO: 9041 - DNA, 2 bp, Artificial Sequence
  Description of Artificial Sequence: Synthetic oligonucleotide
cg

SEQ ID NO: 9042 - DNA, 2 bp, Artificial Sequence
  Description of Artificial Sequence: Synthetic oligonucleotide
cg

SEQ ID NO: 9043 - DNA, 2 bp, Artificial Sequence
  Description of Artificial Sequence: Synthetic oligonucleotide
cg

SEQ ID NO: 9044 - DNA, 2 bp, Artificial Sequence
  Description of Artificial Sequence: Synthetic oligonucleotide
cg

SEQ ID NO: 9045 - DNA, 2 bp, Artificial Sequence
  Description of Artificial Sequence: Synthetic oligonucleotide
cg

SEQ ID NO: 9046 - DNA, 2 bp, Artificial Sequence
  Description of Artificial Sequence: Synthetic oligonucleotide
cg

SEQ ID NO: 9047 - DNA, 2 bp, Artificial Sequence
  Description of Artificial Sequence: Synthetic oligonucleotide
cg

SEQ ID NO: 9048 - DNA, 2 bp, Artificial Sequence
  Description of Artificial Sequence: Synthetic oligonucleotide
cg

SEQ ID NO: 9049 - DNA, 2 bp, Artificial Sequence
  Description of Artificial Sequence: Synthetic oligonucleotide
cg

SEQ ID NO: 9050 - DNA, 95 bp, Artificial Sequence
  Description of Artificial Sequence: Synthetic oligonucleotide
cgggaaaaggggcgcggaagaggggcggggcgggttacggcgcgtagggtttttttttttcgtttcggatttaattaattgggtttgagtttttg

SEQ ID NO: 9051 - DNA, 2 bp, Artificial Sequence
  Description of Artificial Sequence: Synthetic oligonucleotide
cg

SEQ ID NO: 9052 - DNA, 2 bp, Artificial Sequence
  Description of Artificial Sequence: Synthetic oligonucleotide
cg

SEQ ID NO: 9053 - DNA, 2 bp, Artificial Sequence
  Description of Artificial Sequence: Synthetic oligonucleotide
cg

SEQ ID NO: 9054 - DNA, 2 bp, Artificial Sequence
  Description of Artificial Sequence: Synthetic oligonucleotide
cg

SEQ ID NO: 9055 - DNA, 2 bp, Artificial Sequence
  Description of Artificial Sequence: Synthetic oligonucleotide
cg

SEQ ID NO: 9056 - DNA, 2 bp, Artificial Sequence
  Description of Artificial Sequence: Synthetic oligonucleotide
cg

SEQ ID NO: 9057 - DNA, 2 bp, Artificial Sequence
  Description of Artificial Sequence: Synthetic oligonucleotide
cg

SEQ ID NO: 9058 - DNA, 2 bp, Artificial Sequence
  Description of Artificial Sequence: Synthetic oligonucleotide
cg

SEQ ID NO: 9059 - DNA, 2 bp, Artificial Sequence
  Description of Artificial Sequence: Synthetic oligonucleotide
cg

SEQ ID NO: 9060 - DNA, 2 bp, Artificial Sequence
  Description of Artificial Sequence: Synthetic oligonucleotide
cg

SEQ ID NO: 9061 - DNA, 264 bp, Artificial Sequence
  Description of Artificial Sequence: Synthetic polynucleotide
cgggttgtaaggcggtgtattacgtgtgcgcgtttagtatgtacgttagcgtgttgtttatcggtttgtttagtttgtagcgttgtttcgtagttattcgtttttttttggcgtttcggttgcgtagttcggttttggttcgtcgtttgttgttggcggtttggttggtcgttttgttgttcgtcgtttcggtcgtcgtttatcgttatttgtggagggatcgcgtatgttagttgtgttattcgtcgtcggtttacgtcgtcg

SEQ ID NO: 9062 - DNA, 2 bp, Artificial Sequence
  Description of Artificial Sequence: Synthetic oligonucleotide
cg

SEQ ID NO: 9063 - DNA, 2 bp, Artificial Sequence
  Description of Artificial Sequence: Synthetic oligonucleotide
cg

SEQ ID NO: 9064 - DNA, 2 bp, Artificial Sequence
  Description of Artificial Sequence: Synthetic oligonucleotide
cg

SEQ ID NO: 9065 - DNA, 2 bp, Artificial Sequence
  Description of Artificial Sequence: Synthetic oligonucleotide
cg

SEQ ID NO: 9066 - DNA, 2 bp, Artificial Sequence
  Description of Artificial Sequence: Synthetic oligonucleotide
cg

SEQ ID NO: 9067 - DNA, 2 bp, Artificial Sequence
  Description of Artificial Sequence: Synthetic oligonucleotide
cg

SEQ ID NO: 9068 - DNA, 2 bp, Artificial Sequence
  Description of Artificial Sequence: Synthetic oligonucleotide
cg

SEQ ID NO: 9069 - DNA, 2 bp, Artificial Sequence
  Description of Artificial Sequence: Synthetic oligonucleotide
cg

SEQ ID NO: 9070 - DNA, 2 bp, Artificial Sequence
  Description of Artificial Sequence: Synthetic oligonucleotide
cg

SEQ ID NO: 9071 - DNA, 2 bp, Artificial Sequence
  Description of Artificial Sequence: Synthetic oligonucleotide
cg

SEQ ID NO: 9072 - DNA, 59 bp, Artificial Sequence
  Description of Artificial Sequence: Synthetic oligonucleotide
cgtttttcgtttcggagttgtcggcggtatgattcgatacgtcggggcgttcgcgcgcg

SEQ ID NO: 9073 - DNA, 2 bp, Artificial Sequence
  Description of Artificial Sequence: Synthetic oligonucleotide
cg

SEQ ID NO: 9074 - DNA, 2 bp, Artificial Sequence
  Description of Artificial Sequence: Synthetic oligonucleotide
cg

SEQ ID NO: 9075 - DNA, 2 bp, Artificial Sequence
  Description of Artificial Sequence: Synthetic oligonucleotide
cg

SEQ ID NO: 9076 - DNA, 2 bp, Artificial Sequence
  Description of Artificial Sequence: Synthetic oligonucleotide
cg

SEQ ID NO: 9077 - DNA, 2 bp, Artificial Sequence
  Description of Artificial Sequence: Synthetic oligonucleotide
cg

SEQ ID NO: 9078 - DNA, 2 bp, Artificial Sequence
  Description of Artificial Sequence: Synthetic oligonucleotide
cg

SEQ ID NO: 9079 - DNA, 2 bp, Artificial Sequence
  Description of Artificial Sequence: Synthetic oligonucleotide
cg

SEQ ID NO: 9080 - DNA, 2 bp, Artificial Sequence
  Description of Artificial Sequence: Synthetic oligonucleotide
cg

SEQ ID NO: 9081 - DNA, 2 bp, Artificial Sequence
  Description of Artificial Sequence: Synthetic oligonucleotide
cg

SEQ ID NO: 9082 - DNA, 2 bp, Artificial Sequence
  Description of Artificial Sequence: Synthetic oligonucleotide
cg

SEQ ID NO: 9083 - DNA, 4 bp, Artificial Sequence
  Description of Artificial Sequence: Synthetic oligonucleotide
cgcg

SEQ ID NO: 9084 - DNA, 2 bp, Artificial Sequence
  Description of Artificial Sequence: Synthetic oligonucleotide
cg

SEQ ID NO: 9085 - DNA, 2 bp, Artificial Sequence
  Description of Artificial Sequence: Synthetic oligonucleotide
cg

SEQ ID NO: 9086 - DNA, 2 bp, Artificial Sequence
  Description of Artificial Sequence: Synthetic oligonucleotide
cg

SEQ ID NO: 9087 - DNA, 2 bp, Artificial Sequence
  Description of Artificial Sequence: Synthetic oligonucleotide
cg

SEQ ID NO: 9088 - DNA, 2 bp, Artificial Sequence
  Description of Artificial Sequence: Synthetic oligonucleotide
cg

SEQ ID NO: 9089 - DNA, 2 bp, Artificial Sequence
  Description of Artificial Sequence: Synthetic oligonucleotide
cg

SEQ ID NO: 9090 - DNA, 2 bp, Artificial Sequence
  Description of Artificial Sequence: Synthetic oligonucleotide
cg

SEQ ID NO: 9091 - DNA, 2 bp, Artificial Sequence
  Description of Artificial Sequence: Synthetic oligonucleotide
cg

SEQ ID NO: 9092 - DNA, 2 bp, Artificial Sequence
  Description of Artificial Sequence: Synthetic oligonucleotide
cg

SEQ ID NO: 9093 - DNA, 2 bp, Artificial Sequence
  Description of Artificial Sequence: Synthetic oligonucleotide
cg

SEQ ID NO: 9094 - DNA, 324 bp, Artificial Sequence
  Description of Artificial Sequence: Synthetic polynucleotide
cggcgaaggtttcgtgttttacgagattttttttgttgtattcgaagttatttattatttttatggtcgcgttttcggggtatatagcggacgggcgggcggcgtagtgcggcgtaggtattagtatcgcggtttcgcgggttcggagcgcgttagcgtgcggcgggtttggggtagtcgtagtttcgggttcgggcggatttttatgtcgagagatcggagcggaaattggggaagttgtcgcgcggagttagggttagcgaggttcggttcggtttttgtcgtttatggttcggtttgtcgtcggtcgttggttgtttggcg

SEQ ID NO: 9095 - DNA, 2 bp, Artificial Sequence
  Description of Artificial Sequence: Synthetic oligonucleotide
cg

SEQ ID NO: 9096 - DNA, 2 bp, Artificial Sequence
  Description of Artificial Sequence: Synthetic oligonucleotide
cg

SEQ ID NO: 9097 - DNA, 2 bp, Artificial Sequence
  Description of Artificial Sequence: Synthetic oligonucleotide
cg

SEQ ID NO: 9098 - DNA, 2 bp, Artificial Sequence
  Description of Artificial Sequence: Synthetic oligonucleotide
cg

SEQ ID NO: 9099 - DNA, 2 bp, Artificial Sequence
  Description of Artificial Sequence: Synthetic oligonucleotide
cg

SEQ ID NO: 9100 - DNA, 2 bp, Artificial Sequence
  Description of Artificial Sequence: Synthetic oligonucleotide
cg

SEQ ID NO: 9101 - DNA, 2 bp, Artificial Sequence
  Description of Artificial Sequence: Synthetic oligonucleotide
cg

SEQ ID NO: 9102 - DNA, 102 bp, Artificial Sequence
  Description of Artificial Sequence: Synthetic polynucleotide
cgttgagttcgcgttgaataagattttttcgtagttttgcgtttcgcgtcgggtgaaggggcgtgtttttgtaggcgttcggggttcggtttggagttggcg

SEQ ID NO: 9103 - DNA, 24 bp, Artificial Sequence
  Description of Artificial Sequence: Synthetic oligonucleotide
cgtaacgattcgttgtcgtttacg

SEQ ID NO: 9104 - DNA, 521 bp, Artificial Sequence
  Description of Artificial Sequence: Synthetic polynucleotide
cgtggtgggggtgttagttgtaggggtgttttcggtgggtgggagttggtggtttttcgttggtgttatgggattcgtatgttcgttttgcgtttttcggtttttgagtttataggtcgggattttgtttgttagtcgcgtgcgttgtcgtttaatttttgtaggcgtagagcgcgcggcggcggtgatagagaattttgtttggttgtttaaatatagttttttgtagaaggattttgcgttcggggaaggggaggaatttttttttttttgggcgttcgtttttttcgttatggttcggtttttatattcgtttatatttggtcgtagcggggcgttcggggggaggggttgaggtcgcgtttttcgtcgttttttgggcgcgggttaggcggggaggaggggggcgtttcggtcgtgtgtttaggattgttttttagcggttattcgggttttagttttttaggtttggttttgataggcgggcggagtagttagtgcgagatagggaggtcggtgcg

SEQ ID NO: 9105 - DNA, 1484 bp, Artificial Sequence
  Description of Artificial Sequence: Synthetic polynucleotide
cgtaagggcgtcggggagcgggaggggcgttgggggcggtaaggggttttagattttaggttacgaattgtttttttttttttcgggtaagagtttcgttttttttaattgatagaaatttattggggtaggggggcgagtggggagagaggtcgtttagggttcgttattggttgcgtttttttcggttttggtttgggaagcggttttgggtttttcgggcgagtagtttgggcgtcggcgttttttgcgaggaagatcgcggggtgacggtcggtattcgttcggttgggtcgcgttgtcgtttcgatttatttttttttcgcgttcgcgtttttttttttttttttattaggagttcgggattcggagagggcgcgggaggtaggtatacgggttcgattttattttagcgtttatcggggacgcgggcgggcggcgacgggacgcggcgggggcgcggggcgggcgcggttatggagtagtagcggcggcggcggcggcggcggcggtaatattagcgatcgcgggcggacgagcgggcgggtagggtcgtcgggtttagcggatcgaattgtatagtttagtaaaagcgttttcgtttttcgcgcgtcgttttttgcgagtttaaatttattaatattttttaacgttttaatttattttttgaagaaaagtaaaaaaaaaaaaaaaaaaaaaaaaaaaagtaaaaaaagaaaaagtattgatcggagagacggggatatatatatatatatatatatatatatatatataaaattttttttggtttttgttaaaattagtagggttcgtcgcgcgtttgtgtgttagtgtgtgcgagtgtgtgtgcgtgcgggcgtgtgtgtgtgaatgtgattattttaggatttttcgggtttcggagacgttatttttttttttgatatttttttttataaatcggtggcgcggcggaggcggtagagtcgggcgggaagcgcggggtcggtcggggcgttcgtcgttcgtcgtcgttttcgcgcgttcgggggtttcggcgtttttcgagttagggcggttagttcgcggttcgtcgtttgatagatgtttatcgttatggagttgtcgtagtagtatttttgggggttcgggcgagcgacgggagtcgggatttgagcgagcgtcggggttagcggagtcggagtcgtcgggatatgggtgagtacgcgcggcgattttggttcgggagttcgggcgtttagttttttttcgcgtcgcgggttttcgtattttcggaatcgggggcgacgtgtgtgttttgtatgtaaaagtttacgtcgttttgttgggtttttgattttgtattcggcgggaagggggagatcgggtcgagggggcgggatgtcggttcgggcgaggttgtaggagatgggcgcgatttcggcgggtcggcgggtgggcggcgatgttggtttaattggagtggttcgttggtggcggcg

SEQ ID NO: 9106 - DNA, 34 bp, Artificial Sequence
  Description of Artificial Sequence: Synthetic oligonucleotide
cgcgtcgttcgttttcgtttttttcgttttttcg

SEQ ID NO: 9107 - DNA, 14 bp, Artificial Sequence
  Description of Artificial Sequence: Synthetic oligonucleotide
cggcgaggggttcg

SEQ ID NO: 9108 - DNA, 37 bp, Artificial Sequence
  Description of Artificial Sequence: Synthetic oligonucleotide
cgtggcgcgtttattttacggtgttgaagagtagtcg

SEQ ID NO: 9109 - DNA, 34 bp, Artificial Sequence
  Description of Artificial Sequence: Synthetic oligonucleotide
cgggatttgttcgtttttttgtttttggttgtcg

SEQ ID NO: 9110 - DNA, 538 bp, Artificial Sequence
  Description of Artificial Sequence: Synthetic polynucleotide
cgcggggttattttatcgcgagtttttttcgtagttcggttcgggttatttcgattcgttaggtttaatttaataattataatatcggaaaaggaagtaaaggtcgaagtttattcgcggttttgaggtttgtgggaaacgtagtttaataacgaaagagttttgaagtttaagcggagttcgttggtcgtaggggtcgtattacgttttagattttggagttttcgggtgcgtagatttttgttattagtagaggttgtcgttgcgcgttttttaggcgcggaagaggcggttggtggtttttgacggtaaggtgaagtcgaggtagtaatcgggaatttaggttgggaggatagaatggggaataggaagttggggcgagggtggttttgggggaggtggggggtcgcggaattttaggtggtttttgttttatttttggaaagaatcggaagttcgggtcggggagggtgaagggagtcgcggattcggttgtttagtcgaggaggaaattcggattttaggttgagggaggtcg

SEQ ID NO: 9111 - DNA, 109 bp, Artificial Sequence
  Description of Artificial Sequence: Synthetic polynucleotide
cggcgttcggagcgttggattatattttttagaggtatcgttttcggagcgtagttttattttcgttagtttgcgagatttggaggtttcgcgtggggagagggtcgcg

SEQ ID NO: 9112 - DNA, 901 bp, Artificial Sequence
  Description of Artificial Sequence: Synthetic polynucleotide
cgcgcggggtttcggggtcggttttttttcgtcgggcgtttcgggttcgtcgttcgggtttttcgcggatagcggtcggtcgcgtaggtttacggcgcgtattaggtcgttcgttagtttttttagttttttcggtcgtagcgtttcgagtcgcgcggcgtcgcggaacgcgtttagggtttcggggaggcggtcggcgcgggttagcgcgttttttagttttaggtataggtcgcggttcggttgcgttagttcggttagtatggagcgaaagagttcggttgttatttcgtagtcgttcgcgcggaaggtttcgtcgtttttttttaagcgttgggcgatcggtttcgcgcggtcgtagttaggatattggggcggcggcggcggcgggatcggttcggggtttattatcgcggggttgcgacgacgcgggttcggagcgaaggcgcggagtagggaggatgcgttgttgttgggaattggtcggcgggagcgcggttttagttttcgttagtagttacgcgcgtttgggggcggcgcgttgcgagcggttgagatcgcgggcgggggcgggcgtttggtttgggtagcgtttttagcgcggtgtgggcggcgagtttcgtagggttgtaatcgtttcggggtgggggtcgggataggtatcgcgggcgtaatttgagtttttgtttacgcgtagcggttttttagtttcgtcggtttaggtaatttaggtcgttgcggtaacgtagtgatcgcgttttaggttcgcgttttttgcgatgttttttttattcgtttgagggtttttgcgcgattgcgcgcgcgttttttgtttgtcgttttttcgtagaggtgtcggggttttgggagtaggtggttttggtcgcgggttgttggcgcg

SEQ ID NO: 9113 - DNA, 15 bp, Artificial Sequence
  Description of Artificial Sequence: Synthetic oligonucleotide
cgggcggcgcgggcg

SEQ ID NO: 9114 - DNA, 383 bp, Artificial Sequence
  Description of Artificial Sequence: Synthetic polynucleotide
cgggatattttcgaaggcggcgcgttggaggcggggagcggtcggggcgtacggagagggcggggagttcgcgggagggggaggagggggaggagggggaggaggcgcgaggtgggggggagcgcggcgggcggtagggagggagcgggagggaggtaagaaagtagtagaaagtgaggttggtaggcggcggtaaaggagtcggcgcgcggcggcggtaggaagtttgtgttcgagaatagtagaaataagagttagggagggatcgcggtcgcggcggcggcggcgagagcgaaagaggaaattgtagaggaggaagttgcgtcgtagttcgagtcgttcggtattttcgtcgtttttgcgttcgcgtcgcgttttcggcg

SEQ ID NO: 9115 - DNA, 4 bp, Artificial Sequence
  Description of Artificial Sequence: Synthetic oligonucleotide
cgcg

SEQ ID NO: 9116 - DNA, 624 bp, Artificial Sequence
  Description of Artificial Sequence: Synthetic polynucleotide
cgcggaggtgggcgagcgggcgtgcgcgtatttatttgtcggcgcgagggagtgtcgggggggaagggagtggtttttaaaagggggaggggagaaggtagggggcggggagaagtcggttttttaggattcggttgcggcggcgagggaggaggaagaagcggaggaggcggttttcgcgttcgtagggtcgtgttatttgttcgttcgttcgttcgttcgttcgttcgttgcgtcgcgttgtcgatcgttagtatgttgtcgagagtgggttgtttcgcgttgtcgttgtcgtcgtcgtcgttgttgtcgttgttgttgttgttattgggcgcgagtggcggcggcggcggggcgcgcgcggaggtgttgtttcgttgttcgttttgtatattcgagcgtttggtcgtttgcgggttttcgtcggttgcgtcgttcgtcgcggtggtcgtagtggtcggaggcgttcgtatgttatgcgcggagttcgttcgggagtcgggttgcggttgttgttcggtgtgcgttcggttggagggcgaggcgtgcggcgtttatatttcgcgttgcggttaggggttgcgttgttatttttattcgggtttcgagttgtttttgtaggcg

SEQ ID NO: 9117 - DNA, 94 bp, Artificial Sequence
  Description of Artificial Sequence: Synthetic oligonucleotide
cgagatagttagcgagtttaggcggtttttgtagcgttgggagaggaatgtgcgcgaaattaattagagcgaaattagtcggaggagtcggtcg

SEQ ID NO: 9118 - DNA, 63 bp, Artificial Sequence
  Description of Artificial Sequence: Synthetic oligonucleotide
cgtgtagggcgtagagttgggtcgagtcgtcgtcggcgttacgcgagtttcgtagtcgtcgcg

SEQ ID NO: 9119 - DNA, 41 bp, Artificial Sequence
  Description of Artificial Sequence: Synthetic oligonucleotide
cgtcgcggtttttggggttttcgtttttttgttcgttatcg

SEQ ID NO: 9120 - DNA, 1041 bp, Artificial Sequence
  Description of Artificial Sequence: Synthetic polynucleotide
cgcgtagggatcgggtcgggtagagtcgggcggggtggagaggtaagcggagcgcgcggtggggttgaggggaggcgtggggcgagtgttcgttgttcgttttttagtttttttgtttttacgttttttcgttcgtagtcgttcgtagttcggcggtgtagttgtgttggattcggcggcgtcgtagttttttatcgttttttgatgttattggggtgcgggggttcgggcggttcggtgcgcgggttaatagttgtacggttttcgcggtttagcggcgtagggcggggcgcgtttgatagttttttcgtttttcgcgttagttgattggcggttcgagcggtttcggagcggcggaggtttggcggagcgttggagcggagtgggacggttagtttgggtttattttcgtattttgtaggtttcggtttacgtacgttcgtttggagtgcgcgttttatttttaggttaaattatcgttttttttttttcgcgtattttttttttttagttttttttgtattttatttttatttcgtgttatttttaaggaggtttagaatgagcgtcgggataacgttttttgggttttttgtttttaagcggttttcgtttagtgggcgacgttttgtgtgttttcgcggtttttggtcgtgtgtgtcgtgcgtttttgtttttggagatttgcgcgtatttgtatgttggggagggcgggttcgaggtttcgagagttgtgtttagatttaatttttaattttaggggattttttttaggttaagcgagggttttttttggcgggtgtagtcgtagagttttgaggttcgattttattggtttcgtcgtttttcgcgtttattttatcgtataatgtttatagtgaaggcgacgggaaaagtagtagtttaaaggttttgaatttttttttttcgttatacgtacggaattttgagttttcggagtttcggggtcgaggtcggttcgggacggtgtttcgagtagttttttattgttggggagtcggttttgtttttgtttgaacg

SEQ ID NO: 9121 - DNA, 23 bp, Artificial Sequence
  Description of Artificial Sequence: Synthetic oligonucleotide
cgttttcggttcgggttatggcg

SEQ ID NO: 9122 - DNA, 515 bp, Artificial Sequence
  Description of Artificial Sequence: Synthetic polynucleotide
cgtagtagaatattttgatttaaaataaaaatattatgataaaaatattttaggaggtagtcggttttatttcgtttaaagtcggatttcgtttagtttcgtgaaagcgaaggagtattagcgttttttgatttcgtatagttttttcggtagagacggttcgttttttttaagaatcggaagtcggatagcgttaggacgttttattttttttatttgggatttagagaggtagcggttaaggatagggttttcgtcgaggttatcgggtagcgtttaggtttcggtttttgggaggggagtagcgggggaggggtacggggaggggcgagggcggggcgcgtttgggtttcggcgttgggttttttttttgttcgtttcgggggatatttataggatttttgtagatttttgtcgaggtaggatggaggtttgtagggatgtatcgcgggttcgcgattcgggcggtcggaatatagttttttttggtcggagatcggttcggtcgtgagtcg

SEQ ID NO: 9123 - DNA, 1017 bp, Artificial Sequence
  Description of Artificial Sequence: Synthetic polynucleotide
cgggttaggtttgcggaggacgttttcgggcgcgtatatatagttcgaggacgcgttttgtattttaagacgtagggtcggattttatttcgaaatttggtttttatagttttaggtcgaattgtgtttggtttttagttttcgagttcgagttttacgtcgtaaagagatggggttttattgtgtttagttggttttttagtacggacgtgtatttttttttggtttgttttttgttaaaaatcggtagtgcgtttcgtttttttgtttagtcgtagtttgtcgttttttagataaaaagcggcgatcgcggttcggttattcgagtttcgtcgcgttgcgtttttgttgggcggtttatagatggtgtttagtacggggtcgcgtcgagggcgggggcgggaggtcgcgaagagggtcgggcgggaggggaggagacggcggagtagttaattcgcgcgcggtttattagttgatcgtttttgtttatattaggtgtacgtcggttgcggggagtataaagcggggcgtatcgcgggcgtcggtaacgagtcggtgaacgaggcgaggttcgtgcgttcgcggttgtaagcgttcgtttggcggggagaggggtcgacggcgttagttcgggcggcggtatttttaggcgtttggggcgttttttttcggatttggtcgttcgttgtttcgttttttgtattttattttttcgatttttttttttagttttgtttttttttgttttggtttttgagagtcgattgagtttagtttcgtgtagtagcggttgtttgtgtcgtcgtttagttttcggttttggtgttttttcgggggtgttttaaggagttagtgcgcgttgcgggttgggaaggaggcgtcgtttagttagttttttttttttttttcgttttttttttttttttgttgttgttgtcgtcgtcgtcgtcgtgggtgtcgggttcgcgcgtattttaatatttttattagttgggtttcggggtaagtttttggtcg

SEQ ID NO: 9124 - DNA, 8 bp, Artificial Sequence
  Description of Artificial Sequence: Synthetic oligonucleotide
cgcgttcg

SEQ ID NO: 9125 - DNA, 54 bp, Artificial Sequence
  Description of Artificial Sequence: Synthetic oligonucleotide
cgagcgtaggcgggcggagagtagattacgcggaagaggtcgagagagaaagcg

SEQ ID NO: 9126 - DNA, 10 bp, Artificial Sequence
  Description of Artificial Sequence: Synthetic oligonucleotide
cgcgttgtcg

SEQ ID NO: 9127 - DNA, 26 bp, Artificial Sequence
  Description of Artificial Sequence: Synthetic oligonucleotide
cgggtaggttcgattaggcggtcgcg

SEQ ID NO: 9128 - DNA, 934 bp, Artificial Sequence
  Description of Artificial Sequence: Synthetic polynucleotide
cgaatttcggcggtcgtcgcgttttttcgtttcgcggagatcgacgtaggcgttcgttttcgaggtcgaagggtattgggcggcgagggttgcggtagttggcgatttcgggggcgtttgcgcggcgcgcgttagacgaggttgtttcggcggttatttcgcgatttcgcgtcgtcgggatttgcgcgcggagaacgtcggttttggagggagtacgtttttttaaagtgtagaggagggttcggcggcgcgttttcgcggaaattttttttattgtagttatttcggatgtcgatttagtagtttgtttttcgagaaaagagaggggatttgggtagaagggtttcgtttgttttaaaagaaggtgtaaggattagaagataacgaaacgtttattttttgaagggtgggaaaaaaagaaaaagaaaaaggagttatttacgttggagatgttcgttttagatttttttatttttttttttttcgtttcggttttttttttcgaggtttatttaatttgttagagaaggaggaggagtagaagatgggggtcgaggaggaggggaagagaaagagaagtttgttaagaataaagtttttgtcggtaagcgcggggatttcgtagtggagggtattgcggagtttcggggagttatagcgggggtttcgggtttaaatgtttttgttcggagttcgagtcgatatatatatttagttcgatttttttttgttttcggttcgagttttttagtttggttcgtcggttcgtcgttttgtacgttttcgtcggttagttttgttaaagtaaagagttgcgttttttgagttcgttcggtcgaggggaggggacgtttcgagtttggtcgcgtgcgaggtttcgggcgcgttttggtttttcggttcgagagcgcgtagttcgggtttttttttcgcg

SEQ ID NO: 9129 - DNA, 279 bp, Artificial Sequence
  Description of Artificial Sequence: Synthetic polynucleotide
cgcggggtaaggaattcgcgggtagttattttcgttaggggtagggttcggttagttaggcgcgagaaggttaggcgaggtcgattgcgcggggtgaagacgttaggtcgatagttgcgggttttatcgttagttttgacgcgagtttgcgttttggcgacggcggagggcgggtagggggcgcgggcgttgttacggcgtttgtttagaatcggtcgggaacgtcgcgggcgggttttttcggtttttcgtttttttagttttgtttttaggttttcg

SEQ ID NO: 9130 - DNA, 2 bp, Artificial Sequence
  Description of Artificial Sequence: Synthetic oligonucleotide
cg

SEQ ID NO: 9131 - DNA, 9 bp, Artificial Sequence
  Description of Artificial Sequence: Synthetic oligonucleotide
cgtttcgcg

SEQ ID NO: 9132 - DNA, 11 bp, Artificial Sequence
  Description of Artificial Sequence: Synthetic oligonucleotide
cgagcgtatcg

SEQ ID NO: 9133 - DNA, 30 bp, Artificial Sequence
  Description of Artificial Sequence: Synthetic oligonucleotide
cgtttgtaattttagttatttaggaggtcg

SEQ ID NO: 9134 - DNA, 10 bp, Artificial Sequence
  Description of Artificial Sequence: Synthetic oligonucleotide
cgttttcgcg

SEQ ID NO: 9135 - DNA, 56 bp, Artificial Sequence
  Description of Artificial Sequence: Synthetic oligonucleotide
cggcgtttgatgagcggcgggttcggatacgaggggacggggtcgatttgtgggcg

SEQ ID NO: 9136 - DNA, 98 bp, Artificial Sequence
  Description of Artificial Sequence: Synthetic oligonucleotide
cggttagtagggcggggtaggaggttgggagagggacgggtgcgggggtgggggagaggaagggagcggttacgtgtgaggggcggttcgaggttacg

SEQ ID NO: 9137 - DNA, 33 bp, Artificial Sequence
  Description of Artificial Sequence: Synthetic oligonucleotide
cgggaggacgcgtaggggcggtcgtcgtcgtcg

SEQ ID NO: 9138 - DNA, 48 bp, Artificial Sequence
  Description of Artificial Sequence: Synthetic oligonucleotide
cgttttattttttttattatatacgtattttttattttaattttttcg

SEQ ID NO: 9139 - DNA, 93 bp, Artificial Sequence
  Description of Artificial Sequence: Synthetic oligonucleotide
cgatttgtttcggtcgtattcgttttcgttttagtacgcgacgttgttcggcgcgatttttgttttttcggtttagttttatcgttgttttcg

SEQ ID NO: 9140 - DNA, 2 bp, Artificial Sequence
  Description of Artificial Sequence: Synthetic oligonucleotide
cg

SEQ ID NO: 9141 - DNA, 2 bp, Artificial Sequence
  Description of Artificial Sequence: Synthetic oligonucleotide
cg

SEQ ID NO: 9142 - DNA, 2 bp, Artificial Sequence
  Description of Artificial Sequence: Synthetic oligonucleotide
cg

SEQ ID NO: 9143 - DNA, 2 bp, Artificial Sequence
  Description of Artificial Sequence: Synthetic oligonucleotide
cg

SEQ ID NO: 9144 - DNA, 2 bp, Artificial Sequence
  Description of Artificial Sequence: Synthetic oligonucleotide
cg

SEQ ID NO: 9145 - DNA, 2 bp, Artificial Sequence
  Description of Artificial Sequence: Synthetic oligonucleotide
cg

SEQ ID NO: 9146 - DNA, 2 bp, Artificial Sequence
  Description of Artificial Sequence: Synthetic oligonucleotide
cg

SEQ ID NO: 9147 - DNA, 42 bp, Artificial Sequence
  Description of Artificial Sequence: Synthetic oligonucleotide
cggagcgaggcgcgcgttcggttagagagcgagcgcgtaacg

SEQ ID NO: 9148 - DNA, 2 bp, Artificial Sequence
  Description of Artificial Sequence: Synthetic oligonucleotide
cg

SEQ ID NO: 9149 - DNA, 2 bp, Artificial Sequence
  Description of Artificial Sequence: Synthetic oligonucleotide
cg

SEQ ID NO: 9150 - DNA, 2 bp, Artificial Sequence
  Description of Artificial Sequence: Synthetic oligonucleotide
cg

SEQ ID NO: 9151 - DNA, 2 bp, Artificial Sequence
  Description of Artificial Sequence: Synthetic oligonucleotide
cg

SEQ ID NO: 9152 - DNA, 2 bp, Artificial Sequence
  Description of Artificial Sequence: Synthetic oligonucleotide
cg

SEQ ID NO: 9153 - DNA, 2 bp, Artificial Sequence
  Description of Artificial Sequence: Synthetic oligonucleotide
cg

SEQ ID NO: 9154 - DNA, 2 bp, Artificial Sequence
  Description of Artificial Sequence: Synthetic oligonucleotide
cg

SEQ ID NO: 9155 - DNA, 2 bp, Artificial Sequence
  Description of Artificial Sequence: Synthetic oligonucleotide
cg

SEQ ID NO: 9156 - DNA, 2 bp, Artificial Sequence
  Description of Artificial Sequence: Synthetic oligonucleotide
cg

SEQ ID NO: 9157 - DNA, 2 bp, Artificial Sequence
  Description of Artificial Sequence: Synthetic oligonucleotide
cg

SEQ ID NO: 9158 - DNA, 40 bp, Artificial Sequence
  Description of Artificial Sequence: Synthetic oligonucleotide
cggcgtattggcgttgggagtagggtcgtatttcggcgcg

SEQ ID NO: 9159 - DNA, 2 bp, Artificial Sequence
  Description of Artificial Sequence: Synthetic oligonucleotide
cg

SEQ ID NO: 9160 - DNA, 2 bp, Artificial Sequence
  Description of Artificial Sequence: Synthetic oligonucleotide
cg

SEQ ID NO: 9161 - DNA, 2 bp, Artificial Sequence
  Description of Artificial Sequence: Synthetic oligonucleotide
cg

SEQ ID NO: 9162 - DNA, 2 bp, Artificial Sequence
  Description of Artificial Sequence: Synthetic oligonucleotide
cg

SEQ ID NO: 9163 - DNA, 2 bp, Artificial Sequence
  Description of Artificial Sequence: Synthetic oligonucleotide
cg

SEQ ID NO: 9164 - DNA, 2 bp, Artificial Sequence
  Description of Artificial Sequence: Synthetic oligonucleotide
cg

SEQ ID NO: 9165 - DNA, 2 bp, Artificial Sequence
  Description of Artificial Sequence: Synthetic oligonucleotide
cg

SEQ ID NO: 9166 - DNA, 2 bp, Artificial Sequence
  Description of Artificial Sequence: Synthetic oligonucleotide
cg

SEQ ID NO: 9167 - DNA, 2 bp, Artificial Sequence
  Description of Artificial Sequence: Synthetic oligonucleotide
cg

SEQ ID NO: 9168 - DNA, 2 bp, Artificial Sequence
  Description of Artificial Sequence: Synthetic oligonucleotide
cg

SEQ ID NO: 9169 - DNA, 2 bp, Artificial Sequence
  Description of Artificial Sequence: Synthetic oligonucleotide
cg

SEQ ID NO: 9170 - DNA, 2 bp, Artificial Sequence
  Description of Artificial Sequence: Synthetic oligonucleotide
cg

SEQ ID NO: 9171 - DNA, 2 bp, Artificial Sequence
  Description of Artificial Sequence: Synthetic oligonucleotide
cg

SEQ ID NO: 9172 - DNA, 2 bp, Artificial Sequence
  Description of Artificial Sequence: Synthetic oligonucleotide
cg

SEQ ID NO: 9173 - DNA, 2 bp, Artificial Sequence
  Description of Artificial Sequence: Synthetic oligonucleotide
cg

SEQ ID NO: 9174 - DNA, 2 bp, Artificial Sequence
  Description of Artificial Sequence: Synthetic oligonucleotide
cg

SEQ ID NO: 9175 - DNA, 2 bp, Artificial Sequence
  Description of Artificial Sequence: Synthetic oligonucleotide
cg

SEQ ID NO: 9176 - DNA, 2 bp, Artificial Sequence
  Description of Artificial Sequence: Synthetic oligonucleotide
cg

SEQ ID NO: 9177 - DNA, 2 bp, Artificial Sequence
  Description of Artificial Sequence: Synthetic oligonucleotide
cg

SEQ ID NO: 9178 - DNA, 2 bp, Artificial Sequence
  Description of Artificial Sequence: Synthetic oligonucleotide
cg

SEQ ID NO: 9179 - DNA, 2 bp, Artificial Sequence
  Description of Artificial Sequence: Synthetic oligonucleotide
cg

SEQ ID NO: 9180 - DNA, 42 bp, Artificial Sequence
  Description of Artificial Sequence: Synthetic oligonucleotide
cgggcgggcggcgttcggtttgagggagcggggcggttttcg

SEQ ID NO: 9181 - DNA, 2 bp, Artificial Sequence
  Description of Artificial Sequence: Synthetic oligonucleotide
cg

SEQ ID NO: 9182 - DNA, 2 bp, Artificial Sequence
  Description of Artificial Sequence: Synthetic oligonucleotide
cg

SEQ ID NO: 9183 - DNA, 2 bp, Artificial Sequence
  Description of Artificial Sequence: Synthetic oligonucleotide
cg

SEQ ID NO: 9184 - DNA, 2 bp, Artificial Sequence
  Description of Artificial Sequence: Synthetic oligonucleotide
cg

SEQ ID NO: 9185 - DNA, 2 bp, Artificial Sequence
  Description of Artificial Sequence: Synthetic oligonucleotide
cg

SEQ ID NO: 9186 - DNA, 2 bp, Artificial Sequence
  Description of Artificial Sequence: Synthetic oligonucleotide
cg

SEQ ID NO: 9187 - DNA, 2 bp, Artificial Sequence
  Description of Artificial Sequence: Synthetic oligonucleotide
cg

SEQ ID NO: 9188 - DNA, 2 bp, Artificial Sequence
  Description of Artificial Sequence: Synthetic oligonucleotide
cg

SEQ ID NO: 9189 - DNA, 2 bp, Artificial Sequence
  Description of Artificial Sequence: Synthetic oligonucleotide
cg

SEQ ID NO: 9190 - DNA, 2 bp, Artificial Sequence
  Description of Artificial Sequence: Synthetic oligonucleotide
cg

SEQ ID NO: 9191 - DNA, 20 bp, Artificial Sequence
  Description of Artificial Sequence: Synthetic oligonucleotide
ygttygtygygygtattayg

SEQ ID NO: 9192 - DNA, 116 bp, Artificial Sequence
  Description of Artificial Sequence: Synthetic polynucleotide
ygagagyggggyggggttgggggygggyggggagttgtttygggtggtttygtttttagtayggaggatttttttygygaggygtygtygttttggagtttygtttayggygttyg

SEQ ID NO: 9193 - DNA, 2 bp, Artificial Sequence
  Description of Artificial Sequence: Synthetic oligonucleotide
yg

SEQ ID NO: 9194 - DNA, 2 bp, Artificial Sequence
  Description of Artificial Sequence: Synthetic oligonucleotide
yg

SEQ ID NO: 9195 - DNA, 2 bp, Artificial Sequence
  Description of Artificial Sequence: Synthetic oligonucleotide
yg

SEQ ID NO: 9196 - DNA, 2 bp, Artificial Sequence
  Description of Artificial Sequence: Synthetic oligonucleotide
yg

SEQ ID NO: 9197 - DNA, 2 bp, Artificial Sequence
  Description of Artificial Sequence: Synthetic oligonucleotide
yg

SEQ ID NO: 9198 - DNA, 2 bp, Artificial Sequence
  Description of Artificial Sequence: Synthetic oligonucleotide
yg

SEQ ID NO: 9199 - DNA, 2 bp, Artificial Sequence
  Description of Artificial Sequence: Synthetic oligonucleotide
yg

SEQ ID NO: 9200 - DNA, 2 bp, Artificial Sequence
  Description of Artificial Sequence: Synthetic oligonucleotide
yg

SEQ ID NO: 9201 - DNA, 2 bp, Artificial Sequence
  Description of Artificial Sequence: Synthetic oligonucleotide
yg

SEQ ID NO: 9202 - DNA, 2 bp, Artificial Sequence
  Description of Artificial Sequence: Synthetic oligonucleotide
yg

SEQ ID NO: 9203 - DNA, 44 bp, Artificial Sequence
  Description of Artificial Sequence: Synthetic oligonucleotide
yggggggygygtgaggggtgygagyggggttyggggggygygyg

SEQ ID NO: 9204 - DNA, 2 bp, Artificial Sequence
  Description of Artificial Sequence: Synthetic oligonucleotide
yg

SEQ ID NO: 9205 - DNA, 2 bp, Artificial Sequence
  Description of Artificial Sequence: Synthetic oligonucleotide
yg

SEQ ID NO: 9206 - DNA, 2 bp, Artificial Sequence
  Description of Artificial Sequence: Synthetic oligonucleotide
yg

SEQ ID NO: 9207 - DNA, 2 bp, Artificial Sequence
  Description of Artificial Sequence: Synthetic oligonucleotide
yg

SEQ ID NO: 9208 - DNA, 2 bp, Artificial Sequence
  Description of Artificial Sequence: Synthetic oligonucleotide
yg

SEQ ID NO: 9209 - DNA, 2 bp, Artificial Sequence
  Description of Artificial Sequence: Synthetic oligonucleotide
yg

SEQ ID NO: 9210 - DNA, 2 bp, Artificial Sequence
  Description of Artificial Sequence: Synthetic oligonucleotide
yg

SEQ ID NO: 9211 - DNA, 2 bp, Artificial Sequence
  Description of Artificial Sequence: Synthetic oligonucleotide
yg

SEQ ID NO: 9212 - DNA, 2 bp, Artificial Sequence
  Description of Artificial Sequence: Synthetic oligonucleotide
yg

SEQ ID NO: 9213 - DNA, 2 bp, Artificial Sequence
  Description of Artificial Sequence: Synthetic oligonucleotide
yg

SEQ ID NO: 9214 - DNA, 34 bp, Artificial Sequence
  Description of Artificial Sequence: Synthetic oligonucleotide
ygtagttygattttttagagtygtygagtagayg

SEQ ID NO: 9215 - DNA, 2 bp, Artificial Sequence
  Description of Artificial Sequence: Synthetic oligonucleotide
yg

SEQ ID NO: 9216 - DNA, 2 bp, Artificial Sequence
  Description of Artificial Sequence: Synthetic oligonucleotide
yg

SEQ ID NO: 9217 - DNA, 2 bp, Artificial Sequence
  Description of Artificial Sequence: Synthetic oligonucleotide
yg

SEQ ID NO: 9218 - DNA, 2 bp, Artificial Sequence
  Description of Artificial Sequence: Synthetic oligonucleotide
yg

SEQ ID NO: 9219 - DNA, 2 bp, Artificial Sequence
  Description of Artificial Sequence: Synthetic oligonucleotide
yg

SEQ ID NO: 9220 - DNA, 2 bp, Artificial Sequence
  Description of Artificial Sequence: Synthetic oligonucleotide
yg

SEQ ID NO: 9221 - DNA, 2 bp, Artificial Sequence
  Description of Artificial Sequence: Synthetic oligonucleotide
yg

SEQ ID NO: 9222 - DNA, 2 bp, Artificial Sequence
  Description of Artificial Sequence: Synthetic oligonucleotide
yg

SEQ ID NO: 9223 - DNA, 2 bp, Artificial Sequence
  Description of Artificial Sequence: Synthetic oligonucleotide
yg

SEQ ID NO: 9224 - DNA, 2 bp, Artificial Sequence
  Description of Artificial Sequence: Synthetic oligonucleotide
yg

SEQ ID NO: 9225 - DNA, 211 bp, Artificial Sequence
  Description of Artificial Sequence: Synthetic polynucleotide
ygatttyggygggtgtatygtygagtttttygggaagtgtagttttagygygagygggaygttgggaaatgtagttttgygygtttaygttttygatygggtygtgttygtygyggttttgygaggttygaggggtaagggagygtgtagygggggygggattaygaggyggyggggttgggggyggtttttgtgtttgygtyggggatyg

SEQ ID NO: 9226 - DNA, 2 bp, Artificial Sequence
  Description of Artificial Sequence: Synthetic oligonucleotide
yg

SEQ ID NO: 9227 - DNA, 2 bp, Artificial Sequence
  Description of Artificial Sequence: Synthetic oligonucleotide
yg

SEQ ID NO: 9228 - DNA, 2 bp, Artificial Sequence
  Description of Artificial Sequence: Synthetic oligonucleotide
yg

SEQ ID NO: 9229 - DNA, 2 bp, Artificial Sequence
  Description of Artificial Sequence: Synthetic oligonucleotide
yg

SEQ ID NO: 9230 - DNA, 2 bp, Artificial Sequence
  Description of Artificial Sequence: Synthetic oligonucleotide
yg

SEQ ID NO: 9231 - DNA, 2 bp, Artificial Sequence
  Description of Artificial Sequence: Synthetic oligonucleotide
yg

SEQ ID NO: 9232 - DNA, 2 bp, Artificial Sequence
  Description of Artificial Sequence: Synthetic oligonucleotide
yg

SEQ ID NO: 9233 - DNA, 2 bp, Artificial Sequence
  Description of Artificial Sequence: Synthetic oligonucleotide
yg

SEQ ID NO: 9234 - DNA, 2 bp, Artificial Sequence
  Description of Artificial Sequence: Synthetic oligonucleotide
yg

SEQ ID NO: 9235 - DNA, 2 bp, Artificial Sequence
  Description of Artificial Sequence: Synthetic oligonucleotide
yg

SEQ ID NO: 9236 - DNA, 95 bp, Artificial Sequence
  Description of Artificial Sequence: Synthetic oligonucleotide
yggaagtttaagtttaattaattgagttygaggygggagggaagggttttgygygtygtggttygtttygtttttttttygygttttttttttyg

SEQ ID NO: 9237 - DNA, 2 bp, Artificial Sequence
  Description of Artificial Sequence: Synthetic oligonucleotide
yg

SEQ ID NO: 9238 - DNA, 2 bp, Artificial Sequence
  Description of Artificial Sequence: Synthetic oligonucleotide
yg

SEQ ID NO: 9239 - DNA, 2 bp, Artificial Sequence
  Description of Artificial Sequence: Synthetic oligonucleotide
yg

SEQ ID NO: 9240 - DNA, 2 bp, Artificial Sequence
  Description of Artificial Sequence: Synthetic oligonucleotide
yg

SEQ ID NO: 9241 - DNA, 2 bp, Artificial Sequence
  Description of Artificial Sequence: Synthetic oligonucleotide
yg

SEQ ID NO: 9242 - DNA, 2 bp, Artificial Sequence
  Description of Artificial Sequence: Synthetic oligonucleotide
yg

SEQ ID NO: 9243 - DNA, 2 bp, Artificial Sequence
  Description of Artificial Sequence: Synthetic oligonucleotide
yg

SEQ ID NO: 9244 - DNA, 2 bp, Artificial Sequence
  Description of Artificial Sequence: Synthetic oligonucleotide
yg

SEQ ID NO: 9245 - DNA, 2 bp, Artificial Sequence
  Description of Artificial Sequence: Synthetic oligonucleotide
yg

SEQ ID NO: 9246 - DNA, 2 bp, Artificial Sequence
  Description of Artificial Sequence: Synthetic oligonucleotide
yg

SEQ ID NO: 9247 - DNA, 264 bp, Artificial Sequence
  Description of Artificial Sequence: Synthetic polynucleotide
yggyggygtggatyggygaygggtggtatagttggtataygyggtttttttataggtggyggtagayggyggtygggayggygagtaatagggyggttagttagatygttagtagtaggyggygggttagggtygggttgygtagtygaggygttaggaaggggygggtgattgygaggtagygttgtaggttgagtaggtyggtgagtagtaygttggygtatatgttgagygygtataygtagtatatygttttgtagttyg

SEQ ID NO: 9248 - DNA, 2 bp, Artificial Sequence
  Description of Artificial Sequence: Synthetic oligonucleotide
yg

SEQ ID NO: 9249 - DNA, 2 bp, Artificial Sequence
  Description of Artificial Sequence: Synthetic oligonucleotide
yg

SEQ ID NO: 9250 - DNA, 2 bp, Artificial Sequence
  Description of Artificial Sequence: Synthetic oligonucleotide
yg

SEQ ID NO: 9251 - DNA, 2 bp, Artificial Sequence
  Description of Artificial Sequence: Synthetic oligonucleotide
yg

SEQ ID NO: 9252 - DNA, 2 bp, Artificial Sequence
  Description of Artificial Sequence: Synthetic oligonucleotide
yg

SEQ ID NO: 9253 - DNA, 2 bp, Artificial Sequence
  Description of Artificial Sequence: Synthetic oligonucleotide
yg

SEQ ID NO: 9254 - DNA, 2 bp, Artificial Sequence
  Description of Artificial Sequence: Synthetic oligonucleotide
yg

SEQ ID NO: 9255 - DNA, 2 bp, Artificial Sequence
  Description of Artificial Sequence: Synthetic oligonucleotide
yg

SEQ ID NO: 9256 - DNA, 2 bp, Artificial Sequence
  Description of Artificial Sequence: Synthetic oligonucleotide
yg

SEQ ID NO: 9257 - DNA, 2 bp, Artificial Sequence
  Description of Artificial Sequence: Synthetic oligonucleotide
yg

SEQ ID NO: 9258 - DNA, 59 bp, Artificial Sequence
  Description of Artificial Sequence: Synthetic oligonucleotide
ygygygygggygtttyggygtgtyggattatgtygtyggtagtttygggayggggaayg

SEQ ID NO: 9259 - DNA, 2 bp, Artificial Sequence
  Description of Artificial Sequence: Synthetic oligonucleotide
yg

SEQ ID NO: 9260 - DNA, 2 bp, Artificial Sequence
  Description of Artificial Sequence: Synthetic oligonucleotide
yg

SEQ ID NO: 9261 - DNA, 2 bp, Artificial Sequence
  Description of Artificial Sequence: Synthetic oligonucleotide
yg

SEQ ID NO: 9262 - DNA, 2 bp, Artificial Sequence
  Description of Artificial Sequence: Synthetic oligonucleotide
yg

SEQ ID NO: 9263 - DNA, 2 bp, Artificial Sequence
  Description of Artificial Sequence: Synthetic oligonucleotide
yg

SEQ ID NO: 9264 - DNA, 2 bp, Artificial Sequence
  Description of Artificial Sequence: Synthetic oligonucleotide
yg

SEQ ID NO: 9265 - DNA, 2 bp, Artificial Sequence
  Description of Artificial Sequence: Synthetic oligonucleotide
yg

SEQ ID NO: 9266 - DNA, 2 bp, Artificial Sequence
  Description of Artificial Sequence: Synthetic oligonucleotide
yg

SEQ ID NO: 9267 - DNA, 2 bp, Artificial Sequence
  Description of Artificial Sequence: Synthetic oligonucleotide
yg

SEQ ID NO: 9268 - DNA, 2 bp, Artificial Sequence
  Description of Artificial Sequence: Synthetic oligonucleotide
yg

SEQ ID NO: 9269 - DNA, 4 bp, Artificial Sequence
  Description of Artificial Sequence: Synthetic oligonucleotide
ygyg

SEQ ID NO: 9270 - DNA, 2 bp, Artificial Sequence
  Description of Artificial Sequence: Synthetic oligonucleotide
yg

SEQ ID NO: 9271 - DNA, 2 bp, Artificial Sequence
  Description of Artificial Sequence: Synthetic oligonucleotide
yg

SEQ ID NO: 9272 - DNA, 2 bp, Artificial Sequence
  Description of Artificial Sequence: Synthetic oligonucleotide
yg

SEQ ID NO: 9273 - DNA, 2 bp, Artificial Sequence
  Description of Artificial Sequence: Synthetic oligonucleotide
yg

SEQ ID NO: 9274 - DNA, 2 bp, Artificial Sequence
  Description of Artificial Sequence: Synthetic oligonucleotide
yg

SEQ ID NO: 9275 - DNA, 2 bp, Artificial Sequence
  Description of Artificial Sequence: Synthetic oligonucleotide
yg

SEQ ID NO: 9276 - DNA, 2 bp, Artificial Sequence
  Description of Artificial Sequence: Synthetic oligonucleotide
yg

SEQ ID NO: 9277 - DNA, 2 bp, Artificial Sequence
  Description of Artificial Sequence: Synthetic oligonucleotide
yg

SEQ ID NO: 9278 - DNA, 2 bp, Artificial Sequence
  Description of Artificial Sequence: Synthetic oligonucleotide
yg

SEQ ID NO: 9279 - DNA, 2 bp, Artificial Sequence
  Description of Artificial Sequence: Synthetic oligonucleotide
yg

SEQ ID NO: 9280 - DNA, 324 bp, Artificial Sequence
  Description of Artificial Sequence: Synthetic polynucleotide
ygttagatagttagyggtyggyggtaggtygggttatgagyggtaggggtygggtygggtttygttgattttggtttygygyggtagtttttttagttttygtttyggtttttyggtatgagagttygttygggttyggggttgyggttgttttagattygtygtaygttggygygtttygggttygyggagtygyggtgttgatatttgygtygtattgygtygttygttygttygttgtgtgtttygggggygyggttatggaggtggtgggtgatttygagtatagtaagagggatttygtgggatayggggttttygtyg

SEQ ID NO: 9281 - DNA, 2 bp, Artificial Sequence
  Description of Artificial Sequence: Synthetic oligonucleotide
yg

SEQ ID NO: 9282 - DNA, 2 bp, Artificial Sequence
  Description of Artificial Sequence: Synthetic oligonucleotide
yg

SEQ ID NO: 9283 - DNA, 2 bp, Artificial Sequence
  Description of Artificial Sequence: Synthetic oligonucleotide
yg

SEQ ID NO: 9284 - DNA, 2 bp, Artificial Sequence
  Description of Artificial Sequence: Synthetic oligonucleotide
yg

SEQ ID NO: 9285 - DNA, 2 bp, Artificial Sequence
  Description of Artificial Sequence: Synthetic oligonucleotide
yg

SEQ ID NO: 9286 - DNA, 2 bp, Artificial Sequence
  Description of Artificial Sequence: Synthetic oligonucleotide
yg

SEQ ID NO: 9287 - DNA, 2 bp, Artificial Sequence
  Description of Artificial Sequence: Synthetic oligonucleotide
yg

SEQ ID NO: 9288 - DNA, 102 bp, Artificial Sequence
  Description of Artificial Sequence: Synthetic polynucleotide
ygttagttttaggtygagtttygagygtttgtaggaataygtttttttattyggygygggaygtagagttgygagagaattttgtttagygyggatttaayg

SEQ ID NO: 9289 - DNA, 24 bp, Artificial Sequence
  Description of Artificial Sequence: Synthetic oligonucleotide
ygtgggyggtagygagtygttgyg

SEQ ID NO: 9290 - DNA, 521 bp, Artificial Sequence
  Description of Artificial Sequence: Synthetic polynucleotide
ygtatyggtttttttgtttygtattggttgtttygttygtttgttaaggttaggtttggggggttggggttygagtggtygttgggggatagttttgggtataygatyggagygtttttttttttttygtttggttygygtttaggggayggygagagaygyggttttagttttttttttygggygtttygttgyggttagatgtgggyggatgtggaggtygggttatggygaggagggygggygtttagaggggaagagattttttttttttttygggygtagggtttttttgtaggaggttgtatttgggtagttaaataaagttttttgttatygtygtygygygttttgygtttgtaagggttaaayggtagygtaygyggttggtaggtaggatttyggtttgtgggtttaagagtygaggggygtagggygaatatgygagttttatggtattagygagaggttattaatttttatttatygagggtatttttgtagttaatatttttattayg

SEQ ID NO: 9291 - DNA, 1484 bp, Artificial Sequence
  Description of Artificial Sequence: Synthetic polynucleotide
ygtygttattaaygagttattttaattgagttagtatygtygtttattygtyggttygtyggaatygygtttattttttgtaatttygttyggatyggtatttygttttttyggttyggttttttttttttygtygggtgtaaagttaaagatttagtaaggygaygtgaatttttgtatgtagggtatataygtygttttyggtttygggagtgygggggttygyggygyggagggaggttgggygttygggttttygggttaaggtygtygygygtgtttatttatgtttyggyggtttyggtttygttggtttyggygttygtttagatttyggttttygtygttygttygagtttttaaaggtgttgttgyggtaattttatggygatgagtatttgttaaayggygagtygygagttggtygttttagttyggggggygtyggggttttygggygygyggaggyggyggygagyggygggygtttyggtyggtttygygtttttygttygattttgtygttttygtygygttatygatttatggagagagatattaagggggaaaatggygttttyggagttygaggagttttggagtaattatatttatatatataygttygtaygtatatatattygtatatattggtatataggygygyggygagttttgttaattttagtaggagttaaaaaaaattttatatatatatatatatatatatatatatatatattttygttttttygattaatgttttttttttttttgtttttttttttttttttttttttttttttgtttttttttaaaggatgggttggagygttaaaaaatgttggtgggtttgggttygtaggaggyggygygyggagggygagggygtttttgttgagttgtgtagttyggttygttgagttyggyggttttgttygttygttygttygttygyggtygttagtgttgtygtygtygtygtygtygtygtygttgttgttttatggtygygttygtttygygttttygtygygtttygtygtygttygttygygttttyggtgagygttggagtggggtygggttygtgtgtttgtttttygygtttttttygaatttyggatttttagtgaaaggaagggggagggygygggygyggaagggaggtggatyggagyggtagygyggtttagtygaaygggtatygatygttatttygygatttttttygtagggggygtyggygtttaagttgttygttyggagggtttagagtygttttttagattagagtygggggaggygtagttagtagygagttttgagygatttttttttttattygtttttttgttttagtgaatttttgttagttgaagggagyggggtttttgttyggggaaaaggaaaatagttygtggtttgggatttgggattttttgtygtttttagygtttttttygtttttyggygtttttgyg

SEQ ID NO: 9292 - DNA, 34 bp, Artificial Sequence
  Description of Artificial Sequence: Synthetic oligonucleotide
yggggaggyggggggagygggagygggygaygyg

SEQ ID NO: 9293 - DNA, 14 bp, Artificial Sequence
  Description of Artificial Sequence: Synthetic oligonucleotide
ygagtttttygtyg

SEQ ID NO: 9294 - DNA, 37 bp, Artificial Sequence
  Description of Artificial Sequence: Synthetic oligonucleotide
yggttgttttttagtatygtggagtgggygygttayg

SEQ ID NO: 9295 - DNA, 34 bp, Artificial Sequence
  Description of Artificial Sequence: Synthetic oligonucleotide
yggtagttaaagataaagaagyggataaatttyg

SEQ ID NO: 9296 - DNA, 538 bp, Artificial Sequence
  Description of Artificial Sequence: Synthetic polynucleotide
yggttttttttagtttggggttygggtttttttttyggttgagtagtygggttygygattttttttatttttttyggttygggttttyggttttttttagaggtgaggtaggggttatttagaatttygyggttttttattttttttaagattattttygttttagttttttgttttttattttgtttttttaatttgggttttygattattgtttygattttattttgtygttagggattattagtygtttttttygygtttaggggaygygtagyggtagtttttgttgatggtaagggtttgygtattyggaaattttagggtttggggygtggtgyggtttttgyggttagygggtttygtttgagttttagggttttttygttgttggattaygttttttataggttttagggtygyggatgaatttygatttttgttttttttttyggtgttgtggttattgagttaagtttggygagtygaggtgattygggtygggttgygggaggagttygyggtgaggtggtttygyg

SEQ ID NO: 9297 - DNA, 109 bp, Artificial Sequence
  Description of Artificial Sequence: Synthetic polynucleotide
ygyggttttttttttaygygaggtttttaaatttygtaaattaayggaaatgaagttaygtttygggagyggtgtttttgggaaatgtagtttagygtttyggaygtyg

SEQ ID NO: 9298 - DNA, 901 bp, Artificial Sequence
  Description of Artificial Sequence: Synthetic polynucleotide
ygygttagtagttygyggttaaggttatttgtttttagggtttyggtatttttgyggggaggyggtaggtagaggaygygygygtagtygygtaggagtttttaggygagtgggggaagtatygtaagagaygyggatttggagygyggttattgygttatygtagygatttgggttatttaagtyggygggattgagaggtygttgygygtgggtaggggtttagattgygttygyggtgtttgtttyggtttttatttyggaaygattgtagttttgyggggttygtygtttatatygygttgaggaygttgtttaagttaggygttygttttygttygyggttttagtygttygtagygygtygtttttagaygygygtggttgttggygagggttgagatygygttttygtyggttagtttttagtagtagygtattttttttgtttygygttttygtttyggattygygtygtygtagtttygyggtgatgagtttygagtyggtttygtygtygtygtygttttagtgttttggttgygatygygyggagtygatygtttagygtttagaggagggygaygaggtttttygygygggygattaygagatggtagtygagttttttygttttatgttagtygggttggygtagtyggatygyggtttgtgtttgaggttgggggaygygttggttygygtyggtygttttttygaagttttgggygygtttygyggygtygygyggttyggggygttgyggtyggaggagttggaagagttggygggyggtttggtgygygtygtgggtttgygygatyggtygttgttygyggagaattygggyggygagttygaggygttyggygagggagggtyggtttyggagtttygygyg

SEQ ID NO: 9299 - DNA, 15 bp, Artificial Sequence
  Description of Artificial Sequence: Synthetic oligonucleotide
ygttygygtygttyg

SEQ ID NO: 9300 - DNA, 383 bp, Artificial Sequence
  Description of Artificial Sequence: Synthetic polynucleotide
ygtygggggygyggygygggygtagaggyggyggggatgtygggyggttygggttgyggygtagtttttttttttgtagttttttttttygttttygtygtygtygtygyggtygyggtttttttttggtttttatttttgttgttttygggtatagattttttgtygtygtygygygtyggtttttttgtygtygtttgttagttttattttttgttatttttttgtttttttttygttttttttttgtygttygtygygtttttttttatttygygttttttttttttttttttttttttttttttttygygggtttttygtttttttygtgygtttyggtygtttttygtttttagygygtygttttyggggatgtttyg

SEQ ID NO: 9301 - DNA, 4 bp, Artificial Sequence
  Description of Artificial Sequence: Synthetic oligonucleotide
ygyg

SEQ ID NO: 9302 - DNA, 624 bp, Artificial Sequence
  Description of Artificial Sequence: Synthetic polynucleotide
ygtttgtaggggtagttyggagttygggtggggatagtagygtagtttttggtygtagygyggggtgtagaygtygtaygtttygttttttagtygggygtatatygagtagtagtygtagttyggttttyggaygagtttygygtatggtatgygggygttttyggttattgyggttatygyggygggyggygtaatyggygggggttygtaggyggttaggygttygggtgtgtagggygggtagyggaatagtattttygygygygtttygtygtygtygttattygygtttagtagtagtagtagtagyggtagtagyggyggyggyggtagyggtagygyggggtagtttattttyggtagtatgttggyggtyggtagygyggygtggygggygagygagygagygggygggygggtaggtggtayggttttgygagygygggagtygtttttttygttttttttttttttttygtygtygtagtygggttttaaagggtyggttttttttygttttttgttttttttttttttttttttggagattatttttttttttttygatattttttygygtyggtaagtgagtgygygtaygttygttygtttattttygyg

SEQ ID NO: 9303 - DNA, 94 bp, Artificial Sequence
  Description of Artificial Sequence: Synthetic oligonucleotide
yggtyggttttttyggttgatttygttttggttgatttygygtatattttttttttagygttgtaaggatygtttgaattygttggttatttyg

SEQ ID NO: 9304 - DNA, 63 bp, Artificial Sequence
  Description of Artificial Sequence: Synthetic oligonucleotide
ygyggyggttgygggattygygtggygtyggygayggttyggtttagttttgygttttgtayg

SEQ ID NO: 9305 - DNA, 41 bp, Artificial Sequence
  Description of Artificial Sequence: Synthetic oligonucleotide
ygatggyggataagagggyggggattttagaagtygyggyg

SEQ ID NO: 9306 - DNA, 1041 bp, Artificial Sequence
  Description of Artificial Sequence: Synthetic polynucleotide
ygtttaaataaaaatagggtyggttttttagtagtggagagttattyggagtatygtttygggtyggtttyggtttygaggtttygggggtttaggatttygtgygtgtggyggggaagaggaatttagagtttttgggttgttgtttttttygtygtttttattgtgaatattgtgyggtggggtgaaygyggggagyggyggggttagtggagtygaattttagggttttgygattgtattygttaggaggggttttygtttggtttgagaaaggttttttgaggttaagagttgggtttgaatataattttyggagtttygagttygttttttttaatatataaataygygtagatttttagaaataggaaygtaygatatatayggttagaagtygygaggatatatagagygtygtttattgggygggggtygtttgggaataaagggtttaggaggygttgtttyggygtttattttgagtttttttgggggtgataygggatgggggtggggtgtaaagggaattgagggaggagagtgygygaggaggggaaagyggtgatttggtttagaggtggggygygtattttaggygagygtgygtgggtygggatttgtagggtaygggggtgggtttaggttggtygttttatttygttttagygtttygttaggttttygtygtttyggggtygttygggtygttagttagttgaygyggggggygggggagttgttaggygygtttygttttgygtygttgggtygyggaggtygtgtagttattggttygygtatygggtygttygggttttygtattttagtgatattaggaggygataaaaggttgyggygtygtyggatttagtatagttgtatygtygagttgygagyggttgygagygagagagygtaagagtaagagagttagagagygagtaaygggtattygttttaygtttttttttagttttatygygygtttygtttgtttttttatttygttygattttattyggttyggtttttgygyg

SEQ ID NO: 9307 - DNA, 23 bp, Artificial Sequence
  Description of Artificial Sequence: Synthetic oligonucleotide
ygttatggttygagtygaaggyg

SEQ ID NO: 9308 - DNA, 515 bp, Artificial Sequence
  Description of Artificial Sequence: Synthetic polynucleotide
ygatttaygatygggtygattttyggttagaaagaattatgtttyggtygttygggtygygggttygyggtgtatttttgtaggtttttattttgtttyggtagaggtttgtaagaattttgtgggtgtttttyggagygggtagaggaggagtttagygtygaggtttaggygygtttygttttygttttttttygtgtttttttttygttgttttttttttaaaggtygagatttggaygttgttyggtggtttyggygggggttttgtttttggtygttgtttttttgaattttaggtgagaagaataaaaygttttgaygttgttyggttttyggtttttggagaggaygggtygtttttgtygagagaattgtgyggaattaggaagygttggtgttttttygtttttaygggattaagygaaattyggttttaaaygaagtaaagtyggttgttttttggagtatttttgttatagtatttttattttgggttagggtattttgttgyg

SEQ ID NO: 9309 - DNA, 1017 bp, Artificial Sequence
  Description of Artificial Sequence: Synthetic polynucleotide
yggttagggatttatttygaggtttagttggtgggggtgttggggtgygygyggattyggtatttayggyggyggyggyggtagtagtagtaggaggaggagaaagaygaggaggaggaggaggattagttgagyggygttttttttttagttygtagygygtattggttttttggggtattttygggagagtattaagatyggagattaggyggygatataggtaatygttgttgtayggggttgggtttagtyggtttttagaggttagggtagggggaggtaggattgggaaggagggtyggagaagtggggtgtagagggyggggtagygagyggttaggttyggaggaaggygttttaggygtttagggatgtygtygttygggttgaygtygtyggttttttttttygttaggygggygtttgtagtygygggygtaygggtttygtttygtttatyggttygttgtyggygttygyggtgygtttygttttgtgtttttygtagtyggygtgtatttggtgtaagtaaaggyggttagttgatgggtygygygyggattggttgtttygtygtttttttttttttygttygatttttttygyggtttttygttttygttttyggygyggtttygtgttgggtattatttgtggatygtttaataaaggygtagygyggyggggttygggtggtygggtygyggtygtygttttttgtttaggggayggtaggttgyggttgggtagggaggygaagygtattgtyggtttttagtaaaagatagattaaaagaaaatataygttygtgttaggaggttagttaggtataatggggttttatttttttgyggygtagaattygggttygggggttgagaattagatatagttyggtttggggttgtgggagttaagtttyggggtgaaattygattttgygttttaaaatatagggygygttttygggttgtgtgtgygygttygggggygtttttygtagatttggttyg

SEQ ID NO: 9310 - DNA, 8 bp, Artificial Sequence
  Description of Artificial Sequence: Synthetic oligonucleotide
ygagygyg

SEQ ID NO: 9311 - DNA, 54 bp, Artificial Sequence
  Description of Artificial Sequence: Synthetic oligonucleotide
ygttttttttttyggtttttttygygtggtttgtttttygttygtttgygttyg

SEQ ID NO: 9312 - DNA, 10 bp, Artificial Sequence
  Description of Artificial Sequence: Synthetic oligonucleotide
ygataaygyg

SEQ ID NO: 9313 - DNA, 26 bp, Artificial Sequence
  Description of Artificial Sequence: Synthetic oligonucleotide
ygyggtygtttggtygaatttgttyg

SEQ ID NO: 9314 - DNA, 934 bp, Artificial Sequence
  Description of Artificial Sequence: Synthetic polynucleotide
ygyggaggagggattygggttgygygttttygggtygaggaattaggaygygttyggagtttygtaygyggttaagttyggggygtttttttttttyggtygggygaatttaaggggygtagttttttgttttgatagagttggtyggyggaggygtgtagagyggygagtyggygagttaggttgagaaattygagtygggaataaagaggggtyggattgagtgtgtgtgtyggttygagtttygggtagaggtatttgggttygaggttttygttgtgatttttygagatttygtagtgttttttattgyggagttttygygtttgtyggtaaaaattttatttttggtaaatttttttttttttttttttttttttyggtttttattttttgttttttttttttttttagtagattaaatgagtttygagaagaaaaatygaagygaaagggaagaaaataagaagatttaaaayggatatttttagygtgggtggttttttttttttttttttttttttttattttttaggaagtggaygtttygttattttttgatttttgtatttttttttggggtaaayggggtttttttgtttagatttttttttttttttyggaaaataaattattaagtyggtattyggggtaattatagtggagagggttttygyggagaygygtygtyggatttttttttgtattttggggaggygtgttttttttagaatyggygtttttygygygtaaatttyggygaygyggggtygyggggtggtygtyggggtagtttygtttagygygygtygygtagaygttttyggagtygttagttatygtagttttygtygtttagtgtttttyggtttygggggygggygtttgygtyggttttygygaagygggaaagygyggyggtygtygggattyg

SEQ ID NO: 9315 - DNA, 279 bp, Artificial Sequence
  Description of Artificial Sequence: Synthetic polynucleotide
yggaggtttgagagtagggttggaggggyggaggatyggggagattygttygyggygttttyggtyggttttgagtaggygtygtggtagygttygygttttttgttygtttttygtygtygttaggaygtaggttygygttagggttggyggtagggttygtagttgtyggtttggygtttttatttygygtagtyggtttygtttagttttttygygtttgattggtyggattttgtttttggyggaggtaattgttygyggattttttatttygyg

SEQ ID NO: 9316 - DNA, 2 bp, Artificial Sequence
  Description of Artificial Sequence: Synthetic oligonucleotide
yg

SEQ ID NO: 9317 - DNA, 9 bp, Artificial Sequence
  Description of Artificial Sequence: Synthetic oligonucleotide
ygyggggyg

SEQ ID NO: 9318 - DNA, 11 bp, Artificial Sequence
  Description of Artificial Sequence: Synthetic oligonucleotide
ygatgygttyg

SEQ ID NO: 9319 - DNA, 30 bp, Artificial Sequence
  Description of Artificial Sequence: Synthetic oligonucleotide
yggttttttgagtagttgagattataagyg

SEQ ID NO: 9320 - DNA, 10 bp, Artificial Sequence
  Description of Artificial Sequence: Synthetic oligonucleotide
ygygggagyg

SEQ ID NO: 9321 - DNA, 56 bp, Artificial Sequence
  Description of Artificial Sequence: Synthetic oligonucleotide
ygtttataaatyggtttygttttttygtgttygggttygtygtttattagaygtyg

SEQ ID NO: 9322 - DNA, 98 bp, Artificial Sequence
  Description of Artificial Sequence: Synthetic oligonucleotide
ygtgatttygggtygttttttataygtgatygtttttttttttttttttattttygtattygttttttttttagttttttgtttygttttgttggtyg

SEQ ID NO: 9323 - DNA, 33 bp, Artificial Sequence
  Description of Artificial Sequence: Synthetic oligonucleotide
ygayggyggyggtygtttttgygygttttttyg

SEQ ID NO: 9324 - DNA, 48 bp, Artificial Sequence
  Description of Artificial Sequence: Synthetic oligonucleotide
ygaaggaattggggtggggggtgygtgtgtggtggagggggtgggayg

SEQ ID NO: 9325 - DNA, 93 bp, Artificial Sequence
  Description of Artificial Sequence: Synthetic oligonucleotide
ygagggtagyggtggggttgggtygggggagtaggggtygygtygggtagygtygygtgttggagyggaggygggtgyggtyggggtaggtyg

SEQ ID NO: 9326 - DNA, 2 bp, Artificial Sequence
  Description of Artificial Sequence: Synthetic oligonucleotide
yg

SEQ ID NO: 9327 - DNA, 2 bp, Artificial Sequence
  Description of Artificial Sequence: Synthetic oligonucleotide
yg

SEQ ID NO: 9328 - DNA, 2 bp, Artificial Sequence
  Description of Artificial Sequence: Synthetic oligonucleotide
yg

SEQ ID NO: 9329 - DNA, 2 bp, Artificial Sequence
  Description of Artificial Sequence: Synthetic oligonucleotide
yg

SEQ ID NO: 9330 - DNA, 2 bp, Artificial Sequence
  Description of Artificial Sequence: Synthetic oligonucleotide
yg

SEQ ID NO: 9331 - DNA, 2 bp, Artificial Sequence
  Description of Artificial Sequence: Synthetic oligonucleotide
yg

SEQ ID NO: 9332 - DNA, 2 bp, Artificial Sequence
  Description of Artificial Sequence: Synthetic oligonucleotide
yg

SEQ ID NO: 9333 - DNA, 42 bp, Artificial Sequence
  Description of Artificial Sequence: Synthetic oligonucleotide
ygttgygygttygttttttggtygggygygygtttygtttyg

SEQ ID NO: 9334 - DNA, 2 bp, Artificial Sequence
  Description of Artificial Sequence: Synthetic oligonucleotide
yg

SEQ ID NO: 9335 - DNA, 2 bp, Artificial Sequence
  Description of Artificial Sequence: Synthetic oligonucleotide
yg

SEQ ID NO: 9336 - DNA, 2 bp, Artificial Sequence
  Description of Artificial Sequence: Synthetic oligonucleotide
yg

SEQ ID NO: 9337 - DNA, 2 bp, Artificial Sequence
  Description of Artificial Sequence: Synthetic oligonucleotide
yg

SEQ ID NO: 9338 - DNA, 2 bp, Artificial Sequence
  Description of Artificial Sequence: Synthetic oligonucleotide
yg

SEQ ID NO: 9339 - DNA, 2 bp, Artificial Sequence
  Description of Artificial Sequence: Synthetic oligonucleotide
yg

SEQ ID NO: 9340 - DNA, 2 bp, Artificial Sequence
  Description of Artificial Sequence: Synthetic oligonucleotide
yg

SEQ ID NO: 9341 - DNA, 2 bp, Artificial Sequence
  Description of Artificial Sequence: Synthetic oligonucleotide
yg

SEQ ID NO: 9342 - DNA, 2 bp, Artificial Sequence
  Description of Artificial Sequence: Synthetic oligonucleotide
yg

SEQ ID NO: 9343 - DNA, 2 bp, Artificial Sequence
  Description of Artificial Sequence: Synthetic oligonucleotide
yg

SEQ ID NO: 9344 - DNA, 40 bp, Artificial Sequence
  Description of Artificial Sequence: Synthetic oligonucleotide
ygygtyggagtgyggttttgtttttagygttagtgygtyg

SEQ ID NO: 9345 - DNA, 2 bp, Artificial Sequence
  Description of Artificial Sequence: Synthetic oligonucleotide
yg

SEQ ID NO: 9346 - DNA, 2 bp, Artificial Sequence
  Description of Artificial Sequence: Synthetic oligonucleotide
yg

SEQ ID NO: 9347 - DNA, 2 bp, Artificial Sequence
  Description of Artificial Sequence: Synthetic oligonucleotide
yg

SEQ ID NO: 9348 - DNA, 2 bp, Artificial Sequence
  Description of Artificial Sequence: Synthetic oligonucleotide
yg

SEQ ID NO: 9349 - DNA, 2 bp, Artificial Sequence
  Description of Artificial Sequence: Synthetic oligonucleotide
yg

SEQ ID NO: 9350 - DNA, 2 bp, Artificial Sequence
  Description of Artificial Sequence: Synthetic oligonucleotide
yg

SEQ ID NO: 9351 - DNA, 2 bp, Artificial Sequence
  Description of Artificial Sequence: Synthetic oligonucleotide
yg

SEQ ID NO: 9352 - DNA, 2 bp, Artificial Sequence
  Description of Artificial Sequence: Synthetic oligonucleotide
yg

SEQ ID NO: 9353 - DNA, 2 bp, Artificial Sequence
  Description of Artificial Sequence: Synthetic oligonucleotide
yg

SEQ ID NO: 9354 - DNA, 2 bp, Artificial Sequence
  Description of Artificial Sequence: Synthetic oligonucleotide
yg

SEQ ID NO: 9355 - DNA, 2 bp, Artificial Sequence
  Description of Artificial Sequence: Synthetic oligonucleotide
yg

SEQ ID NO: 9356 - DNA, 2 bp, Artificial Sequence
  Description of Artificial Sequence: Synthetic oligonucleotide
yg

SEQ ID NO: 9357 - DNA, 2 bp, Artificial Sequence
  Description of Artificial Sequence: Synthetic oligonucleotide
yg

SEQ ID NO: 9358 - DNA, 2 bp, Artificial Sequence
  Description of Artificial Sequence: Synthetic oligonucleotide
yg

SEQ ID NO: 9359 - DNA, 2 bp, Artificial Sequence
  Description of Artificial Sequence: Synthetic oligonucleotide
yg

SEQ ID NO: 9360 - DNA, 2 bp, Artificial Sequence
  Description of Artificial Sequence: Synthetic oligonucleotide
yg

SEQ ID NO: 9361 - DNA, 2 bp, Artificial Sequence
  Description of Artificial Sequence: Synthetic oligonucleotide
yg

SEQ ID NO: 9362 - DNA, 2 bp, Artificial Sequence
  Description of Artificial Sequence: Synthetic oligonucleotide
yg

SEQ ID NO: 9363 - DNA, 2 bp, Artificial Sequence
  Description of Artificial Sequence: Synthetic oligonucleotide
yg

SEQ ID NO: 9364 - DNA, 2 bp, Artificial Sequence
  Description of Artificial Sequence: Synthetic oligonucleotide
yg

SEQ ID NO: 9365 - DNA, 2 bp, Artificial Sequence
  Description of Artificial Sequence: Synthetic oligonucleotide
yg

SEQ ID NO: 9366 - DNA, 42 bp, Artificial Sequence
  Description of Artificial Sequence: Synthetic oligonucleotide
yggagatygtttygtttttttagatygaaygtygttygttyg

SEQ ID NO: 9367 - DNA, 2 bp, Artificial Sequence
  Description of Artificial Sequence: Synthetic oligonucleotide
yg

SEQ ID NO: 9368 - DNA, 2 bp, Artificial Sequence
  Description of Artificial Sequence: Synthetic oligonucleotide
yg

SEQ ID NO: 9369 - DNA, 2 bp, Artificial Sequence
  Description of Artificial Sequence: Synthetic oligonucleotide
yg

SEQ ID NO: 9370 - DNA, 2 bp, Artificial Sequence
  Description of Artificial Sequence: Synthetic oligonucleotide
yg

SEQ ID NO: 9371 - DNA, 2 bp, Artificial Sequence
  Description of Artificial Sequence: Synthetic oligonucleotide
yg

SEQ ID NO: 9372 - DNA, 2 bp, Artificial Sequence
  Description of Artificial Sequence: Synthetic oligonucleotide
yg

SEQ ID NO: 9373 - DNA, 2 bp, Artificial Sequence
  Description of Artificial Sequence: Synthetic oligonucleotide
yg

SEQ ID NO: 9374 - DNA, 2 bp, Artificial Sequence
  Description of Artificial Sequence: Synthetic oligonucleotide
yg

SEQ ID NO: 9375 - DNA, 2 bp, Artificial Sequence
  Description of Artificial Sequence: Synthetic oligonucleotide
yg

SEQ ID NO: 9376 - DNA, 2 bp, Artificial Sequence
  Description of Artificial Sequence: Synthetic oligonucleotide
yg

SEQ ID NO: 9377 - DNA, 20 bp, Artificial Sequence
  Description of Artificial Sequence: Synthetic oligonucleotide
cgttcgtcgcgcgtattacg

SEQ ID NO: 9378 - DNA, 116 bp, Artificial Sequence
  Description of Artificial Sequence: Synthetic polynucleotide
cgagagcggggcggggttgggggcgggcggggagttgtttcgggtggtttcgtttttagtacggaggatttttttcgcgaggcgtcgtcgttttggagtttcgtttacggcgttcg

SEQ ID NO: 9379 - DNA, 2 bp, Artificial Sequence
  Description of Artificial Sequence: Synthetic oligonucleotide
cg

SEQ ID NO: 9380 - DNA, 2 bp, Artificial Sequence
  Description of Artificial Sequence: Synthetic oligonucleotide
cg

SEQ ID NO: 9381 - DNA, 2 bp, Artificial Sequence
  Description of Artificial Sequence: Synthetic oligonucleotide
cg

SEQ ID NO: 9382 - DNA, 2 bp, Artificial Sequence
  Description of Artificial Sequence: Synthetic oligonucleotide
cg

SEQ ID NO: 9383 - DNA, 2 bp, Artificial Sequence
  Description of Artificial Sequence: Synthetic oligonucleotide
cg

SEQ ID NO: 9384 - DNA, 2 bp, Artificial Sequence
  Description of Artificial Sequence: Synthetic oligonucleotide
cg

SEQ ID NO: 9385 - DNA, 2 bp, Artificial Sequence
  Description of Artificial Sequence: Synthetic oligonucleotide
cg

SEQ ID NO: 9386 - DNA, 2 bp, Artificial Sequence
  Description of Artificial Sequence: Synthetic oligonucleotide
cg

SEQ ID NO: 9387 - DNA, 2 bp, Artificial Sequence
  Description of Artificial Sequence: Synthetic oligonucleotide
cg

SEQ ID NO: 9388 - DNA, 2 bp, Artificial Sequence
  Description of Artificial Sequence: Synthetic oligonucleotide
cg

SEQ ID NO: 9389 - DNA, 44 bp, Artificial Sequence
  Description of Artificial Sequence: Synthetic oligonucleotide
cggggggcgcgtgaggggtgcgagcggggttcggggggcgcgcg

SEQ ID NO: 9390 - DNA, 2 bp, Artificial Sequence
  Description of Artificial Sequence: Synthetic oligonucleotide
cg

SEQ ID NO: 9391 - DNA, 2 bp, Artificial Sequence
  Description of Artificial Sequence: Synthetic oligonucleotide
cg

SEQ ID NO: 9392 - DNA, 2 bp, Artificial Sequence
  Description of Artificial Sequence: Synthetic oligonucleotide
cg

SEQ ID NO: 9393 - DNA, 2 bp, Artificial Sequence
  Description of Artificial Sequence: Synthetic oligonucleotide
cg

SEQ ID NO: 9394 - DNA, 2 bp, Artificial Sequence
  Description of Artificial Sequence: Synthetic oligonucleotide
cg

SEQ ID NO: 9395 - DNA, 2 bp, Artificial Sequence
  Description of Artificial Sequence: Synthetic oligonucleotide
cg

SEQ ID NO: 9396 - DNA, 2 bp, Artificial Sequence
  Description of Artificial Sequence: Synthetic oligonucleotide
cg

SEQ ID NO: 9397 - DNA, 2 bp, Artificial Sequence
  Description of Artificial Sequence: Synthetic oligonucleotide
cg

SEQ ID NO: 9398 - DNA, 2 bp, Artificial Sequence
  Description of Artificial Sequence: Synthetic oligonucleotide
cg

SEQ ID NO: 9399 - DNA, 2 bp, Artificial Sequence
  Description of Artificial Sequence: Synthetic oligonucleotide
cg

SEQ ID NO: 9400 - DNA, 34 bp, Artificial Sequence
  Description of Artificial Sequence: Synthetic oligonucleotide
cgtagttcgattttttagagtcgtcgagtagacg

SEQ ID NO: 9401 - DNA, 2 bp, Artificial Sequence
  Description of Artificial Sequence: Synthetic oligonucleotide
cg

SEQ ID NO: 9402 - DNA, 2 bp, Artificial Sequence
  Description of Artificial Sequence: Synthetic oligonucleotide
cg

SEQ ID NO: 9403 - DNA, 2 bp, Artificial Sequence
  Description of Artificial Sequence: Synthetic oligonucleotide
cg

SEQ ID NO: 9404 - DNA, 2 bp, Artificial Sequence
  Description of Artificial Sequence: Synthetic oligonucleotide
cg

SEQ ID NO: 9405 - DNA, 2 bp, Artificial Sequence
  Description of Artificial Sequence: Synthetic oligonucleotide
cg

SEQ ID NO: 9406 - DNA, 2 bp, Artificial Sequence
  Description of Artificial Sequence: Synthetic oligonucleotide
cg

SEQ ID NO: 9407 - DNA, 2 bp, Artificial Sequence
  Description of Artificial Sequence: Synthetic oligonucleotide
cg

SEQ ID NO: 9408 - DNA, 2 bp, Artificial Sequence
  Description of Artificial Sequence: Synthetic oligonucleotide
cg

SEQ ID NO: 9409 - DNA, 2 bp, Artificial Sequence
  Description of Artificial Sequence: Synthetic oligonucleotide
cg

SEQ ID NO: 9410 - DNA, 2 bp, Artificial Sequence
  Description of Artificial Sequence: Synthetic oligonucleotide
cg

SEQ ID NO: 9411 - DNA, 211 bp, Artificial Sequence
  Description of Artificial Sequence: Synthetic polynucleotide
cgatttcggcgggtgtatcgtcgagtttttcgggaagtgtagttttagcgcgagcgggacgttgggaaatgtagttttgcgcgtttacgttttcgatcgggtcgtgttcgtcgcggttttgcgaggttcgaggggtaagggagcgtgtagcgggggcgggattacgaggcggcggggttgggggcggtttttgtgtttgcgtcggggatcg

SEQ ID NO: 9412 - DNA, 2 bp, Artificial Sequence
  Description of Artificial Sequence: Synthetic oligonucleotide
cg

SEQ ID NO: 9413 - DNA, 2 bp, Artificial Sequence
  Description of Artificial Sequence: Synthetic oligonucleotide
cg

SEQ ID NO: 9414 - DNA, 2 bp, Artificial Sequence
  Description of Artificial Sequence: Synthetic oligonucleotide
cg

SEQ ID NO: 9415 - DNA, 2 bp, Artificial Sequence
  Description of Artificial Sequence: Synthetic oligonucleotide
cg

SEQ ID NO: 9416 - DNA, 2 bp, Artificial Sequence
  Description of Artificial Sequence: Synthetic oligonucleotide
cg

SEQ ID NO: 9417 - DNA, 2 bp, Artificial Sequence
  Description of Artificial Sequence: Synthetic oligonucleotide
cg

SEQ ID NO: 9418 - DNA, 2 bp, Artificial Sequence
  Description of Artificial Sequence: Synthetic oligonucleotide
cg

SEQ ID NO: 9419 - DNA, 2 bp, Artificial Sequence
  Description of Artificial Sequence: Synthetic oligonucleotide
cg

SEQ ID NO: 9420 - DNA, 2 bp, Artificial Sequence
  Description of Artificial Sequence: Synthetic oligonucleotide
cg

SEQ ID NO: 9421 - DNA, 2 bp, Artificial Sequence
  Description of Artificial Sequence: Synthetic oligonucleotide
cg

SEQ ID NO: 9422 - DNA, 95 bp, Artificial Sequence
  Description of Artificial Sequence: Synthetic oligonucleotide
cggaagtttaagtttaattaattgagttcgaggcgggagggaagggttttgcgcgtcgtggttcgtttcgtttttttttcgcgttttttttttcg

SEQ ID NO: 9423 - DNA, 2 bp, Artificial Sequence
  Description of Artificial Sequence: Synthetic oligonucleotide
cg

SEQ ID NO: 9424 - DNA, 2 bp, Artificial Sequence
  Description of Artificial Sequence: Synthetic oligonucleotide
cg

SEQ ID NO: 9425 - DNA, 2 bp, Artificial Sequence
  Description of Artificial Sequence: Synthetic oligonucleotide
cg

SEQ ID NO: 9426 - DNA, 2 bp, Artificial Sequence
  Description of Artificial Sequence: Synthetic oligonucleotide
cg

SEQ ID NO: 9427 - DNA, 2 bp, Artificial Sequence
  Description of Artificial Sequence: Synthetic oligonucleotide
cg

SEQ ID NO: 9428 - DNA, 2 bp, Artificial Sequence
  Description of Artificial Sequence: Synthetic oligonucleotide
cg

SEQ ID NO: 9429 - DNA, 2 bp, Artificial Sequence
  Description of Artificial Sequence: Synthetic oligonucleotide
cg

SEQ ID NO: 9430 - DNA, 2 bp, Artificial Sequence
  Description of Artificial Sequence: Synthetic oligonucleotide
cg

SEQ ID NO: 9431 - DNA, 2 bp, Artificial Sequence
  Description of Artificial Sequence: Synthetic oligonucleotide
cg

SEQ ID NO: 9432 - DNA, 2 bp, Artificial Sequence
  Description of Artificial Sequence: Synthetic oligonucleotide
cg

SEQ ID NO: 9433 - DNA, 264 bp, Artificial Sequence
  Description of Artificial Sequence: Synthetic polynucleotide
cggcggcgtggatcggcgacgggtggtatagttggtatacgcggtttttttataggtggcggtagacggcggtcgggacggcgagtaatagggcggttagttagatcgttagtagtaggcggcgggttagggtcgggttgcgtagtcgaggcgttaggaaggggcgggtgattgcgaggtagcgttgtaggttgagtaggtcggtgagtagtacgttggcgtatatgttgagcgcgtatacgtagtatatcgttttgtagttcg

SEQ ID NO: 9434 - DNA, 2 bp, Artificial Sequence
  Description of Artificial Sequence: Synthetic oligonucleotide
cg

SEQ ID NO: 9435 - DNA, 2 bp, Artificial Sequence
  Description of Artificial Sequence: Synthetic oligonucleotide
cg

SEQ ID NO: 9436 - DNA, 2 bp, Artificial Sequence
  Description of Artificial Sequence: Synthetic oligonucleotide
cg

SEQ ID NO: 9437 - DNA, 2 bp, Artificial Sequence
  Description of Artificial Sequence: Synthetic oligonucleotide
cg

SEQ ID NO: 9438 - DNA, 2 bp, Artificial Sequence
  Description of Artificial Sequence: Synthetic oligonucleotide
cg

SEQ ID NO: 9439 - DNA, 2 bp, Artificial Sequence
  Description of Artificial Sequence: Synthetic oligonucleotide
cg

SEQ ID NO: 9440 - DNA, 2 bp, Artificial Sequence
  Description of Artificial Sequence: Synthetic oligonucleotide
cg

SEQ ID NO: 9441 - DNA, 2 bp, Artificial Sequence
  Description of Artificial Sequence: Synthetic oligonucleotide
cg

SEQ ID NO: 9442 - DNA, 2 bp, Artificial Sequence
  Description of Artificial Sequence: Synthetic oligonucleotide
cg

SEQ ID NO: 9443 - DNA, 2 bp, Artificial Sequence
  Description of Artificial Sequence: Synthetic oligonucleotide
cg

SEQ ID NO: 9444 - DNA, 59 bp, Artificial Sequence
  Description of Artificial Sequence: Synthetic oligonucleotide
cgcgcgcgggcgtttcggcgtgtcggattatgtcgtcggtagtttcgggacggggaacg

SEQ ID NO: 9445 - DNA, 2 bp, Artificial Sequence
  Description of Artificial Sequence: Synthetic oligonucleotide
cg

SEQ ID NO: 9446 - DNA, 2 bp, Artificial Sequence
  Description of Artificial Sequence: Synthetic oligonucleotide
cg

SEQ ID NO: 9447 - DNA, 2 bp, Artificial Sequence
  Description of Artificial Sequence: Synthetic oligonucleotide
cg

SEQ ID NO: 9448 - DNA, 2 bp, Artificial Sequence
  Description of Artificial Sequence: Synthetic oligonucleotide
cg

SEQ ID NO: 9449 - DNA, 2 bp, Artificial Sequence
  Description of Artificial Sequence: Synthetic oligonucleotide
cg

SEQ ID NO: 9450 - DNA, 2 bp, Artificial Sequence
  Description of Artificial Sequence: Synthetic oligonucleotide
cg

SEQ ID NO: 9451 - DNA, 2 bp, Artificial Sequence
  Description of Artificial Sequence: Synthetic oligonucleotide
cg

SEQ ID NO: 9452 - DNA, 2 bp, Artificial Sequence
  Description of Artificial Sequence: Synthetic oligonucleotide
cg

SEQ ID NO: 9453 - DNA, 2 bp, Artificial Sequence
  Description of Artificial Sequence: Synthetic oligonucleotide
cg

SEQ ID NO: 9454 - DNA, 2 bp, Artificial Sequence
  Description of Artificial Sequence: Synthetic oligonucleotide
cg

SEQ ID NO: 9455 - DNA, 4 bp, Artificial Sequence
  Description of Artificial Sequence: Synthetic oligonucleotide
cgcg

SEQ ID NO: 9456 - DNA, 2 bp, Artificial Sequence
  Description of Artificial Sequence: Synthetic oligonucleotide
cg

SEQ ID NO: 9457 - DNA, 2 bp, Artificial Sequence
  Description of Artificial Sequence: Synthetic oligonucleotide
cg

SEQ ID NO: 9458 - DNA, 2 bp, Artificial Sequence
  Description of Artificial Sequence: Synthetic oligonucleotide
cg

SEQ ID NO: 9459 - DNA, 2 bp, Artificial Sequence
  Description of Artificial Sequence: Synthetic oligonucleotide
cg

SEQ ID NO: 9460 - DNA, 2 bp, Artificial Sequence
  Description of Artificial Sequence: Synthetic oligonucleotide
cg

SEQ ID NO: 9461 - DNA, 2 bp, Artificial Sequence
  Description of Artificial Sequence: Synthetic oligonucleotide
cg

SEQ ID NO: 9462 - DNA, 2 bp, Artificial Sequence
  Description of Artificial Sequence: Synthetic oligonucleotide
cg

SEQ ID NO: 9463 - DNA, 2 bp, Artificial Sequence
  Description of Artificial Sequence: Synthetic oligonucleotide
cg

SEQ ID NO: 9464 - DNA, 2 bp, Artificial Sequence
  Description of Artificial Sequence: Synthetic oligonucleotide
cg

SEQ ID NO: 9465 - DNA, 2 bp, Artificial Sequence
  Description of Artificial Sequence: Synthetic oligonucleotide
cg

SEQ ID NO: 9466 - DNA, 324 bp, Artificial Sequence
  Description of Artificial Sequence: Synthetic polynucleotide
cgttagatagttagcggtcggcggtaggtcgggttatgagcggtaggggtcgggtcgggtttcgttgattttggtttcgcgcggtagtttttttagttttcgtttcggtttttcggtatgagagttcgttcgggttcggggttgcggttgttttagattcgtcgtacgttggcgcgtttcgggttcgcggagtcgcggtgttgatatttgcgtcgtattgcgtcgttcgttcgttcgttgtgtgtttcgggggcgcggttatggaggtggtgggtgatttcgagtatagtaagagggatttcgtgggatacggggttttcgtcg

SEQ ID NO: 9467 - DNA, 2 bp, Artificial Sequence
  Description of Artificial Sequence: Synthetic oligonucleotide
cg

SEQ ID NO: 9468 - DNA, 2 bp, Artificial Sequence
  Description of Artificial Sequence: Synthetic oligonucleotide
cg

SEQ ID NO: 9469 - DNA, 2 bp, Artificial Sequence
  Description of Artificial Sequence: Synthetic oligonucleotide
cg

SEQ ID NO: 9470 - DNA, 2 bp, Artificial Sequence
  Description of Artificial Sequence: Synthetic oligonucleotide
cg

SEQ ID NO: 9471 - DNA, 2 bp, Artificial Sequence
  Description of Artificial Sequence: Synthetic oligonucleotide
cg

SEQ ID NO: 9472 - DNA, 2 bp, Artificial Sequence
  Description of Artificial Sequence: Synthetic oligonucleotide
cg

SEQ ID NO: 9473 - DNA, 2 bp, Artificial Sequence
  Description of Artificial Sequence: Synthetic oligonucleotide
cg

SEQ ID NO: 9474 - DNA, 102 bp, Artificial Sequence
  Description of Artificial Sequence: Synthetic polynucleotide
cgttagttttaggtcgagtttcgagcgtttgtaggaatacgtttttttattcggcgcgggacgtagagttgcgagagaattttgtttagcgcggatttaacg

SEQ ID NO: 9475 - DNA, 24 bp, Artificial Sequence
  Description of Artificial Sequence: Synthetic oligonucleotide
cgtgggcggtagcgagtcgttgcg

SEQ ID NO: 9476 - DNA, 521 bp, Artificial Sequence
  Description of Artificial Sequence: Synthetic polynucleotide
cgtatcggtttttttgtttcgtattggttgtttcgttcgtttgttaaggttaggtttggggggttggggttcgagtggtcgttgggggatagttttgggtatacgatcggagcgtttttttttttttcgtttggttcgcgtttaggggacggcgagagacgcggttttagttttttttttcgggcgtttcgttgcggttagatgtgggcggatgtggaggtcgggttatggcgaggagggcgggcgtttagaggggaagagattttttttttttttcgggcgtagggtttttttgtaggaggttgtatttgggtagttaaataaagttttttgttatcgtcgtcgcgcgttttgcgtttgtaagggttaaacggtagcgtacgcggttggtaggtaggatttcggtttgtgggtttaagagtcgaggggcgtagggcgaatatgcgagttttatggtattagcgagaggttattaatttttatttatcgagggtatttttgtagttaatatttttattacg

SEQ ID NO: 9477 - DNA, 1484 bp, Artificial Sequence
  Description of Artificial Sequence: Synthetic polynucleotide
cgtcgttattaacgagttattttaattgagttagtatcgtcgtttattcgtcggttcgtcggaatcgcgtttattttttgtaatttcgttcggatcggtatttcgttttttcggttcggttttttttttttcgtcgggtgtaaagttaaagatttagtaaggcgacgtgaatttttgtatgtagggtatatacgtcgttttcggtttcgggagtgcgggggttcgcggcgcggagggaggttgggcgttcgggttttcgggttaaggtcgtcgcgcgtgtttatttatgtttcggcggtttcggtttcgttggtttcggcgttcgtttagatttcggttttcgtcgttcgttcgagtttttaaaggtgttgttgcggtaattttatggcgatgagtatttgttaaacggcgagtcgcgagttggtcgttttagttcggggggcgtcggggttttcgggcgcgcggaggcggcggcgagcggcgggcgtttcggtcggtttcgcgtttttcgttcgattttgtcgttttcgtcgcgttatcgatttatggagagagatattaagggggaaaatggcgttttcggagttcgaggagttttggagtaattatatttatatatatacgttcgtacgtatatatattcgtatatattggtatataggcgcgcggcgagttttgttaattttagtaggagttaaaaaaaattttatatatatatatatatatatatatatatatatattttcgttttttcgattaatgttttttttttttttgtttttttttttttttttttttttttttttgtttttttttaaaggatgggttggagcgttaaaaaatgttggtgggtttgggttcgtaggaggcggcgcgcggagggcgagggcgtttttgttgagttgtgtagttcggttcgttgagttcggcggttttgttcgttcgttcgttcgttcgcggtcgttagtgttgtcgtcgtcgtcgtcgtcgtcgtcgttgttgttttatggtcgcgttcgtttcgcgttttcgtcgcgtttcgtcgtcgttcgttcgcgttttcggtgagcgttggagtggggtcgggttcgtgtgtttgtttttcgcgtttttttcgaatttcggatttttagtgaaaggaagggggagggcgcgggcgcggaagggaggtggatcggagcggtagcgcggtttagtcgaacgggtatcgatcgttatttcgcgatttttttcgtagggggcgtcggcgtttaagttgttcgttcggagggtttagagtcgttttttagattagagtcgggggaggcgtagttagtagcgagttttgagcgatttttttttttattcgtttttttgttttagtgaatttttgttagttgaagggagcggggtttttgttcggggaaaaggaaaatagttcgtggtttgggatttgggattttttgtcgtttttagcgtttttttcgtttttcggcgtttttgcg

SEQ ID NO: 9478 - DNA, 34 bp, Artificial Sequence; identical to SEQ ID NO: 8734
  Description of Artificial Sequence: Synthetic oligonucleotide

SEQ ID NO: 9479 - DNA, 14 bp, Artificial Sequence
  Description of Artificial Sequence: Synthetic oligonucleotide
cgagtttttcgtcg

SEQ ID NO: 9480 - DNA, 37 bp, Artificial Sequence
  Description of Artificial Sequence: Synthetic oligonucleotide
cggttgttttttagtatcgtggagtgggcgcgttacg

SEQ ID NO: 9481 - DNA, 34 bp, Artificial Sequence
  Description of Artificial Sequence: Synthetic oligonucleotide
cggtagttaaagataaagaagcggataaatttcg

SEQ ID NO: 9482 - DNA, 538 bp, Artificial Sequence
  Description of Artificial Sequence: Synthetic polynucleotide
cggttttttttagtttggggttcgggtttttttttcggttgagtagtcgggttcgcgattttttttatttttttcggttcgggttttcggttttttttagaggtgaggtaggggttatttagaatttcgcggttttttattttttttaagattattttcgttttagttttttgttttttattttgtttttttaatttgggttttcgattattgtttcgattttattttgtcgttagggattattagtcgtttttttcgcgtttaggggacgcgtagcggtagtttttgttgatggtaagggtttgcgtattcggaaattttagggtttggggcgtggtgcggtttttgcggttagcgggtttcgtttgagttttagggttttttcgttgttggattacgttttttataggttttagggtcgcggatgaatttcgatttttgttttttttttcggtgttgtggttattgagttaagtttggcgagtcgaggtgattcgggtcgggttgcgggaggagttcgcggtgaggtggtttcgcg

SEQ ID NO: 9483 - DNA, 109 bp, Artificial Sequence
  Description of Artificial Sequence: Synthetic polynucleotide
cgcggttttttttttacgcgaggtttttaaatttcgtaaattaacggaaatgaagttacgtttcgggagcggtgtttttgggaaatgtagtttagcgtttcggacgtcg

SEQ ID NO: 9484 - DNA, 901 bp, Artificial Sequence
  Description of Artificial Sequence: Synthetic polynucleotide
cgcgttagtagttcgcggttaaggttatttgtttttagggtttcggtatttttgcggggaggcggtaggtagaggacgcgcgcgtagtcgcgtaggagtttttaggcgagtgggggaagtatcgtaagagacgcggatttggagcgcggttattgcgttatcgtagcgatttgggttatttaagtcggcgggattgagaggtcgttgcgcgtgggtaggggtttagattgcgttcgcggtgtttgtttcggtttttatttcggaacgattgtagttttgcggggttcgtcgtttatatcgcgttgaggacgttgtttaagttaggcgttcgttttcgttcgcggttttagtcgttcgtagcgcgtcgtttttagacgcgcgtggttgttggcgagggttgagatcgcgttttcgtcggttagtttttagtagtagcgtattttttttgtttcgcgttttcgtttcggattcgcgtcgtcgtagtttcgcggtgatgagtttcgagtcggtttcgtcgtcgtcgtcgttttagtgttttggttgcgatcgcgcggagtcgatcgtttagcgtttagaggagggcgacgaggtttttcgcgcgggcgattacgagatggtagtcgagttttttcgttttatgttagtcgggttggcgtagtcggatcgcggtttgtgtttgaggttgggggacgcgttggttcgcgtcggtcgttttttcgaagttttgggcgcgtttcgcggcgtcgcgcggttcggggcgttgcggtcggaggagttggaagagttggcgggcggtttggtgcgcgtcgtgggtttgcgcgatcggtcgttgttcgcggagaattcgggcggcgagttcgaggcgttcggcgagggagggtcggtttcggagtttcgcgcg

SEQ ID NO: 9485 - DNA, 15 bp, Artificial Sequence
  Description of Artificial Sequence: Synthetic oligonucleotide
cgttcgcgtcgttcg

SEQ ID NO: 9486 - DNA, 383 bp, Artificial Sequence
  Description of Artificial Sequence: Synthetic polynucleotide
cgtcgggggcgcggcgcgggcgtagaggcggcggggatgtcgggcggttcgggttgcggcgtagtttttttttttgtagttttttttttcgttttcgtcgtcgtcgtcgcggtcgcggtttttttttggtttttatttttgttgttttcgggtatagattttttgtcgtcgtcgcgcgtcggtttttttgtcgtcgtttgttagttttattttttgttatttttttgtttttttttcgttttttttttgtcgttcgtcgcgtttttttttatttcgcgttttttttttttttttttttttttttttttttcgcgggtttttcgtttttttcgtgcgtttcggtcgtttttcgtttttagcgcgtcgttttcggggatgtttcg

SEQ ID NO: 9487 - DNA, 4 bp, Artificial Sequence
  Description of Artificial Sequence: Synthetic oligonucleotide
cgcg

SEQ ID NO: 9488 - DNA, 624 bp, Artificial Sequence
  Description of Artificial Sequence: Synthetic polynucleotide
cgtttgtaggggtagttcggagttcgggtggggatagtagcgtagtttttggtcgtagcgcggggtgtagacgtcgtacgtttcgttttttagtcgggcgtatatcgagtagtagtcgtagttcggttttcggacgagtttcgcgtatggtatgcgggcgttttcggttattgcggttatcgcggcgggcggcgtaatcggcgggggttcgtaggcggttaggcgttcgggtgtgtagggcgggtagcggaatagtattttcgcgcgcgtttcgtcgtcgtcgttattcgcgtttagtagtagtagtagtagcggtagtagcggcggcggcggtagcggtagcgcggggtagtttattttcggtagtatgttggcggtcggtagcgcggcgtggcgggcgagcgagcgagcgggcgggcgggtaggtggtacggttttgcgagcgcgggagtcgtttttttcgttttttttttttttttcgtcgtcgtagtcgggttttaaagggtcggttttttttcgttttttgttttttttttttttttttttggagattatttttttttttttcgatattttttcgcgtcggtaagtgagtgcgcgtacgttcgttcgtttattttcgcg

SEQ ID NO: 9489 - DNA, 94 bp, Artificial Sequence
  Description of Artificial Sequence: Synthetic oligonucleotide
cggtcggttttttcggttgatttcgttttggttgatttcgcgtatattttttttttagcgttgtaaggatcgtttgaattcgttggttatttcg

SEQ ID NO: 9490 - DNA, 63 bp, Artificial Sequence
  Description of Artificial Sequence: Synthetic oligonucleotide
cgcggcggttgcgggattcgcgtggcgtcggcgacggttcggtttagttttgcgttttgtacg

SEQ ID NO: 9491 - DNA, 41 bp, Artificial Sequence
  Description of Artificial Sequence: Synthetic oligonucleotide
cgatggcggataagagggcggggattttagaagtcgcggcg

SEQ ID NO: 9492 - DNA, 1041 bp, Artificial Sequence
  Description of Artificial Sequence: Synthetic polynucleotide
cgtttaaataaaaatagggtcggttttttagtagtggagagttattcggagtatcgtttcgggtcggtttcggtttcgaggtttcgggggtttaggatttcgtgcgtgtggcggggaagaggaatttagagtttttgggttgttgtttttttcgtcgtttttattgtgaatattgtgcggtggggtgaacgcggggagcggcggggttagtggagtcgaattttagggttttgcgattgtattcgttaggaggggttttcgtttggtttgagaaaggttttttgaggttaagagttgggtttgaatataattttcggagtttcgagttcgttttttttaatatataaatacgcgtagatttttagaaataggaacgtacgatatatacggttagaagtcgcgaggatatatagagcgtcgtttattgggcgggggtcgtttgggaataaagggtttaggaggcgttgtttcggcgtttattttgagtttttttgggggtgatacgggatgggggtggggtgtaaagggaattgagggaggagagtgcgcgaggaggggaaagcggtgatttggtttagaggtggggcgcgtattttaggcgagcgtgcgtgggtcgggatttgtagggtacgggggtgggtttaggttggtcgttttatttcgttttagcgtttcgttaggttttcgtcgtttcggggtcgttcgggtcgttagttagttgacgcggggggcgggggagttgttaggcgcgtttcgttttgcgtcgttgggtcgcggaggtcgtgtagttattggttcgcgtatcgggtcgttcgggttttcgtattttagtgatattaggaggcgataaaaggttgcggcgtcgtcggatttagtatagttgtatcgtcgagttgcgagcggttgcgagcgagagagcgtaagagtaagagagttagagagcgagtaacgggtattcgttttacgtttttttttagttttatcgcgcgtttcgtttgtttttttatttcgttcgattttattcggttcggtttttgcgcg

SEQ ID NO: 9493 - DNA, 23 bp, Artificial Sequence
  Description of Artificial Sequence: Synthetic oligonucleotide
cgttatggttcgagtcgaaggcg

SEQ ID NO: 9494 - DNA, 515 bp, Artificial Sequence
  Description of Artificial Sequence: Synthetic polynucleotide
cgatttacgatcgggtcgattttcggttagaaagaattatgtttcggtcgttcgggtcgcgggttcgcggtgtatttttgtaggtttttattttgtttcggtagaggtttgtaagaattttgtgggtgtttttcggagcgggtagaggaggagtttagcgtcgaggtttaggcgcgtttcgttttcgttttttttcgtgtttttttttcgttgttttttttttaaaggtcgagatttggacgttgttcggtggtttcggcgggggttttgtttttggtcgttgtttttttgaattttaggtgagaagaataaaacgttttgacgttgttcggttttcggtttttggagaggacgggtcgtttttgtcgagagaattgtgcggaattaggaagcgttggtgttttttcgtttttacgggattaagcgaaattcggttttaaacgaagtaaagtcggttgttttttggagtatttttgttatagtatttttattttgggttagggtattttgttgcg

SEQ ID NO: 9495 - DNA, 1017 bp, Artificial Sequence
  Description of Artificial Sequence: Synthetic polynucleotide
cggttagggatttatttcgaggtttagttggtgggggtgttggggtgcgcgcggattcggtatttacggcggcggcggcggtagtagtagtaggaggaggagaaagacgaggaggaggaggaggattagttgagcggcgttttttttttagttcgtagcgcgtattggttttttggggtattttcgggagagtattaagatcggagattaggcggcgatataggtaatcgttgttgtacggggttgggtttagtcggtttttagaggttagggtagggggaggtaggattgggaaggagggtcggagaagtggggtgtagagggcggggtagcgagcggttaggttcggaggaaggcgttttaggcgtttagggatgtcgtcgttcgggttgacgtcgtcggttttttttttcgttaggcgggcgtttgtagtcgcgggcgtacgggtttcgtttcgtttatcggttcgttgtcggcgttcgcggtgcgtttcgttttgtgtttttcgtagtcggcgtgtatttggtgtaagtaaaggcggttagttgatgggtcgcgcgcggattggttgtttcgtcgtttttttttttttcgttcgatttttttcgcggtttttcgttttcgttttcggcgcggtttcgtgttgggtattatttgtggatcgtttaataaaggcgtagcgcggcggggttcgggtggtcgggtcgcggtcgtcgttttttgtttaggggacggtaggttgcggttgggtagggaggcgaagcgtattgtcggtttttagtaaaagatagattaaaagaaaatatacgttcgtgttaggaggttagttaggtataatggggttttatttttttgcggcgtagaattcgggttcgggggttgagaattagatatagttcggtttggggttgtgggagttaagtttcggggtgaaattcgattttgcgttttaaaatatagggcgcgttttcgggttgtgtgtgcgcgttcgggggcgtttttcgtagatttggttcg

SEQ ID NO: 9496 - DNA, 8 bp, Artificial Sequence
  Description of Artificial Sequence: Synthetic oligonucleotide
cgagcgcg

SEQ ID NO: 9497 - DNA, 54 bp, Artificial Sequence
  Description of Artificial Sequence: Synthetic oligonucleotide
cgttttttttttcggtttttttcgcgtggtttgtttttcgttcgtttgcgttcg

SEQ ID NO: 9498 - DNA, 10 bp, Artificial Sequence
  Description of Artificial Sequence: Synthetic oligonucleotide
cgataacgcg

SEQ ID NO: 9499 - DNA, 26 bp, Artificial Sequence
  Description of Artificial Sequence: Synthetic oligonucleotide
cgcggtcgtttggtcgaatttgttcg

SEQ ID NO: 9500 - DNA, 934 bp, Artificial Sequence
  Description of Artificial Sequence: Synthetic polynucleotide
cgcggaggagggattcgggttgcgcgttttcgggtcgaggaattaggacgcgttcggagtttcgtacgcggttaagttcggggcgtttttttttttcggtcgggcgaatttaaggggcgtagttttttgttttgatagagttggtcggcggaggcgtgtagagcggcgagtcggcgagttaggttgagaaattcgagtcgggaataaagaggggtcggattgagtgtgtgtgtcggttcgagtttcgggtagaggtatttgggttcgaggttttcgttgtgatttttcgagatttcgtagtgttttttattgcggagttttcgcgtttgtcggtaaaaattttatttttggtaaatttttttttttttttttttttttttcggtttttattttttgttttttttttttttttagtagattaaatgagtttcgagaagaaaaatcgaagcgaaagggaagaaaataagaagatttaaaacggatatttttagcgtgggtggttttttttttttttttttttttttttattttttaggaagtggacgtttcgttattttttgatttttgtatttttttttggggtaaacggggtttttttgtttagatttttttttttttttcggaaaataaattattaagtcggtattcggggtaattatagtggagagggttttcgcggagacgcgtcgtcggatttttttttgtattttggggaggcgtgttttttttagaatcggcgtttttcgcgcgtaaatttcggcgacgcggggtcgcggggtggtcgtcggggtagtttcgtttagcgcgcgtcgcgtagacgttttcggagtcgttagttatcgtagttttcgtcgtttagtgtttttcggtttcgggggcgggcgtttgcgtcggttttcgcgaagcgggaaagcgcggcggtcgtcgggattcg

SEQ ID NO: 9501 - DNA, 279 bp, Artificial Sequence
  Description of Artificial Sequence: Synthetic polynucleotide
cggaggtttgagagtagggttggaggggcggaggatcggggagattcgttcgcggcgttttcggtcggttttgagtaggcgtcgtggtagcgttcgcgttttttgttcgtttttcgtcgtcgttaggacgtaggttcgcgttagggttggcggtagggttcgtagttgtcggtttggcgtttttatttcgcgtagtcggtttcgtttagttttttcgcgtttgattggtcggattttgtttttggcggaggtaattgttcgcggattttttatttcgcg

SEQ ID NO: 9502 - DNA, 2 bp, Artificial Sequence
  Description of Artificial Sequence: Synthetic oligonucleotide
cg

SEQ ID NO: 9503 - DNA, 9 bp, Artificial Sequence
  Description of Artificial Sequence: Synthetic oligonucleotide
cgcggggcg

SEQ ID NO: 9504 - DNA, 11 bp, Artificial Sequence
  Description of Artificial Sequence: Synthetic oligonucleotide
cgatgcgttcg

SEQ ID NO: 9505 - DNA, 30 bp, Artificial Sequence
  Description of Artificial Sequence: Synthetic oligonucleotide
cggttttttgagtagttgagattataagcg

SEQ ID NO: 9506 - DNA, 10 bp, Artificial Sequence
  Description of Artificial Sequence: Synthetic oligonucleotide
cgcgggagcg

SEQ ID NO: 9507 - DNA, 56 bp, Artificial Sequence
  Description of Artificial Sequence: Synthetic oligonucleotide
cgtttataaatcggtttcgttttttcgtgttcgggttcgtcgtttattagacgtcg

SEQ ID NO: 9508 - DNA, 98 bp, Artificial Sequence
  Description of Artificial Sequence: Synthetic oligonucleotide
cgtgatttcgggtcgttttttatacgtgatcgtttttttttttttttttattttcgtattcgttttttttttagttttttgtttcgttttgttggtcg

SEQ ID NO: 9509 - DNA, 33 bp, Artificial Sequence
  Description of Artificial Sequence: Synthetic oligonucleotide
cgacggcggcggtcgtttttgcgcgttttttcg

SEQ ID NO: 9510 - DNA, 48 bp, Artificial Sequence; identical to SEQ ID NO: 8766
  Description of Artificial Sequence: Synthetic oligonucleotide

SEQ ID NO: 9511 - DNA, 93 bp, Artificial Sequence
  Description of Artificial Sequence: Synthetic oligonucleotide
cgagggtagcggtggggttgggtcgggggagtaggggtcgcgtcgggtagcgtcgcgtgttggagcggaggcgggtgcggtcggggtaggtcg

SEQ ID NO: 9512 - DNA, 2 bp, Artificial Sequence
  Description of Artificial Sequence: Synthetic oligonucleotide
cg

SEQ ID NO: 9513 - DNA, 2 bp, Artificial Sequence
  Description of Artificial Sequence: Synthetic oligonucleotide
cg

SEQ ID NO: 9514 - DNA, 2 bp, Artificial Sequence
  Description of Artificial Sequence: Synthetic oligonucleotide
cg

SEQ ID NO: 9515 - DNA, 2 bp, Artificial Sequence
  Description of Artificial Sequence: Synthetic oligonucleotide
cg

SEQ ID NO: 9516 - DNA, 2 bp, Artificial Sequence
  Description of Artificial Sequence: Synthetic oligonucleotide
cg

SEQ ID NO: 9517 - DNA, 2 bp, Artificial Sequence
  Description of Artificial Sequence: Synthetic oligonucleotide
cg

SEQ ID NO: 9518 - DNA, 2 bp, Artificial Sequence
  Description of Artificial Sequence: Synthetic oligonucleotide
cg

SEQ ID NO: 9519 - DNA, 42 bp, Artificial Sequence
  Description of Artificial Sequence: Synthetic oligonucleotide
cgttgcgcgttcgttttttggtcgggcgcgcgtttcgtttcg

SEQ ID NO: 9520 - DNA, 2 bp, Artificial Sequence
  Description of Artificial Sequence: Synthetic oligonucleotide
cg

SEQ ID NO: 9521 - DNA, 2 bp, Artificial Sequence
  Description of Artificial Sequence: Synthetic oligonucleotide
cg

SEQ ID NO: 9522 - DNA, 2 bp, Artificial Sequence
  Description of Artificial Sequence: Synthetic oligonucleotide
cg

SEQ ID NO: 9523 - DNA, 2 bp, Artificial Sequence
  Description of Artificial Sequence: Synthetic oligonucleotide
cg

SEQ ID NO: 9524 - DNA, 2 bp, Artificial Sequence
  Description of Artificial Sequence: Synthetic oligonucleotide
cg

SEQ ID NO: 9525 - DNA, 2 bp, Artificial Sequence
  Description of Artificial Sequence: Synthetic oligonucleotide
cg

SEQ ID NO: 9526 - DNA, 2 bp, Artificial Sequence
  Description of Artificial Sequence: Synthetic oligonucleotide
cg

SEQ ID NO: 9527 - DNA, 2 bp, Artificial Sequence
  Description of Artificial Sequence: Synthetic oligonucleotide
cg

SEQ ID NO: 9528 - DNA, 2 bp, Artificial Sequence
  Description of Artificial Sequence: Synthetic oligonucleotide
cg

SEQ ID NO: 9529 - DNA, 2 bp, Artificial Sequence
  Description of Artificial Sequence: Synthetic oligonucleotide
cg

SEQ ID NO: 9530 - DNA, 40 bp, Artificial Sequence
  Description of Artificial Sequence: Synthetic oligonucleotide
cgcgtcggagtgcggttttgtttttagcgttagtgcgtcg

SEQ ID NO: 9531 - DNA, 2 bp, Artificial Sequence
  Description of Artificial Sequence: Synthetic oligonucleotide
cg

SEQ ID NO: 9532 - DNA, 2 bp, Artificial Sequence
  Description of Artificial Sequence: Synthetic oligonucleotide
cg

SEQ ID NO: 9533 - DNA, 2 bp, Artificial Sequence
  Description of Artificial Sequence: Synthetic oligonucleotide
cg

SEQ ID NO: 9534 - DNA, 2 bp, Artificial Sequence
  Description of Artificial Sequence: Synthetic oligonucleotide
cg

SEQ ID NO: 9535 - DNA, 2 bp, Artificial Sequence
  Description of Artificial Sequence: Synthetic oligonucleotide
cg

SEQ ID NO: 9536 - DNA, 2 bp, Artificial Sequence
  Description of Artificial Sequence: Synthetic oligonucleotide
cg

SEQ ID NO: 9537 - DNA, 2 bp, Artificial Sequence
  Description of Artificial Sequence: Synthetic oligonucleotide
cg

SEQ ID NO: 9538 - DNA, 2 bp, Artificial Sequence
  Description of Artificial Sequence: Synthetic oligonucleotide
cg

SEQ ID NO: 9539 - DNA, 2 bp, Artificial Sequence
  Description of Artificial Sequence: Synthetic oligonucleotide
cg

SEQ ID NO: 9540 - DNA, 2 bp, Artificial Sequence
  Description of Artificial Sequence: Synthetic oligonucleotide
cg

SEQ ID NO: 9541 - DNA, 2 bp, Artificial Sequence
  Description of Artificial Sequence: Synthetic oligonucleotide
cg

SEQ ID NO: 9542 - DNA, 2 bp, Artificial Sequence
  Description of Artificial Sequence: Synthetic oligonucleotide
cg

SEQ ID NO: 9543 - DNA, 2 bp, Artificial Sequence
  Description of Artificial Sequence: Synthetic oligonucleotide
cg

SEQ ID NO: 9544 - DNA, 2 bp, Artificial Sequence
  Description of Artificial Sequence: Synthetic oligonucleotide
cg

SEQ ID NO: 9545 - DNA, 2 bp, Artificial Sequence
  Description of Artificial Sequence: Synthetic oligonucleotide
cg

SEQ ID NO: 9546 - DNA, 2 bp, Artificial Sequence
  Description of Artificial Sequence: Synthetic oligonucleotide
cg

SEQ ID NO: 9547 - DNA, 2 bp, Artificial Sequence
  Description of Artificial Sequence: Synthetic oligonucleotide
cg

SEQ ID NO: 9548 - DNA, 2 bp, Artificial Sequence
  Description of Artificial Sequence: Synthetic oligonucleotide
cg

SEQ ID NO: 9549 - DNA, 2 bp, Artificial Sequence
  Description of Artificial Sequence: Synthetic oligonucleotide
cg

SEQ ID NO: 9550 - DNA, 2 bp, Artificial Sequence
  Description of Artificial Sequence: Synthetic oligonucleotide
cg

SEQ ID NO: 9551 - DNA, 2 bp, Artificial Sequence
  Description of Artificial Sequence: Synthetic oligonucleotide
cg

SEQ ID NO: 9552 - DNA, 42 bp, Artificial Sequence
  Description of Artificial Sequence: Synthetic oligonucleotide
cggagatcgtttcgtttttttagatcgaacgtcgttcgttcg

SEQ ID NO: 9553 - DNA, 2 bp, Artificial Sequence
  Description of Artificial Sequence: Synthetic oligonucleotide
cg

SEQ ID NO: 9554 - DNA, 2 bp, Artificial Sequence
  Description of Artificial Sequence: Synthetic oligonucleotide
cg

SEQ ID NO: 9555 - DNA, 2 bp, Artificial Sequence
  Description of Artificial Sequence: Synthetic oligonucleotide
cg

SEQ ID NO: 9556 - DNA, 2 bp, Artificial Sequence
  Description of Artificial Sequence: Synthetic oligonucleotide
cg

SEQ ID NO: 9557 - DNA, 2 bp, Artificial Sequence
  Description of Artificial Sequence: Synthetic oligonucleotide
cg

SEQ ID NO: 9558 - DNA, 2 bp, Artificial Sequence
  Description of Artificial Sequence: Synthetic oligonucleotide
cg

SEQ ID NO: 9559 - DNA, 2 bp, Artificial Sequence
  Description of Artificial Sequence: Synthetic oligonucleotide
cg

SEQ ID NO: 9560 - DNA, 2 bp, Artificial Sequence
  Description of Artificial Sequence: Synthetic oligonucleotide
cg

SEQ ID NO: 9561 - DNA, 2 bp, Artificial Sequence
  Description of Artificial Sequence: Synthetic oligonucleotide
cg

SEQ ID NO: 9562 - DNA, 2 bp, Artificial Sequence
  Description of Artificial Sequence: Synthetic oligonucleotide
cg

SEQ ID NO: 9563 - DNA, 219 bp, Homo sapiens
cctagggagggggcgggaggcctcccctgcccagctccgagccggtggtgcagcgtccgcccccggtcgcgggcgcagactggcggccgcctccgggccacgtggtgcgcgcggcgggcgcgtccgaggagcctgcggctgctcctggctcacagcgctccgggcgaggagagcgggcggacgccgggggctgggccggtgcgggcggcgaggcaggcg

SEQ ID NO: 9564 - DNA, 315 bp, Homo sapiens
cgagccccgagccccgccccgggggcctcatcccgccccttcgcgtccgcggctcgttttcccccactgagcgcccagctcccgcagtttccccggccgtcgagcgccgtgggcggggctccagggcggcggcgcctcgcggggagggtcctccgtgctgggggcgaggccacccgaggcagctccccgcccgcccccaaccccgccccgctctcggagcctataaagggaggcgacccgcggcccgcccggctggcatcccccagccgccgccagccccgccgaggggagccagcgccgtctctgaggggcgtc

SEQ ID NO: 9565 - DNA, 201 bp, Homo sapiens
gcacccggcccagggctggagctggctgcagggctggcccgcggcgacctgggcagggtggcggctgctccctctcctcccaccccgccccgaggcgcagcgcgcggcagagcggctcggtgcccggcgggcgggcggcccgggcgggcctgcggtcgggatgaggacggcgcctccgctgcagagcgctggggcggcgcg

SEQ ID NO: 9566 - DNA, 201 bp, Homo sapiens
aataatagggacgctgagaataacaactacgaccagcacggcgaaggcgcccctctcgcgggtcagaggtcggcgccccagctccgcagaacccggcgcccggccagcgccccctggcagcccctcccggcagcctcaggtccccaagacctgcaggcccgccccgaagccccccgtccgcccctcacggccgctccgagc

SEQ ID NO: 9567 - DNA, 201 bp, Homo sapiens
cgcgcaccctccccgcccgcctgcccgcggttctcctcctgctcccggagcgccagtcgccccaccccgtgaccggctccccgtcttgtcccgcaggacccgcccggacgggaccacgccgccgccgccgccgccgccgcccggagccgcgcttcgggtcctgcctgagccgagccgcgcgcggggccgcagtcaccgccg

SEQ ID NO: 9568 - DNA, 201 bp, Homo sapiens
atagagttgcttttccctttcttgggctttgcaagtctccgaattggaggcggaaatgggggaagggttggaagttgtgtgtgaaaaacaattattgcaacgggttttccccaggagcttagtccggcctgcatcctggtggaactgctgttaccggtccacagcgcccaggccgagccggcagggctgggcgggaggctt

SEQ ID NO: 9569 - DNA, 201 bp, Homo sapiens
cagccaccgcggcggctgcggcggcggcatctccgcctccactcccgcccgggactgccccccactgtctccccgcccctcccggacagtgagcccgcggcggggcgggggaaggagccgcccccaccccctccaagcccacccctaaagagatccctcctcccctcccccgccgcctggcgcggagccgggacgatgctg

SEQ ID NO: 9570 - DNA, 201 bp, Homo sapiens
aacaagcagcccgggagataccctcccctttcccagcccccgctcctccaccttgctaccccctagcccgtgaccagctgcctcccctccccctcgcgggcgctcagggttgagcaaacactccgggccgcccgccccgccaccagctggctccgaccggcgcaccgctggcgatcccccaggcaattcggcgtcatgaga

SEQ ID NO: 9571 - DNA, 201 bp, Homo sapiens
cgtggcctggccgaggagccaatgggccgggaggggcgcgcgggggaggagctcaggtgcagagtgccgattggccagttcgccctccggtatgcagatacggtgggagtcacgtgctaggggccgggacgacttcctgttggaggccaacgcggggcggggaagggggcgcgagcgccccgtctggctgaagcgggggga

SEQ ID NO: 9572 - DNA, 201 bp, Homo sapiens
ggaggaggggaggcgttgcccgacgcgccctttcaagtctccgcgctcccccccggcggcggctgcccgggggcggtggctcggcgtcgcctcccccgaccgccccctccagggcccctcctccgtgccgcggccaggctgcccggccggcggcgcgctggaaatatgaagagacgctgcagctgcggtggcggtggcggc

SEQ ID NO: 9573 - DNA, 201 bp, Homo sapiens
cccatctgggacgcgatccacaggggcgctgtcccgtcctgcgggaagaggaggcggcggccgccgtgactggggcgcccggccccacccgctcacagaacgtctttaacaccaggggtctgaaagcgaaaactccgggaaggcactccctgaccgcagatcacactctgcagctgatccacaccgcccaggaggcagtga

SEQ ID NO: 9574 - DNA, 201 bp, Homo sapiens
acaaaagagcagctcccgcggagcgggtccagagtctgcccggactgtccgatggccctcggccctctgagcgccgcggctgccgggctttgtgtccgcgcggggggcgggaaggacggccggggtccccagtgcgcgtcccgcggagcggcgcgcggcgcccgaactggaaagttgtcgccggcgcctgtcgcctccacg

SEQ ID NO: 9575 - DNA, 243 bp, Homo sapiens
gctaaggcccggaccgtcatcccagcaacagcctcagtcatgtgaccggcaatggcggcgctgacgagaggtaggtgagcccggcgccccccacacccaccgcgcgccccccgggccccgctcgcacccctcacgcgccccccgctcccccggcgccccctcctccacctcccctccccgcgcgcggctccgggctccccgctccgtgcccggccgatcatctttctagcaccctccagcctt

SEQ ID NO: 9576 - DNA, 201 bp, Homo sapiens
cagcccgctcacctcttcctggagaagcccgacgcagcgcccgccactccctcccctccgtgtgcagctccccggctctaaagcactcacttgtctaacccgattctcaccctacaagaccgcaaccggccatcacttctgccctccgccaggacaccgaggccagctgtgtcactgccccgaggggttgcaggtgcagag

SEQ ID NO: 9577 - DNA, 201 bp, Homo sapiens
tcgcagcaccggtcaccccactgccaagggtgttctttgtacctgttgcgatattttgggtcgttttcagcccagtttgcacagcacccttggccacgttcgcagcaccggtgaccccactgcagacagtgtccttggtaccggtcagcacggtcttggccgtgtctacacccatctggacggcccccttggccacattcg

SEQ ID NO: 9578 - DNA, 201 bp, Homo sapiens
tcccgggccgaggggaacccgcgaccggacttgtgggggagaatgaggatgaaaacgtggagcttccattgtctagggtttgaccggccgacagggatttcgacgggggaccggggatctggggagggggtcgcactttctcgcctctttcgcggcttcccggcttctgcttgcttccctgaccgttcccaggggcgcggc

SEQ ID NO: 9579 - DNA, 201 bp, Homo sapiens
agccggggcagaaggaggagcctgaaggtccaccatggggtggaggctgcctgctcgcgggcccgcccccagagcccggggctcatcacgctgctctatgcgcctctgttggctcctgccaaacagtccctcccttctgtgcctcagtttcctggctgtaaaaagggggtgctcacagagcccccttgaggagtcgtcaca

SEQ ID NO: 9580 - DNA, 201 bp, Homo sapiens
ttggcttttacctggtctgcgagaaatcaaactttgggcacaagtcatgaagccgacaagcccgggagacacagtgtcagaattacaaggtgagatcagccgcccggccaagctatcttctcgctagcaggtgaggcccgtgaacagccaagctccccttggcacggcggaaccgcagtggacgcgtggaggggctccgta

SEQ ID NO: 9581 - DNA, 201 bp, Homo sapiens
aaccctccactcaccaacgccggcgccgccatgggcccagggggctgggtgaggccgtgagagtcggcgaggaagccggtcctgcgggctcggccgaccccgggctccggctctgggctgcgagggacctcagtccccgccgtcgtgtaaaatgcacacaaggttcgcggcgccgcctctgcgcgccgtgaggacacaggg

SEQ ID NO: 9582 - DNA, 201 bp, Homo sapiens
gacagaaggggagagtggccaggaaggaggggaggatggacacagggcgtctgcagaattggtgggcagatggacggagggacgggccgtgcagtgcagccggcggggccagggccaggccgagggcgcgaggtggcagccggcccggggaggcggaggctgagcgagcggtggtgtttgtggagctgtcggctgcggtgg

SEQ ID NO: 9583 - DNA, 201 bp, Homo sapiens
ggggctgggacgccccggcggagcaggcggcggcggtggcgagttggggagccctaggctcggcgctgccggaggggcccgagccgagccgcctgcgccccggccgggcagcgccgggcccgcttcccgcggggccacgccctgtcaaactttgttgcggcggctagcgcagcgggcccgcaagcgggcgggaggggcgcc

SEQ ID NO: 9584 - DNA, 201 bp, Homo sapiens
ttactggtgagcttggtagggcacagagaggatggcactaccagctggagggggacaggccccaaccatgagcccaggatgcagagagcggcagggatcaccggagcccccccggctctggtgtcttggctcttcctgcacacggtctccacatgacgcccagcaagccggatctcaatttgttcacccatcctttatttt

SEQ ID NO: 9585 - DNA, 201 bp, Homo sapiens
gaggccaaggcgggcagaccactcgaggtcaggagccagagaccagcccggtcaacagggcgaaaccccgtctcctccaaaaatacaaaaaccagtcaggcgtggcggcgcccgcccgcaatcccaggcacttggcaggccgaggcaggagaaccacgggagcccggggcagggaggctgcagtgacccgagaccacggca

SEQ ID NO: 9586 - DNA, 233 bp, Homo sapiens
ggagagagagagagagagagagagacggagtcggagagggagggagcgagagaaagcgagagctcctcgccaccctccgccgcctctagaattcaccgggcgtctgctcggcggctctagaaggtcgggctgcgctgtgggctgcggggagccggaggcctcttgattggctctttgacgctttcggaccaattgtgttgctgcataggcgtggttttcacaggtcgagtgct

SEQ ID NO: 9587 - DNA, 201 bp, Homo sapiens
cgcggcacagccactttctccgccgaggcggtaccctaaccctgtgcctccccaggatcgcgggctgcaggcactcggttcccgaagcggaggccggagccgcgcggagaagccaacggtaatgacgccccctgccgaccttcaggaggggataggctgagggcctggacgaggtcggaagcgcttctactgcagctccgg

SEQ ID NO: 9588 - DNA, 201 bp, Homo sapiens
tcctgagaagcagcagcagctggcctgcctgttgccccgcccccgtgcatggctgcccagcgctggccccagtgcccagcgtctccgcccagcacccccccggccctccctccccaccccccgcctccgagctgcggggagtcccagcctgggatctttgcctcatgtccttgggctcctgccctggctggcccgtccccc

SEQ ID NO: 9589 - DNA, 201 bp, Homo sapiens
ggccccgccgggccggtcgctgcgagcctcgccccggtctcggccaccgccggggaggacgacgacgacgtggtgggggacgtgctggcactgctggccgcgcccctggccccggggccgcgggcgccgcgcgtggaggccgctttcctctgccgcctgcgccgggacgcgttggtggagcggcgcgcgctgcacgagctt

SEQ ID NO: 9590 - DNA, 201 bp, Homo sapiens
tttcctccagtacactttatgcaaaagtcagtaaaaatatttctcctataagtctaaacaaatgtttaaaaatatgtaagttaggaagttatttccaacacgcatattcttttcacatgcagaagtaatggtgagaatttttcatatcctttgcagcagactcccggccccggggctgggccctcagcaagctcattcctg

SEQ ID NO: 9591 - DNA, 201 bp, Homo sapiens
ctcggccgtacccccgccccacccccacggcagggcccccagtgcttgatcaagttcaagctcgagctcctcggcgcgctgcccaccggctgcccctccgcgcccctcccccttccccatccgcaccgtctcgctcttcactcttcctttgtctctttcccaccacttagtttacaccccctccgccctcctccccgcccc

SEQ ID NO: 9592 - DNA, 201 bp, Homo sapiens
gggactgggaacgggatagggacgcgccccaactcactcagcggtggagctggggggcggcgcggtcacgtgggatggcgggcagctcaggggatccgggcgacggggtctggcgggcagggttgttccagccgcctttataaagccggcctccccgacccctcctcctctctgcagctctcccctcctcccttgggggct

SEQ ID NO: 9593 - DNA, 201 bp, Homo sapiens
cagccacccacctgccccccacgccccactcaccagcgcgcacggccccggcaacctcacccggagcggggcgccgccgccgcctctgccgcagcccggccgggccgctgggcgcaggggactccgcgccgccgctgccgctgccgccgccgccgccgccgctgccgctgctgcatcccccggcgagcgctgctgctcctc

SEQ ID NO: 9594 - DNA, 201 bp, Homo sapiens
tttgggggacgccggacgccatgttgtggaaaataaccgataatgtcaagtacgaagaggactgcgaggtgagctggggctccggggtgcagccccgccccgccgaggacagtccgggaggcaggggccactggaccgaggtcggggacgagggcataggagccctggcctctcggtgggacgggatccacttctccggac

SEQ ID NO: 9595 - DNA, 201 bp, Homo sapiens
gggagggaagaaggaggcggcgagcgggaagaggaagaagacgcaggcagcgctaggcgagctcaggggcgccgggagcgcggagctcgggctacggactcgcgggagttcactgcgcctccgggccctggagggctgcccctgcccgcaggcccgggcgcttccgccaggaggcgacagcgccatgttcctccaggttcc

SEQ ID NO: 9596 - DNA, 201 bp, Homo sapiens
ttcagccggtccctcgcatgactggatcacatgagggacccaagcccggccagctgccacctttcggaccacatgcgtgctcagggaccgctctccaactcggcatggggacttggaaaaaaagatcagggcagagggactggggccgggcccggtgaccgctcctcggcaaccaaaggacagtaaaggacggtccctgac

SEQ ID NO: 9597 - DNA, 410 bp, Homo sapiens
cgcatgcgcccaggccggtccgcaggcctttctcgccccagccggcagccagctcgttcgcgctggggtcaccgcgagccggtccgcagcggggtcaccgcgatccccggcgcagacacagaggccgcccccagccccgccgcctcgtggtcccgcccccgctgcacgctcccttacccctcggacctcgcagggccgcggcggacacggcccgatcggggacgtgaacgcgcagaactacatttcccagcgtcccgctcgcgctggaactacacttcccggggggctcggcggtgcacccgccggggtcgcggattggaggtttccggttggaaaagccccttggcggctaactggggaggactggaagaaatctaggatggagccagcactgctggcccaacatgtct

SEQ ID NO: 9598 - DNA, 201 bp, Homo sapiens
aagtccttgggaaagatccgtcccattcccggaagctagagggcgttagttgtcgggttgaaaaggggtgtggggaggggaagcagctttaccccgggctcggagtttgcaggagagagaagtggggagcaagaagtgaacctcaggggctcacagggttcccgcagatgctcaggccggccaggaatgcatctctggctc

SEQ ID NO: 9599 - DNA, 201 bp, Homo sapiens
tctaccacgtcggggcgacccgctgcctgagcgagcacgccccgcacctcctccgcgacgcgcgcatgttgttcggcgcttcggccggggcgttgcactgcgtcggcgtcctctccggtatcccgctgggtgcgtctggggacgctgcccgggctccacgtgcggagtgggtgccccctaggccggggagcgggggatccc

SEQ ID NO: 9600 - DNA, 201 bp, Homo sapiens
actcttggatcaggaaacagtgtgtgtgtacacgagagagagggacagagagaggggggacatgtggagtgcactggaaccaccataacccccatgaaggcggcaccggagttattggcattatttgtgcaactcttcttcatgcttgacgtcgtttcaaaataaagagtgagctgagcaaatcaactcggcagggcacat

SEQ ID NO: 9601 - DNA, 201 bp, Homo sapiens
gcggcggggctgggtctggggctggacgttgacctaggaccccgcccctgcccgccctgcgccgcgcccctcccgggccggccttgaccgagcagctccacgcgggcccggggctcgtccacccgacaggagcggggggctgcagcccacgagcccacgagcccgcagcgacgcacccggagtgtaacctcgcagagtcac

SEQ ID NO: 9602 - DNA, 201 bp, Homo sapiens
gcaccgcgcggcggcgcctggcgggcactgttgcccgcggagggacggtgggggggtttcagcagctggcgggggtggagggggcgggagagggagcctgcgccgggctgagcctggaggtgcggggcgggctcggggagcgctcttggggctcctcctgccacagccggggcggctggaactctctccctttctccctcc

SEQ ID NO: 9603 - DNA, 201 bp, Homo sapiens
gccgcgccgccgggcctcggggacacccctcgccgcctcccccgactcgcgccgccggggccgccgggccgcagggcacggggccggcgcggggggggagcggagaggggctggggagccccaggggtccggggcccgcccgcgggggatgggcagggaccccgggccgcgtggggtgcgggggccgcccgcattgaggac

SEQ ID NO: 9604 - DNA, 201 bp, Homo sapiens
ttcccttttaaaaagagcctcccagagctgtcgaaatctccgcggggtgaaagctaaacttttggagtcgctgtgtagccgggtagaggacacggcggcgcgagccggaaagataagtgtccaggcgaatgggaaaggaaagatcttaatttttgttcctactgttagctgaatgtccataaaaatcaaagggaatgcggg

SEQ ID NO: 9605 - DNA, 201 bp, Homo sapiens
atggctcactgcgcaagctcacacccagtcccaggaagcgagccccacgtcgccccagctctgcattcacagccgccaagcggtcccggaagccgaatgccggataggtcaaagacagcgccgctgctccggcactgccgccagagggcgcggagtcgccgtgttggcctgcacctcccttgtcacgtcagccgaacggct

SEQ ID NO: 9606 - DNA, 201 bp, Homo sapiens
gcggcccggaaatgagcgccctccggggacagggggctctgcggggcggcgacagctggattcccagcgcgcacaaagcctgcgggaggatccattgtagcggtcgctcctccccgcttagcgagggcgggcgcaggggcgggggatgtcgaagggtcaggtttgtccaggccgcgccaccttcgtttcagacgttcagtt

SEQ ID NO: 9607 - DNA, 201 bp, Homo sapiens
cctcgagggccgcgcgggctcaggcgcccacggccccgcagcgccgcgcttctcgcgagaacgcagagacccgggtccgccctgagccgccgattgcgggcgggagccggcgggcaaggcgcgcggccggcagccggagcggcgcgtaacgcagctgagtgaggtcgtcggtggaggcacggagcagcaggcgcccggggc

SEQ ID NO: 9608 - DNA, 294 bp, Homo sapiens
tcccgcgaaggccccggcccggccgggcggggtggggcggccccggcctcattaatcagcggcttgttgtggatgccggcggaggagatgccacccagggcgggaaaaggggcgcggaagaggggcggggcgggccacggcgcgcagggcccttccctcccgcctcggactcaattaattgggcttgagcttccgccggggagggggcgccgggcggggccgcggctgggcggggcgggggatcgggatcggcggcgggggctgcggccttgcagtggaagcatgggcggcgag

SEQ ID NO: 9609 - DNA, 201 bp, Homo sapiens
gtgtggaggctcacgcagcgcttctggctggaacggggaagcctgcacttagctttgggagtgggtttgggagagggaggaggagccgccgggagtctggcgggagggcggtgttcccgtctgggttcctctctgctgtcccagccccggtagcttccacagcagcctcgaagggtgagaatttgctcttctatggacttg

SEQ ID NO: 9610 - DNA, 201 bp, Homo sapiens
cttcccagcctccagagcaagccaatcagggacacgctctcgtggcccagttcggaaacaatgcttggtgggaacctgcaatcttggctgccggaaccttcggggaggattaacgccggcgcaccgtgcggccggggcggggcgccgcccaaactcaggccctgtgacagcgactgtggcggtctggaaagcgtgggcctc

SEQ ID NO: 9611 - DNA, 201 bp, Homo sapiens
aaccacccccaaaataacccctccggggggtgagaggcaattataaccccagcgagcggagggcgcgggggatgggcgccgggcgggcgggggcggggagcgcggcgcgggtccccaggtggcgagcggaggtgctcccgccgcggggggaggggcgggggcgcacgcggccggcggcggggggaggcggcgcgcggggga

SEQ ID NO: 9612 - DNA, 201 bp, Homo sapiens
aggccttcgcacccaccgcgtgggctcctgccctggcctcacctgcccccgacactccccgtccccgcgatgcccaactccggcccgagaaggctggccgcgacctcgcccggtacccgccgccccgacaccaccattcgcctcctcgacctcccccggcgccgctgcccacccgcccctcgccccgctcaccggggccgc

SEQ ID NO: 9613 - DNA, 201 bp, Homo sapiens
ggggacgcccgcccctcttccgggcagccccttccacccaggcgggatctgggtccccgctggactcagggccgccttcccgcaggcggggccggcccggcgcgcaccttgtctcggatgccctggcgcacggcctcgcgctccgcctccatcttggcgtacttggccttgcgctcctcctccgcctggcgcagcgcctcc

SEQ ID NO: 9614 - DNA, 201 bp, Homo sapiens
cactttttctttgcgcgtctgtcccttcctcgcctgcaggatttcgctcctggcccgtcctccccttccctgctgggcaggctcttccggagcccacccccggcggcggcggcggtagccgcggccgcggccgctggattccgagaggcgcggggaacttttttaccccctgccctggttttatctgtttcttttctcttt

SEQ ID NO: 9615 - DNA, 201 bp, Homo sapiens
cagggaatcacaaaagacggccggcggcgagcaggctggggtgacggggaccccgtggataacgggcttgaggacgcccagggcttcagccttttccaggcgtccctcgccggggcaacgcagagcagctgccgttcttcccgcgccccagcagatggtggtgtcagcccggcctcgtgcccggccgccgctgcgcccgcg

SEQ ID NO: 9616 - DNA, 201 bp, Homo sapiens
ccagataggcatggtcaaggcagcctgtgactcatttcacaaaaccagagactcttgttctttgtggagcaagacttcccggaggctagagcaggatgatcgtcaacttttctccttagagccggttcagtctgataaagcaggggccaccccggagtttggaggggaagagagcccaggcacaaggccatccctgggaaa

SEQ ID NO: 9617 - DNA, 201 bp, Homo sapiens
gggcgcgcggcgccctccatccacgcccggccggggcgcggcgcggcggcgggcacccggacggccggcggaggcaggccggcccgggtactagcctgggcggcccgcgggccggggcggcggcggggtggcggtggcggcggcagcagcgcggagccggtgggcgcagccgcgcgccaggccggcggtcggggtttgggg

SEQ ID NO: 9618 - DNA, 201 bp, Homo sapiens
cttgccacagacaagtccccgaagccgccttggtgcaggccacctggtttcccagcccctggtgtgtggtcagtgcctggtgttcctggaaagccactcccgggcagctcctgacagtgcgacccggcgcccaagcagcctgggaccttgcgcggacctgaccccttcagaccgcaggcagtctgggaggaggtccggccg

SEQ ID NO: 9619 - DNA, 463 bp, Homo sapiens
acgcttgtgctgcacctggcgctggccgacggcgcggtgctgctgctcacgccgctctttgtggccttcctgacccggcaggcctggccgctgggccaggcgggctgcaaggcggtgtactacgtgtgcgcgctcagcatgtacgccagcgtgctgctcaccggcctgctcagcctgcagcgctgcctcgcagtcacccgccccttcctggcgcctcggctgcgcagcccggccctggcccgccgcctgctgctggcggtctggctggccgccctgttgctcgccgtcccggccgccgtctaccgccacctgtggagggaccgcgtatgccagctgtgccacccgtcgccggtccacgccgccgcccacctgagcctggagactctgaccgctttcgtgcttcctttcgggctgatgctcggctgctacagcgtgacgctggcacggctgcggggcgcccgct

SEQ ID NO: 9620 - DNA, 201 bp, Homo sapiens
accgggagtgcccagcgacttcaggccagctcgggggaaagaagcggccgccgccgccgaggctctctggcctcgggactccggcgctgcctcttcctcccgcacctgctggggtgggctggagccgtaaccgaatcccggccgcggcgcctgcaaagtttttccctcgaagctccgcggctccagtccactggcgtcccc

SEQ ID NO: 9621 - DNA, 201 bp, Homo sapiens
gctccacagccccggccagaacttggtgggggacgcggggggggggtgtttgacggggagggggcacagtcctttcgggccaacttccacattcctgctccgcccaggcggggggtgagtcggggtgagcagccggctccaagctggccggcttcctggaaagggagggccagcaggagaactgcagatcctcccagccct

SEQ ID NO: 9622 - DNA, 201 bp, Homo sapiens
gggaccgcttcaagcagttcgtcaacaacgtggcggtggtgaaggagctcgacggcgtcaagttcgtggtgctgaggaagaagccccggcccccggagcccgagcccgcacccttcggccccccgggggcagcggcccagccgtcgaaacccacttcgacggtcttgccgcggagcgcctctgccccgggagctccgccct

SEQ ID NO: 9623 - DNA, 201 bp, Homo sapiens
gcttccagaggcccagccctgtcccctactacacacagctaccaccccacccgcccctggggctcggctgcccttcccggtgtctcttaaacccctcccccgacctgggtgttaagcccacccacctcccggcgccgcccccggtcgaacagcctcttgcccttccttcgcctgggccggagccccccgcagcctcctccg

SEQ ID NO: 9624 - DNA, 201 bp, Homo sapiens
ggtccggcttggggctgggctggggagcgcggcggctgcggctggggcacggggcggccgggtgagctggccggcgctcgctctctccattcagtgagcacggcagacaccggagacgcggggcccacccctccggcccccccccgaccaagaaacgccaactccgcctcccattggctgcgccgcgcgtcatgtcgacta

SEQ ID NO: 9625 - DNA, 201 bp, Homo sapiens
accgagcccaaaagccgccggcggcacatcccagcggcctccctcctcccgggctgggattcgcctctgcaagaaacgtcatgttttctctcccagacatcgttccgggagccccagatgtaaaatcagaggtctcttatctggcattattgatctctgtgctaataaaatgtcagtccccaagggaaaacttaaaaaaag

SEQ ID NO: 9626 - DNA, 201 bp, Homo sapiens
gccgcgcgggacggggcagggacctcgagaacaccggggacttgcgggccggtggccccgggcaggccacttctgacgcgggtgcgaggccttccgcgggcgtgcacggttgggccggagccgcgccgggggccgggacacgcctggggtcagcgctggcgtcgccgctcgggtggggtgggccgggttcgggtccagtct

SEQ ID NO: 9627 - DNA, 201 bp, Homo sapiens
ggcggcgcgcggcagagctgggtctcccgccaggtggccgggggtgtgccctcagggtaccctacccgctacccccgcgcctccagtcccggcggccgcgcggaccccgcccctgctgaccccggcgcacgctcccgcgccgcgcgcagcctcccgcctcccgccgaccccgccgcgccgccggcagccctccccagcccc

SEQ ID NO: 9628 - DNA, 201 bp, Homo sapiens
tcctccctctgctgttccaaaacacccttcgacgccagcaaaatacaatgcgcctcggccgccgtaaacagccgggagggagagcacacattcggcgcggcgcggccgccggctcggctcccacccccttcccgttcctagaaaatgccataaaagcgggcagggcgcggggagggcggctgcgcgcccggcggccggggc

SEQ ID NO: 9629 - DNA, 201 bp, Homo sapiens
agccaggaaatgcggggcctggtggggtgaggagcacggggttcctccttcatcctcgcggggactttgccaccggctcagtgtggaggcctcaccgtcccgcccggatccgtggggctccgacagtgtggcccctgcgaggaccccccccatcctcctcgccctggggctgctgcgggagggcgcccgggcagcactagg

SEQ ID NO: 9630 - DNA, 258 bp, Homo sapiens
gcggcggcagcggcggcctggcccttccagagggccagagccagggacatgcgggcgcccgggactccgcgttccgcgcggcccggcgcctgagcgcctccgttccccgtcccggagctgccggcggcatgatccgacacgccggggcgcccgcgcgcggggaccccacggggtaagtccgggcggccgccccctcctccctcgcgatccccacggcccgcgtcctggccgccccactccacttcttgtcccagagag

SEQ ID NO: 9631 - DNA, 201 bp, Homo sapiens
ccgacggccaaggaaagcccaccagccctccgcaccgtgggcgacgggccaagacccggccctaaacggccagacccagcccctagtcggctgccgcccccgccccacgcaggcgcgctccggggccctcccctcccccaccgcgcgctcgcggggcccgacgggggcggagcgaccctcggaaggggcgtggcgaccggg

SEQ ID NO: 9632 - DNA, 201 bp, Homo sapiens
agggggacggccagacgggatgtcggaagccaagggacgcagaggccggcgggtggcggcgatggagaggacagatccggctcccagaggaggtcgtgagcgcggggcctgcgccggccggaggagggacccggggggctgcaatatggctgctcgggcgccgtcccctccctgccaagccagggctctggggagctgctg

SEQ ID NO: 9633 - DNA, 201 bp, Homo sapiens
cccgtcgcgccccggccgggatggacccacacgcccgatgagccccgcgccggcggctgcgagcgccgagcctccccctgctgcggccccagccgccccccgcgcgcccggctccgcggaccaggacccctgggctccccggctgagggcgcggccgctccggagaggccgagcggggacgggcccgagatggcgcgggga

SEQ ID NO: 9634 - DNA, 201 bp, Homo sapiens
cagtcaggacagtacaaaatctctttatcgctcattttctgtaaaaaatcgtggctctcggcggaccctggagataggaggtgcaaagggcgctcacacgcggcccgggtccgcggccgagagctggggggatctggagcggggccgggtcgcaagaagaccctgaccctgctccggcgctggggcgcgtgctaagggccc

SEQ ID NO: 9635 - DNA, 201 bp, Homo sapiens
tgccgggctcgacgtgcacagtccagcgctcctccccactagttactgcccaggccccccgatcctgcacccgccggaatgagagaaagtagcccctcgccgcccagctcccgggtagctgctccggccgggccttgcgttggtgagaaagttccatctagaggcggccgcgcgcaactgcaggcggcgccctaggcccgg

SEQ ID NO: 9636 - DNA, 201 bp, Homo sapiens
cgcgggtaaggaaagcgcgcaggccctgcagacctctccaccccggccccctggcccggctcgcccctccgccccggggcggcggcttcctgctctgcagcgagcgtccgcaggagggacgccaggaccccggacgccacctctgaggtctctctgcacctgggtctctgacagccgggaacaggcaggaggtggggcgag

SEQ ID NO: 9637 - DNA, 201 bp, Homo sapiens
gtgggaggccggcagcgcgggcgccgcgtccccggaggagctcgcgtcccctgaggagcgcgcgtgcccggaagagcccgcggcgccgtcccccgaaccgcgcgtttggcttgaggaccccgcgtcccccgaggagcccggggagcccgcgcccgtacccccggggttcggggcggtgtacggggagccggacctggtgct

SEQ ID NO: 9638 - DNA, 201 bp, Homo sapiens
agtgcggatttcggtcgcgtgcggctctgaccgcgtcgccccatccctggcggggccacgcacggacgccatggctggcgccgcggagccgggcgatgcgcgcggactctcccggggccctgactgtccctgagtcctccctgcggggggcgtgcgcggcccgccccccgcggcgccacgcggcccctcctcggccgggga

SEQ ID NO: 9639 - DNA, 201 bp, Homo sapiens
gcctgcggagggtgggaccccacagcttgtccacctgcccaggctgagacctcgtgtcctagtcctggatgccccacgggtttctcgtcccgggcagcggcgcacgggaggagaagactcccggtctgcagtcagacctccctctgagaccctccctagctcaggcttagagctttgggatttttctcgatcctttctagc

SEQ ID NO: 9640 - DNA, 201 bp, Homo sapiens
ccggcccctcctcccgcggggggctccgtcccgcgccccgtccctccgggctgcagccggcagcccacgtccagggagggcggagggaggaggagaggcgcggagaggagggaggggagaggggagggaggaaggcgagagaaagggagctgcttccatcccggacttcccagagcctgcctggagcgcgtactcagcggc

SEQ ID NO: 9641 - DNA, 203 bp, Homo sapiens
gcgagcggctacggggtggggagcaaggggcgcgcgggcggcaggcatggaacggacgcggcgcatctcgcccaccgcgggacgcccggacggcggccggcgcgcgcggcccgcctcgagcccgagagggcggggagacaatgcctgtccggcggggcagtccaggccgcacgctcccgcccgcggacacgggccgctcctac

SEQ ID NO: 9642 - DNA, 201 bp, Homo sapiens
tcgtggagccgcgctaggccacggggtcccggccagacgggagcgccagcccctccccctgtcccgatgtccccaaacccaggctcagcccctccctccccgacccgatgacacccctgggtcctagaatgctgctgggggcgggagaccggagaagaagcaggtgcacggggaggtgggtgtcctgccctctgcgaggag

SEQ ID NO: 9643 - DNA, 201 bp, Homo sapiens
cctgggggggcgggccggacctgaaggccacaggcctcctcctgcgcctacccctcctgcaacccccacagcctcccccgccgaccccttcatgcccccccgcccccctgcccggcgctcctccccggccgcgggctaattggctgtgacagctggagccctgggcagctgagcggtgtcactgcaaattaggcaggcgct

SEQ ID NO: 9644 - DNA, 201 bp, Homo sapiens
ctggaagggcgggggcggtgacagcggcaggggcgggacccggaggcggggcgtttgctcacgtcgtccagtagcggagggaggcgcggtcccagctccgcgctcaggagccgcacaggcgcccggggccgcagcaggagcctcctcagggcgcccagcgctgcacccacgagccgcgcgtcgccttcgcccagtgcgccc

SEQ ID NO: 9645 - DNA, 201 bp, Homo sapiens
ccgcaccccgcccgcctgctcttcaccggccaggccctgccgggtcgccgcggcctcggcgccccaccccctcccgggccagcggggggctgggagggggcgaggaggaagggggttctcctctcccctccccggagggggccgcagcggcggctccggctcctcctctccctcacaccccctcccgcccccctctacctg

SEQ ID NO: 9646 - DNA, 201 bp, Homo sapiens
ccggagggagggggcaaaggaagaaaaagaaagcgcgctcggaaagccggcttgggtcctgctaattattctgaaggcaaagtacctgcactctccccgccgaggctggctggcggcgccgcgccggaggggaggaggctcgggaggaggaggagaaagagcagcgggaggactcgggctgggaggggagcgcagggttgg

SEQ ID NO: 9647 - DNA, 201 bp, Homo sapiens
tcgccggggagccgcaaagcctgacggaagaggctgcggttctcgcgcttcagccgccggttctcgagccgcagccgggcgttctcctgacgcagccgcgcgttctgccggtcccactcgtcccgcgcacggatggcctccaagtggctcgccgccaggtcggcaaaccgctcctccagctgctgtcgggcgccgtccgcg

SEQ ID NO: 9648 - DNA, 201 bp, Homo sapiens
gcggcgggacgctacctgcgaccgggaccatgaggagctgccagacccgtggggccggtaacgagagcagtcgcggcacctgctgagaggaaagagggagcggtccggcgcggctggggcgcggcagaggcttgcccgatcctcggccatgtcactgctctgcgtgcgcggtgagtgcgcggactgaggcggggaggcggg

SEQ ID NO: 9649 - DNA, 201 bp, Homo sapiens
gcgtcagacttcctcactatactctcccaccccaggcgacccgccctggccccgggtgtccccagcctgcgcgggccgcttccagtccccggtggatatccgcccccagctcgccgccttctgcccggccctgcgccccctggaactcctgggcttccagctcccgccgctcccagaactgcgcctgcgcaacaatggcca

SEQ ID NO: 9650 - DNA, 201 bp, Homo sapiens
aaccatcagagaatcctctcaaaaacacagacccgatgaggagtggcttccccgcctttcccctgtgccgagaagggatcccggtcgccaacaacaaagacgcttcccgctcccctccccccgccggcccgggctcgtccctcccgcgctgcggctcccggcctagcgccccctccccgagccgggctgcggcgtccccaa

SEQ ID NO: 9651 - DNA, 201 bp, Homo sapiens
ggagggccgcggagacgcaggcgctccgggtcgcccgcgctgcccctgtctgccccgtgcgggagccggggtccctggctccctggctccctggctcccgcggcccgggcgaacccagagcgcacccgtacgccggccccggccggtccctagcgcccgggctccacgggccgcgcccccacgcggcgcctcccagagacc

SEQ ID NO: 9652 - DNA, 523 bp, Homo sapiens
ctgcgccaagtttcagaaccacctagccccgtgcctgccgcccggggcccggcctcgccccggccggcgctcacctggcggtgccgcccccggaagaccacggcgaaggccccgtgtcccacgagatccctcttgctgtactcgaagtcacccaccacctccatggccgcgcccccggggcacacagcggacgggcgggcggcgcagtgcggcgcaggtatcagcaccgcggctccgcgggcccggagcgcgccagcgtgcggcgggtctggggcagccgcagccccgggcccgggcggactctcatgccgagagaccggagcggaaactggggaagctgccgcgcggagccagggtcagcgaggcccggcccggcccctgccgctcatggcccggcctgccgccggccgctggctgtctggcgaagcggcctcggcgctgccgggccaggggtgccgtcaccgtcactgtgcgcgcccagagccgcacacgcgctctgaggcagtgaggggcccggtactct

SEQ ID NO: 9653 - DNA, 201 bp, Homo sapiens
cggcccgtatccctccgccgccagccccagctctaaacccggcggctcagcgggcgcaccatggcactggagtagcgcggggagcgcgcccggagccccgcggcccgctgcgccccgcccgggaccccgctgcgccgcgcgccccccccgcggcccgcggggccgcccctgcacccccaccccctcccccgcctgccgccg

SEQ ID NO: 9654 - DNA, 201 bp, Homo sapiens
gcctccgcccaagtgtggctcccttgggcccacaccccatcaggccagcaaggagggggatagcggggggcggggcaggtgctgggactccgggcaggtgcggggaaggcagggggcggggggggaaggggttgggcgatgcaggtgttgggggccgggacagttgcgggggtaggcaggtaccgggaaggcgggagggcg

SEQ ID NO: 9655 - DNA, 201 bp, Homo sapiens
cgcagatcctgggccccggccttgctatccagggggaccttccctaacgatgggaccggtgctcggagtggagtatggggagtgcgccttcgggagtcggcgctggccggatatgtgacaactgtgggtcgctggaggcccgcctgcgctgggatagggcctggacttcacgtgcgtcgcctgtgttccgtcagaccgggg

SEQ ID NO: 9656 - DNA, 201 bp, Homo sapiens
gggtcggctccgcggccgacctggggcaccgcgccggggtgaggcctggcgaggaggcgaaggctgcaggcgtgaggtgaaggccgcaggccggccgggccgattttcgctatgtaaatatcggtgagggggggggagggacgggggacaagatggcggcggctcggcgcctgctgcaggggacgatagagggggttgccg

SEQ ID NO: 9657 - DNA, 201 bp, Homo sapiens
ccctcgcgcccctcccgcgccctacatccaccgcccggcggagggggctcagtccgcagccgccgccgccaccgccgcgcctcggcctcggtgcaggcagcggccgccgccgccgagacagctgcgcgggcgagcatccccacgcagtaagcccgctttctttccgcttgtgcgcgcgtgtgtgcctcccgcccgccggcg

SEQ ID NO: 9658 - DNA, 201 bp, Homo sapiens
gcgggggcccttcacgtggcggaggcttcccggcctgggggccacgggcccggaggaatttgcctggaagttttccatcacggcagagccttctggagctcgccccgtgctcgacaaggggagccccagacttgatttctccagcagccccgcggggcggggccgagaaggggcgggcgggcggaggacgctggcgggaga

SEQ ID NO: 9659 - DNA, 201 bp, Homo sapiens
aatgtgattatagttaacacatgacccttctagcgtcccagccagtgtttttcctgacctctgttctttggagaggaggatggaagggaggggtccggcacgctgctggcattttgctgtgtcctgcagcccctttccgggacacctgggttcacacagctttttagcttacataactggtgcagattttctgtgtggaga

SEQ ID NO: 9660 - DNA, 301 bp, Homo sapiens
tttttttccaatttctggcggcgggcggctggggaagcagctctgtggtctcccggcgggtgaggccgagacagagaccaacctctaggcggcgccctggcgttgagtccgcgctgaacaagattctctcgcagctctgcgtcccgcgccgggtgaaggggcgtgttcctgcaggcgctcggggctcggcctggagctggcggccggcacgtcgcctttggcgccctctgccaaccaagagaaacacggttaaatgagtgcgctgggacagaaatccacagctaatcaaggccccatccgc

SEQ ID NO: 9661 - DNA, 223 bp, Homo sapiens
gcgggggcggcggcggccgtgagccccgatgaggcccgagcgtccccggccgcgcggcagcgcccccggcccgatggagaccccgccgtgggacccagcccgcaacgactcgctgccgcccacgctgaccccggccgtgcccccctacgtgaagcttggcctcaccgtcgtctacaccgtgttctacgcgctgctcttcgtgttcatctacgtgcagctctgg

SEQ ID NO: 9662 - DNA, 720 bp, Homo sapiens
gacagccgtgttccatccccgccctgtgccccttctcccggacagtgccttctccagggctcacccaggagggtgcagcggtggcccccggggcggtggtcgtggtgggggtgttagctgcaggggtgccctcggtgggtgggagttggtggcctctcgctggtgccatgggactcgcatgttcgccctgcgcccctcggctcttgagcccacaggccgggatcctgcctgccagccgcgtgcgctgccgtttaacccttgcaggcgcagagcgcgcggcggcggtgacagagaactttgtttggctgcccaaatacagcctcctgcagaaggaccctgcgcccggggaaggggaggaatctcttcccctctgggcgcccgccctcctcgccatggcccggcctccacatccgcccacatctggccgcagcggggcgcccggggggaggggctgaggccgcgtctctcgccgtcccctgggcgcgggccaggcggggaggaggggggcgctccggtcgtgtgcccaggactgtcccccagcggccactcgggccccagccccccaggcctggccttgacaggcgggcggagcagccagtgcgagacagggaggccggtgcgggtgcgggaacctgatccgcccgggaggcgggggcggggcgggggcgcagcgcgcggggaggggccggcgcccgccttcctcccccattcattcagctg

SEQ ID NO: 9663 - DNA, 1683 bp, Homo sapiens
tagtggcagtgttgagcccaggaatacgcgcggagcccgcggcgatccccgcggccgctcagtcttcgcggcggactccggcgcgcaggagccactgggccgcaagggcgccggggagcgggaggggcgctgggggcggcaaggggtcccagatcccaggccacgaactgttttccttttccccgggcaagagccccgctcccttcaactgacagaaattcactggggcaggggggcgagtggggagagaggtcgctcagggctcgctactggctgcgcctcccccggctctggtctgggaagcggctctgggccctccgggcgagcagcttgggcgccggcgccccctgcgaggaagatcgcggggtgacggtcggtacccgttcggctgggccgcgctgccgctccgatccacctcccttccgcgcccgcgccctcccccttcctttcactaggagtccgggattcggagagggcgcgggaggcaggcacacgggcccgaccccactccagcgctcaccggggacgcgggcgggcggcgacgggacgcggcgggggcgcggggcgggcgcggccatggagcagcagcggcggcggcggcggcggcggcggcaacactagcgaccgcgggcggacgagcgggcgggcagggccgccgggctcagcggaccgaactgcacagctcagcaaaagcgccctcgccctccgcgcgccgcctcctgcgagcccaaacccaccaacattttttaacgctccaacccatcctttgaagaaaagcaaaaaaaaaaaaaaaaaaaaaaaaaaaagcaaaaaaagaaaaagcattgatcggagagacggggatatatatatatatatatatatatatatatatataaaattttttttggctcctgctaaaattagcagggctcgccgcgcgcctgtgtgccagtgtgtgcgagtgtgtgtgcgtgcgggcgtgtgtgtgtgaatgtgattactccaggactcctcgggctccggagacgccattttcccccttgatatctctctccataaatcggtggcgcggcggaggcggcagagtcgggcgggaagcgcggggccggccggggcgcccgccgctcgccgccgcctccgcgcgcccgggggccccggcgccccccgagctagggcggccagctcgcggctcgccgtttgacagatgctcatcgccatggagttgccgcagcagcacctttgggggctcgggcgagcgacgggagccgggatctgagcgagcgccggggccagcggagccggagccgccgggacatgggtgagcacgcgcggcgaccttggcccgggagcccgggcgcccagcctccctccgcgccgcgggcccccgcactcccggaaccgggggcgacgtgtgtgccctgcatgcaaaagttcacgtcgccttgctgggtctttgactttgcacccggcgggaagggggagaccgggccgagggggcgggatgccggtccgggcgaggttgcaggagatgggcgcgattccggcgggccggcgggtgggcggcgatgctggctcaattggagtggctcgttggtggcggcgatggtggaagctttgggctggagggctgggagcttattgagtttcgcctaatctgatctaccccccctccgccccccgccttttgcaccctccctcggt

SEQ ID NO: 9664 - DNA, 233 bp, Homo sapiens
ccccgcccgggccgctcggctcggctgtgctctgctcggctagggcgggcgggtccgcccctcctccggccggcgccctccccctggctccccccttccccgcgtcgcccgctcccgctccccccgcctccccggcgccggcgcagcccccgcgaacccgggcgcaccaccccgggtgtcccggcctggggaccgctgccgccccggccgctgctcctttaatctttttgttt

SEQ ID NO: 9665 - DNA, 213 bp, Homo sapiens
gactgcgcgtgcgtagagcacgccggcgcggccccgggactctcgcgataactgtactgagataaagtgtggcaactcgagctggctggtgattcatcctcggcgaggggctcgcgtgtgggccacgtcgccgtctccaccgggaaagcggggaccagtggggggggcccagctgcagggtagtgggaggatgctgtttgctttgggggaagg

SEQ ID NO: 9666 - DNA, 236 bp, Homo sapiens
ggcagcgccgcctgcgccgcgttcagcacgaagagctcgctccagctcaggcgcagcagcgccacctggtcggccaccggcagctcggggaagaagggcgcgtggcgcgcccactccacggtgctgaagagcagccgcgccgccagctcgcacacgttgtcgatgcccagcaccgcgcccgccgcgccgccccctgcgccgaagcgtccggccgccgcagggtagggctcagcgcg

SEQ ID NO: 9667 - DNA, 233 bp, Homo sapiens
gagggtggggttttaaacgttatccaatcagcgacgctgggctgggaactgtccaatcaggcacgcagcttgagcggagaggacggcttccgggatgtggcgggatttgtccgcttctttgtctttggctgccgctggaactccgggtctcgtcttcactgctctgtgtcctctgctcctagaggcccagcctctggtcctgtgacctgcaggtattgggaatccacagctaa

SEQ ID NO: 9668 - DNA, 737 bp, Homo sapiens
aatgacgtcgtaaacaatagcactaaccaccatcgtccgcagctcccgcgtacagaggcctcaggctcccggctccacgtggaccgacctcgcccggcagcgcggggccacctcaccgcgagctcctcccgcagcccggcccgggtcacctcgactcgccaggcttaactcaataaccacaacaccggaaaaggaagcaaaggtcgaagttcatccgcggccctgaggcctgtgggaaacgtagtccaacaacgaaagagccctgaagctcaagcggagcccgctggccgcaggggccgcaccacgccccagaccctggagtttccgggtgcgcagacccttgccatcagcagaggctgccgctgcgcgtcccctaggcgcggaagaggcggctggtggtccctgacggcaaggtgaagtcgaggcagtaatcgggaacccaggttgggaggacagaatggggaacaggaagctggggcgagggtggtcttgggggaggtggggggccgcggaattctaggtggcccctgcctcacctctggaaagaaccggaagcccgggccggggagggtgaagggagtcgcggacccggctgctcagccgaggaggaaacccggaccccaggctgagggaggccgaagaaggaactggagggccgggctgggaaggcctgaagcgggtacagcctttaggctggggagggtcgaggggagaactcggagcctgagtcgggcgag

SEQ ID NO: 9669 - DNA, 308 bp, Homo sapiens
tccacaggccgagcccacgagcccctcgaggggtgagcggcccgggcctcctggcgttctggccggctagccaagcgctggactacatttcccagaggcacggcgtccggagcgctggactacatttcccagaggcaccgctcccggagcgtagcttcatttccgttagtttgcgagatttggaggcctcgcgtggggagagggccgcgtctgtggaggagcttggctccgcacctgctgggctggcgaacccgaaattgggcttggaacccgggagccagatcttggaccctgaactgcacctctgt

SEQ ID NO: 9670 - DNA, 1100 bp, Homo sapiens
ctggctccacgcagcgcttgcagactgtgagcccgcagggcagcgtcaccggcttatgcagcagccgccggcagcgcgggcagccgagcaggtcgcggggcgcgcggggctccggggccggccctccctcgccgggcgcctcgggctcgccgcccgggttctccgcggacagcggccggtcgcgcaggcccacggcgcgcaccaggccgcccgccagctcttccagctcctccggccgcagcgccccgagccgcgcggcgccgcggaacgcgcccagggcttcggggaggcggccggcgcgggccagcgcgtcccccagcctcaggcacaggccgcggtccggctgcgccagcccggctagcatggagcgaaagagctcggctgccatctcgtagtcgcccgcgcggaaggcctcgtcgccctcctctaagcgctgggcgatcggctccgcgcggtcgcagccaggacactggggcggcggcggcggcgggaccggctcggggctcatcaccgcggggctgcgacgacgcgggtccggagcgaaggcgcggagcagggaggatgcgctgctgctgggaactggccggcgggagcgcggtctcagccctcgccagcagccacgcgcgtctgggggcggcgcgctgcgagcggctgagaccgcgggcgggggcgggcgcctggcttgggcagcgtcctcagcgcggtgtgggcggcgagccccgcagggctgcaatcgttccggggtgggggccgggacaggcaccgcgggcgcaatctgagcccctgcccacgcgcagcggcctctcagtcccgccggcttaggtaacccaggtcgctgcggtaacgcagtgaccgcgctccaggtccgcgtctcttgcgatgcttcccccactcgcctgagggctcctgcgcgactgcgcgcgcgtcctctgcctgccgcctccccgcagaggtgccggggccctgggagcaggtggccttggccgcgggctgctggcgcgccggcaccgcggcacctgctcttccccagaggcctggccgcccccacaacctgtggctccgcttaagcaagaacccaggaaaagtcaccaaacgcatca

SEQ ID NO: 9671 - DNA, 214 bp, Homo sapiens
ggcgagagcaaaaaaaaaaaaaaaaaaaaaaaaaaaaaccctaactgtaaatattatttggaggtgggcgagggcgcggcgtgcgcgcggcggcgggtggcgggcggcgcgggcgcccttgcggggattcccggtctctcagcgcgccctagtggacgccctgcctttcgctggctccccgtgctcgttacaatctgcaatatattatttcttc

SEQ ID NO: 9672 - DNA, 582 bp, Homo sapiens
ctctcccgcgtgcgccccgcacctgccgggggcccgtacccgccctcgccggggctccagggggcacgacggccgtggcccggcgctcttgggaggggagcgggacatccccgaaggcggcgcgctggaggcggggagcggccggggcgcacggagagggcggggagcccgcgggagggggaggagggggaggagggggaggaggcgcgaggtgggggggagcgcggcgggcggcagggagggagcgggagggaggcaagaaagtagcagaaagtgaggctggcaggcggcggcaaaggagccggcgcgcggcggcggcaggaagtctgtgcccgagaacagcagaaataagagccagggagggaccgcggccgcggcggcggcggcgagagcgaaagaggaaactgcagaggaggaagctgcgccgcagcccgagccgcccggcatccccgccgcctctgcgcccgcgccgcgcccccggcgccccctccccagcgcgcccccggccgctcctccgcgccgcgctcgtcggccatggcccgggagaacggcgagagcagctcctcctggaaaaagcaagct

SEQ ID NO: 9673 - DNA, 203 bp, Homo sapiens
ggcgacactcgcgccagctcccgggacggctgggctcgggctggtcgccgacctccgaccctccactagatgcctggcagagcccggcgcgtccggagcccgcgcccctcagagggaaggggtcgcgcgtcgccgcggcggccctgaggctgacggtcgggaggtgaaaggccggagtgcggggtcaggacgcctcctggagg

SEQ ID NO: 9674 - DNA, 823 bp, Homo sapiens
cgagttatccgtattctccttcaggagtcatagtcaggccagaagagtgcggagggacggggcccgggaagagcagggaacccccagagcccgcagccaacgcggaggtgggcgagcgggcgtgcgcgcactcacttgccggcgcgagggagtgtcgggggggaagggagtggtctccaaaagggggaggggagaaggcagggggcggggagaagccggccctttaggacccggctgcggcggcgagggaggaggaagaagcggaggaggcggctcccgcgctcgcagggccgtgccacctgcccgcccgcccgctcgctcgctcgcccgccgcgccgcgctgccgaccgccagcatgctgccgagagtgggctgccccgcgctgccgctgccgccgccgccgctgctgccgctgctgctgctgctactgggcgcgagtggcggcggcggcggggcgcgcgcggaggtgctgttccgctgcccgccctgcacacccgagcgcctggccgcctgcgggcccccgccggttgcgccgcccgccgcggtggccgcagtggccggaggcgcccgcatgccatgcgcggagctcgtccgggagccgggctgcggctgctgctcggtgtgcgcccggctggagggcgaggcgtgcggcgtctacaccccgcgctgcggccaggggctgcgctgctatccccacccgggctccgagctgcccctgcaggcgctggtcatgggcgagggcacttgtgagaagcgccgggacgccgagtatggcgccagcccggagcaggttgcaggtaacgcggtctggaacaagtagttg

SEQ ID NO: 9675 - DNA, 293 bp, Homo sapiens
ccgcgcggccctcataatgcagggactcctctgagtggtggccgtcctcgtcccagccctcggtcacccgcagcttcacaccgggccactggttcatcaccgagatagccagcgagttcaggcggtccttgcagcgctgggagaggaatgtgcgcgaaatcaaccagagcgaaatcagccggaggagccggccgaggtgcaggtgtaggcgcagcctcgcccagaactctcccgccacacccaagggagctggaagcccgggagggtgctgtccctctcccttaggaacagag

SEQ ID NO: 9676 - DNA, 262 bp, Homo sapiens
cggacgcgctgattggctccaggggaagcgggaggcgagaacaatggccccctccccccgttaaaagggagcggctgccgggcccggggacagggacgcgcgtgcagggcgcagagctgggccgagccgtcgccggcgccacgcgagtcccgcagccgccgcgcccgggcaatgggccgggggcactgagggccgccggggccgagcgcggaggggggaccgagccagtgccgtgccctcgggccgcgccaacatgccccgc

SEQ ID NO: 9677 - DNA, 240 bp, Homo sapiens
ccgctgcggggtggagggacccgcgccccccagcttctcgggcccgggccgcggggaccgtgcgcgcgtccccctcccgggcaaggccgggcggcgggcgcgccgcggcttctggggtccccgccctcttgtccgccatcgcctgcgggagcctctggcctggaggggctcggggcgcgctggcgactgcgggctcggcgacaggggcggctggtggcgggaggacagtgggaggaaggc

SEQ ID NO: 9678 - DNA, 1240 bp, Homo sapiens
agcgggccggggccgccggccaagcctttgtctggggacgcggcggcgcgccggagagtcccgaggctgcctgcaccgccccagagctctgggctgtgcccgcgcagggaccgggccgggtagagtcgggcggggtggagaggcaagcggagcgcgcggtggggctgaggggaggcgtggggcgagtgcccgttgctcgctctctagctctcttgctcttacgctctctcgctcgcagccgctcgcagctcggcggtgcagctgtgctggatccggcggcgccgcagccttttatcgcctcctgatgtcactggggtgcgggggcccgggcggcccggtgcgcgggccaatagctgcacggcctccgcggcccagcggcgcagggcggggcgcgcctgacagctcccccgccccccgcgtcagctgactggcggcccgagcggccccggagcggcggaggcctggcggagcgctggagcggagtgggacggccagcctgggcccacccccgtaccctgcaggtcccggcccacgcacgctcgcctggagtgcgcgccccacctctaggccaaatcaccgctttcccctcctcgcgcactctcctccctcagttccctttgcaccccacccccatcccgtgtcacccccaaggaggctcagaatgagcgccgggacaacgcctcctgggccctttgttcccaagcggcccccgcccagtgggcgacgctctgtgtgtcctcgcggcttctggccgtgtgtgtcgtgcgttcctgtttctggagatctgcgcgtatttgtatgttggggagggcgggctcgaggctccgagagttgtgttcagacccaactcttaacctcaggggacctttctcaggccaagcgagggcccctcctggcgggtgcagtcgcagagccctgaggttcgactccactggccccgccgctccccgcgttcaccccaccgcacaatgttcacagtgaaggcgacgggaaaagcagcagcccaaaggctctgaattcctcttccccgccacacgcacggaatcctgagcccccggagcctcggggccgaggccggcccgggacggtgctccgagtagctctccactgctggggagccggccctgtttttgtttgaacgttttgtaacgattaagcagatcccggcgtcagcccgccgcggagaggctcaaacaggcataaagtgcgaccccaagtggccactgtgcgcaaaggcgcc

SEQ ID NO: 9679 - DNA, 222 bp, Homo sapiens
gggcgacctgctgcttccgagtgttcctgggctgcgccttcttctcctacttgggcggccgcgccaagcgcagaggccgcgggcgctccggggccagaggcgccttcggctcgggccatggcgcccggcgccgggggcgcgaggagcggctcatctagtcagaccccccaccccgccaccgccaccagacaccaccatcgctgtgtagtgtgggtttttatt

SEQ ID NO: 9680 - DNA, 714 bp, Homo sapiens
ttcagggaaagtctttgaaagtacaatccggaaaactcagcaattcttaaaaaaaaatggctttccgctgttataagcctccttcctaagactcagggtccgcagcagaataccctgacccaaaataaaaatactatgacaaaaatactccaggaggcagccggctttacttcgtttaaagccggatttcgcttagtcccgtgaaagcgaaggagcaccagcgcttcctgattccgcacagttctctcggcagagacggcccgtcctctccaagaaccggaagccggacagcgtcaggacgttttattcttctcacctgggattcagagaggcagcggccaaggacagggcccccgccgaggccaccgggcagcgtccaggtctcggcctttgggaggggagcagcgggggaggggcacggggaggggcgagggcggggcgcgcctgggcctcggcgctgggctcctcctctgcccgctccgggggacacccacaggattcttgcagacctctgccgaggcaggatggaggcctgcagggatgcaccgcgggcccgcgacccgggcggccggaacatagttctttctggccggagatcggcccggtcgtgagtcgtgtctgtgccaggccccccacgctgtgctccagggcctcagtgcccggcgcgccgggggctgtatcgccagccacttggggcaggaaaaaggaatcaca

SEQ ID NO: 9681 - DNA, 1216 bp, Homo sapiens
aagtttcagaaacgttttcggaaagcctcctccaatgggaagcgacttcgccgctgagttaagcgtccgaatcctccttcccgcggcagggacaccggcccgggccaggtctgcggaggacgcccccgggcgcgcacacacagcccgaggacgcgccctgtattttaagacgcagggtcggatttcaccccgaaacttggctcccacagccccaggccgaactgtgtctggttctcagcccccgagcccgagttctacgccgcaaagagatggggccccattgtgcctagctggcctcctagcacggacgtgtattttcttttggtctgtcttttgctaaaaaccggcagtgcgcttcgcctccctgcccagccgcagcctgccgtcccctagacaaaaagcggcgaccgcggcccggccacccgagccccgccgcgctgcgcctttgttgggcggtccacagatggtgcccagcacggggccgcgccgagggcgggggcgggaggccgcgaagagggtcgggcgggaggggaggagacggcggagcagccaatccgcgcgcggcccatcagctgaccgcctttgcttacaccaggtgcacgccggctgcggggagcacaaagcggggcgcaccgcgggcgccggcaacgagccggtgaacgaggcgaggcccgtgcgcccgcggctgcaagcgcccgcctggcggggagaggggccgacggcgtcagcccgggcggcggcatccctaggcgcctggggcgccttcctccggacctggccgctcgctgccccgccctctgcaccccacttctccgaccctccttcccagtcctgcctccccctgccctggcctctgagagccgactgagcccagccccgtgcagcagcggttgcctgtgtcgccgcctagtctccggtcttggtgctctcccgggggtgccccaaggagccagtgcgcgctgcgggctgggaaggaggcgccgctcagctagtcctcctcctcctcctcgtctttctcctcctcctgctgctgctgccgccgccgccgccgtgggtgccgggtccgcgcgcaccccaacacccccaccagctgggcctcggggtaagtccctggccggccgcgccgcggcaggaggtgtgggaggcagcgaggggaagtcgaggcaaacttggtggcgtgggagaccctacggggtctggggaacctcagggtaag

SEQ ID NO: 9682 - DNA, 207 bp, Homo sapiens
agttccccgcaaattccgcccttcccgcctggcacggttcccttgcaccgctgtgctccgctcccaggtttctgcccgccaagaatgcttgccccgggggcgcgctcgctggtcaggaacctgtcggcagcccccgggaacccctgaggatgcggaggtgggcccgagagctgcggcttcgatgccggggtgggagctaggcaggcc

SEQ ID NO: 9683 - DNA, 253 bp, Homo sapiens
acgtccagggacaaactgggagccgtgactgtcaggccgcgcggaggctgccctggccgcctttgcggtcaggtgaaggcgcagaggcagggaggccgggcgagcgcaggcgggcggagagcagaccacgcggaagaggccgagagagaaagcggggcacccggccgggggggtcatttacaagggacgctgggcacgaaggaggctggggcgaagatgagtccaggggttgggttgagagcgctgcgcagcc

SEQ ID NO: 9684 - DNA, 209 bp, Homo sapiens
ggacggcctgtgagggatgcgccgcccactgccccgcgccgcctgaccgtccccgcctcgactcgcggtgcgccacagccgggcccgcggccgtccccgccgcgttgtcgcccggtcgccgcgcccgcggggccgcgcccggcacggccatgtggacccccacggaggaggagaaatacggcgtaggtaggtgaggctcaggcctggcc

SEQ ID NO: 9685 - DNA, 225 bp, Homo sapiens
cgctcggccccgtcccgcaggctgcaggcggccctggagggggcgccctcgccgagcgcgcgccccgcgccgccgccccggactcctccccggcgccgcgcgggcaggttcgaccaggcggccgcgggctccggttcccggccagctccccagggcccgcggcccgccccgccccgcgcgcccgccccgctgcgcaactcgacccaagttggaagccgatcgcag

SEQ ID NO: 9686 - DNA, 1133 bp, Homo sapiens
aaggagagttggaagggttcgtgcagcaggacagcgggcggaagcggggcgggcgagcgcggggccgccggccggcagccggagcagctgccgcggcgcccgaatcccggcggccgccgcgctttcccgcttcgcggagaccgacgcaggcgcccgcccccgaggccgaagggcactgggcggcgagggctgcggtagctggcgactccgggggcgtctgcgcggcgcgcgctagacgaggctgccccggcggccaccccgcgaccccgcgtcgccgggatttgcgcgcggagaacgccggttctggagggagcacgcctccccaaagtgcagaggagggtccggcggcgcgtctccgcggaaaccctctccactgtagttaccccggatgccgacttagtagtttgttttccgagaaaagagaggggatctgggcagaagggccccgtttgccccaaaagaaggtgcaaggatcagaagataacgaaacgtccacttcctgaagggtgggaaaaaaagaaaaagaaaaaggagccacccacgctggagatgtccgttttagatcttcttattttcttccctttcgcttcggtttttcttctcgaggctcatttaatctgctagagaaggaggaggagcagaagatgggggccgaggaggaggggaagagaaagagaagtttgccaagaataaagtttttgccggcaagcgcggggactccgcagtggagggcactgcggagtctcggggagtcacagcgggggcctcgggcccaaatgcctctgcccggagctcgagccgacacacacactcagtccgacccctctttgttcccggctcgagtttctcagcctggctcgccggctcgccgctctgcacgcctccgccggccagctctgtcaaagcaaagagctgcgccccttgagttcgcccggccgaggggaggggacgccccgagcttggccgcgtgcgaggctccgggcgcgtcctggttcctcggcccgagagcgcgcagcccgggtccctcctccgcgccctgccccgcaggtgagcggctgcgcctccccactgcttctcctcctcccgcgcctcgccggcgctgaaaagctacccacttgcgtcgcttctcctcc

SEQ ID NO: 9687 - DNA, 478 bp, Homo sapiens
cggcccgggaggcggaaggtcgcggacctgcccgacagaagagtagatgaggggagaccgaggacgcccgggtccggggagcttacgaggaggccaggatcgcggggtaaggaatccgcgggcagttacctccgccaggggcagggtccggccagtcaggcgcgagaaggctaggcgaggccgactgcgcggggtgaagacgccaggccgacagctgcgggccctaccgccagccctgacgcgagcctgcgtcctggcgacggcggagggcgggcagggggcgcgggcgctgccacggcgcctgctcagaaccggccgggaacgccgcgggcgggtctccccggtcctccgcccctccagccctgctctcaggcctccgcccgggccctctaagctgccagccgcgcccgcctccgggctcctcgcccctcctcccgcgcgctcccctcctcagcggccgccggaccccctcagttca

SEQ ID NO: 9688 - DNA, 201 bp, Homo sapiens
ccgtacgcggagtccataagttgtctgtgtcgtcactttctcggttctggcaccgctagtatctcctaggaacttcctaaacccgttttacggtgcagaacggtaattgcaccgagcctctgtgccaactagtacttccgtaataccgttagccggctcttttcctgtcacaacacattaaaacgtgttaaaacacattaa

SEQ ID NO: 9689 - DNA, 208 bp, Homo sapiens
gatgagcgccgtgtagtactcctggctcgcgttgtctgcccgtgccggccacaggctgcaggtcagcagggcgagcgcggcgagccgggcagggcccgcccgccccgcgcagctcatcgtccctccggcagccgccgctgctcgcggaccgggctccggggccggcgcctagaggcggggcgggcgcggcccgggcggcggcgggagc

SEQ ID NO: 9690 - DNA, 210 bp, Homo sapiens
actccgtatacgtgtacaaggtgctgaaacaggtccaccccgacaccggcatctcctctaaagccatggggatcatgaattcctttgtcaacgacatcttcgagcgcatcgccggcgaggcttcccgcctggcgcattacaacaagcgctcgaccatcacctccagggagatccagacggccgtgcgcctgctgcttcccggggagctgg

SEQ ID NO: 9691 - DNA, 229 bp, Homo sapiens
tggctcacctgagctcaggggtttgagaccaggatgaccaatatggtgaaaccctgtctctactaaaaaatacaaaaattagccgggctatggtggctgacgcttgtaatctcagctactcaggaggccgaggcaggagaatcacttgaacccaggagcggacgttgcagcgaccggagatcgtaccaccgcactccagcccgggcgagagggagaccctgtcttaaaa

SEQ ID NO: 9692 - DNA, 209 bp, Homo sapiens
aggcgggggagagagatgacgctggcggacgtggccagcgcgggggccgggcggtgcgctgcaggccatctgccggcgccctgagacccaggagcctccgcgctcccgcgtgggcctcacagggccggtccacagctccaacatagtagctgaactcccttcgttgcgttcctctttttctggaggggaatgttagaagagagagagag

SEQ ID NO: 9693 - DNA, 255 bp, Homo sapiens
gaaggggcctggagtcttcctcctggggcattgtgctgggaccttgaggactggggacccggagggagggtaggcgtgccctcaactcgctgcgccggaacggcgtctgatgagcggcgggcccggacacgaggggacggggccgatttgtgggcggggccttggcgccgtactaaaaccgcgtggggcggaggccggcagaggtcgcgtagcgggcccagggtagggagtggctttgactcgctgcggaataac

SEQ ID NO: 9694 - DNA, 297 bp, Homo sapiens
aggccccgcccactcgacgtaatttgcccgcccctctccaccctccgaagggtggagcctgaggccccgcctccaagcggcctctccccggagtgcctggcggccagcagggcggggcaggaggctgggagagggacgggtgcgggggtgggggagaggaagggagcggtcacgtgtgaggggcggcccgaggtcacgtgacggagcgccggagcggagggagccggggctgggagttctcctgagggaagaggagtggagtaggggggacgcggcggcggcgttgacaatggtgag

SEQ ID NO: 9695 - DNA, 232 bp, Homo sapiens
gtgagctggctggaaagagggggcggagtgcgcggagtcagagccgccaccgctgccgcagttgccgccactgcggcgtctgggctgagccggagggaggcgggaggacgcgcaggggcggccgccgccgtcgtcaggccaccggggcgaaaatgcggccgctgccggaggctcgctaactttccggggcggaagaggaggaggaggaggaggaaggggcttggagcgacta

SEQ ID NO: 9696 - DNA, 247 bp, Homo sapiens
ccgcgcccgcagccgcgttcctgtctccccgacctccgcacccccacttggcccggcctcctcgccttcctcccggctcctcccctcaggacacctgtgtcgtcccaccccctccaccacacacgcaccccccaccccaattccttcgcctccctgtcctccctcccccgccggtctcccctccccgctgctgccccgagagcccgatgtgggagggaaggcgcgggggaggggaggccgcgaaggg

SEQ ID NO: 9697 - DNA, 292 bp, Homo sapiens
gccccccgagccccctgcggcgactccgattcacccccgcgggtgcggggcgcggacccgcccggcccagctcctgctccccaggcgcttcctcctcccgcgacctgccccggccgcacccgcctccgctccagcacgcgacgctgcccggcgcgacccctgctcccccggcccagccccaccgctgccctcgactcaatcccagttgaacgcccgcagcctcagtcccacccccggcccagccccagcgcccccagtcccacccccggccccagcttcagcctcagcgccc

SEQ ID NO: 9698 - DNA, 201 bp, Homo sapiens
gcagctcggccaacggacgggccagctggttcccttcaggggcagccttgccccctctcccgccccgtctccctcccccccaccacaccgggctgtaacccgagccgccgagccactgcctcccctccggatcctccccggaggctctgcggcccgggcccccgcgccttgctgccccatgcagccctgagccccacagca

SEQ ID NO: 9699 - DNA, 201 bp, Homo sapiens
ggccacgcgtgtttctggcgcgagtgtgcggggccaggccgggagggcgtgcgcggaccgggcgtgtttacgcgcggcagggaggggccacgagggtgcgcgcgtttctggcgcgagtgggaagtgtggggatccggcgggcccggtgtgaggggcgtgtttctggggcgagagtggggagtgagtgtgaggagcaagggt

SEQ ID NO: 9700 - DNA, 201 bp, Homo sapiens
gggcgcggccgggcaggttggggggcaggtaggggccgcttccgcggggcgggaatcccgcgccccctccccccgagcctcaccttttatggtaaagcggcgcggggcggcggggcggagggagccgagggggcggggagggcggacgggcggaggggacgggaggcccagcggctccgggctccgctggctcgggcgtcg

SEQ ID NO: 9701 - DNA, 201 bp, Homo sapiens
acccccttcctccatcctccctcttcttcccccattgtcctccccatccttcccttcctcccgcctcctcccctggctcctcctctccccgtccgggactcggggggaggcgcgctgggtggtccggcagccgggggcgggcggtagcctgcaggcgtaattggcatgcacgccgttgtagctgagaccgcttaataaagc

SEQ ID NO: 9702 - DNA, 201 bp, Homo sapiens
ccgtttccgccaaaggcttttccaaggggtcgtcccagggccccgctccgtgtcccgccccggcgcccaccccggcgcccgcctcctcctcctcctgctgcggctccggcaggggctgctgcggcgactcaggctgctgcggctccagctccaccagttgctgctgcttcccaaggagacgccgccgacagcggagtagtg

SEQ ID NO: 9703 - DNA, 201 bp, Homo sapiens
gtgcggccggggcgctgcccggcagtgcggtgtccacgggactgacaggcaggcaggccgcgggctgggatccggacaccaaagcaaaagcaccgctgggcgccggaggagccgcggggcttccatccttcctttgactgatttttaaattttaatttgtattttccccgccgccccgccccttttcctccgaccccgccc

SEQ ID NO: 9704 - DNA, 201 bp, Homo sapiens
catcgcgccgtgcgtccgcgcccggccgccaggtgccccagtagcccgaccgccgagatgcccagcccgccggggctccgggcgctatggctttgcgccgcgctgtgcgcttcccggagggccggcggcgccccccagcccggcccggggcccaccgcctgcccggccccctgccactgccaggaggacggcatcatgctg

SEQ ID NO: 9705 - DNA, 241 bp, Homo sapiens
ctgcgcgccctggcggcaggaggcggggccgggggcggggcgtgagctggccggggcggggcctatggaggggcgggaccgcggcgccctataagtactgcggagcgaggcgcgcgcccggccagagagcgagcgcgcaacggcggcgacggcggcgaccccaccgcgcatcctgccaggcctccggcgcccagcgccccacgcgcccccgcgcccccgcgcccccgcgcccctttcttcg

SEQ ID NO: 9706 - DNA, 201 bp, Homo sapiens
ggcggcaggcggcgcggcgggctgggcgcggcggtggttaggtcggtgcggttgtagtccatgcacagcgtgtcagggttgccttgctcgggcagccggtcgcagcgcatgcggtcgggccaggcgaagccgtactggcgcatgagcggcgcgcagccggccttggcgcgctcgcacaccgagcggcagggcggcagcggc

SEQ ID NO: 9707 - DNA, 201 bp, Homo sapiens
aagtggggtgaaaatgacctcagtgaatagcccagctccctgggacagtggcctggtatttttgacgtgggagtggcgtctgctctgactcaacctggaccggcccagggacaacacctccttcggagtagccgctttgtttcgtttcgagcagcccagctgcgttctgcatgaccgaattggacacctctcacttcctct

SEQ ID NO: 9708 - DNA, 201 bp, Homo sapiens
cccgcgcctgctccgcaccacggagccgggcctccagagcagcaaggtcaccaggtggcggtgctggcgcagcaggcggagcgccgggtgcgcggggtcgcgcctctggccctcgaaggtgatgaagatgggtctgcgggtgagctccagcagccggcacaggccctccctgcggggcgggaccgtcaggggggtgggtgc

SEQ ID NO: 9709 - DNA, 201 bp, Homo sapiens
acggctgggccccaggagacactcggaggggtccgcgggctcggcccggtccctccgctggggggttaccagccggccggcagcgagatacccagaggcccgtttttccaccgcgttgccatagcaacggcctggccggctgcgccccgggccgcccgccccatcccgcgggcccgccctgagccagtgactccagggacc

SEQ ID NO: 9710 - DNA, 201 bp, Homo sapiens
tccagatggtttcaatcactggaggaaaaaagcggctcttctggtatgcgtgaaaagccggagctgggagagtctgggaaaagctgcctgcaccgcccgccggccttcaaacaaaccgatgagctctttcccttctcccagttctcgggcctcgggggagccctacaaaacccaaatgaaattcaaagaagctacttttgg

SEQ ID NO: 9711 - DNA, 201 bp, Homo sapiens
ccacaaagcatcagtggtgtctccccgaggaatccaagaccccccggccggttgccaagccgccggaatttcagcaggagaggaaggctcaccctcccaccgcatggcgatgcccgggagactggagaagctcaggcaggcttggaagccaatccccggcatacagcagctctcgggaatgcagagccctagagcaagacc

SEQ ID NO: 9712 - DNA, 201 bp, Homo sapiens
tagtagagacggggtttcaacatgttgcccagggtggtttcgaactcctgagctcaggcaatccgcccacctcatcctcccaaagtactgggattacaggcgtgagtcaccgcgcccggtctgacagcctttccagaatgaagtttgtctcggaaaaaagagccctggccagtgtctcctctggggatcagcggaaagcac

SEQ ID NO: 9713 - DNA, 201 bp, Homo sapiens
aggggagctgaggggcggagtcaccggggcgcgcccccgcggctgcgctcctccccgccggggagcgcgggcacgtaactcggagggtgctgggccggcccggagcacgcgagcagcgggaggagggaccggggaatgactgacggaggcgggccgtagaggccgctgtgccccgccggcccgcacccggccggagtgtgc

SEQ ID NO: 9714 - DNA, 201 bp, Homo sapiens
ggtccccgcctcccctgcaggcggactcgcccgctcccaggccggacccgcgcccgggacagggacccggccgagtcgagccgtcgcgccagcgctgcgccgccggtcggtgcgcctagcggatcggagctgcgcgcggaaccgtgctgccccgccccgctccacccgtgagggtgagtacgcggcggcggtgcgcggggg

SEQ ID NO: 9715 - DNA, 201 bp, Homo sapiens
cggggagggaggcttccggaaccccgagagagcacccgtgcctcgcgggccccgtgccccgtccccgggctccccttcctctaacgcaggggacccagcccggggcagtgccgggcactggcgctggcgccccgctcagccctgcgatccttctccgccccgcccctccccgctccgccccgcccctccccgctccgcccc

SEQ ID NO: 9716 - DNA, 239 bp, Homo sapiens
agagggcgagcgagagagagacacacacacacacgcacacgcacacgcaggttacatgaatgggaggcggtagccaatcctacgaggccggcgagccgcgcggcgcactggcgctgggagcagggccgcactccggcgcgggggggcgccacgcaggtgatgggcgcctctccgggggccacgcgcggccgctccctcaccccagtctcggttcctctgtctccttcccccttcctctc

SEQ ID NO: 9717 - DNA, 201 bp, Homo sapiens
ttttccgtttccacccatcccttcccatttccttctccctttccccgccagcttcgcatccatctcccccaccccgtaaccccctcctgcctccatccaccggggctatggccgcagaagaggtattgcagacggtggaccattataagactgagatagagaggctaaccaaggagctcacggagaccacccacgagaaga

SEQ ID NO: 9718 - DNA, 201 bp, Homo sapiens
ctgccggggagaacatgcaccaggtggctgatggctctgtggatgtggtggtctgcaccctggtgctgtgctctgtgaagaaccaggagcggattctccgcgaggtgtgcagagtgctgagaccggtgagtgaaagggtgtgaggaggactagttagtagcagctattatcatagagggcaggcctgtcaatttcaggtgg

SEQ ID NO: 9719 - DNA, 201 bp, Homo sapiens
gaggcggaactcaacggaagtgaagaaaagactaacgggaaagaaggacgagtacgcggtcccgggacagacctccaaagcttcttcctgcgccccctggcggccggagggggagcagcgcggacacgtcccccggccaaccgttggttaccaggctggagtggggtttttttctgttgttttccatgagactactgtttt

SEQ ID NO: 9720 - DNA, 201 bp, Homo sapiens
gcgatcacgggccccggcgaagatgcgtcgcctgagcgcccgcgcggcccccgtccggggcgggcgtgacccctgctgaacggagacctcccctcccccccgacttcggacggcgcaggccggcgccaggatagccctcaccgacagcgccccttcccacccggagagaggcatcgacccccaaggagggcttcgtcaggc

SEQ ID NO: 9721 - DNA, 201 bp, Homo sapiens
tcgcccccgccgctcggggcaggcgcgccgatggcgtttctgaggtgacgccgcccacaccgggcttctccgggggcggaggaaacacctatgaaccctccggcagccttccttgccgggcgccaggtaagcagcggttccgggcgcggcggggcgccgcgggaacggtgcacattggtcgaaatctattgcttctcaaga

SEQ ID NO: 9722 - DNA, 201 bp, Homo sapiens
cccgccacttggggcgcctggggggctctggggcgggggaggcgggggctttgtctaactccgccactgccaccaccggccaggccgcggcttggcaacccgtgaacaggaggcagggctgcagggcgtgagggatgatgacaaggaagccggaggagcagcggcggcagcggagagtccatcttggatgcaaatggcagg

SEQ ID NO: 9723 - DNA, 201 bp, Homo sapiens
accccgcgccctgcgccttaaccaggactgctccgcgcgcccctgagcctcgggctccggcccggacctgcagcctcccaggtggctgggaaggtaggtgcgtcgctgtccccggcgcgcggcgtcccgcgaggtcttcagccctcgccctggtggatccccgctgggtgggagccgggagtggaggcggccgccctaggg

SEQ ID NO: 9724 - DNA, 201 bp, Homo sapiens
cgactcggccgtgagcgtgccccgctgcagctcgctgcccgccaggtccgggtggcagcgcaggatgccctcctggcctgcggagaagcacagacaccggcgggagcgcgtcaaccgcgcccgtcccgcaccgcgcactcgagggggcgcgtaggccgcgcccggcccccctgccccgccccgccccgcccggccccaaag

SEQ ID NO: 9725 - DNA, 201 bp, Homo sapiens
cggcctgggaaggcttcggctcctcggctgcggctccagcccggacggcgccgcgcaactttgccatccttctggcccagccccggctacaggaggaccccgcgggcaacgcgcggagttcctggcacttcccggcggtgtctcttgttgtctgcccggggaccgacttcgcatgctctcaggctgacctgtccaagcccg

SEQ ID NO: 9726 - DNA, 201 bp, Homo sapiens
gcaacctcggcggagtcggcgcctctgggcacctctggcttccgcgccccggccgcacggtgaccacccgggaggggatcccgggcgccccgcaacctcccggcccccgtgggccttcgggtcgccccgcttcccgccgccgcgtacccttcgcgcctcccggccctcggtgccggcccccgccccgcgtagctccgagtc

SEQ ID NO: 9727 - DNA, 201 bp, Homo sapiens
aggaagcccgaggtcggggcgttaccccaagggccctcccgcttcccctccgagggcagagaggcgtccgcgcccggacgcactgcgggaacacctggagcgccggcggagctcggctgtccccgcgggagggagcccgacgcgcatccttgggacccggacccggcgcccgcgcctcgggacggatttctgcctcggctg

SEQ ID NO: 9728 - DNA, 201 bp, Homo sapiens
ccgcctgcaggctgtcccgggccgagtcggagcgacgctgccgcgcacctgggcagcccccgggggccgcgctgtgccacggccggggccgctgcgactgcggcgtctgcatctgccacgtgactgagccgggcatgttcttcgggcccctgtgtgagtgccatgagtgggtgtgcgagacctacgacgggagcacctgtg

SEQ ID NO: 9729 - DNA, 201 bp, Homo sapiens
cacgcctggggcggccgggggcggggcctggctggaattgacgcgtggagctccggtggagggggcggggcctggctgggccgctgcctacagcggcttccggggcttggaggtcacggggctcggaggtcacggggctcggaggtcacggggctggctgtgtggggggctcaggggcgtagagtggccaagcagcggtct

SEQ ID NO: 9730 - DNA, 201 bp, Homo sapiens
ggccctgcagccctgcagcgttcggggcggtgcaggagccccggggtgccgcggcgcccgcccggctgcatcgctggtcccccggctcgggctccaggcccggcgcctcccacccccaggccgcgcgcgtcccgccctcccgacgacccccagccccgggcctccgccacttacgagtccccgtcctcggtgagctgctgc

SEQ ID NO: 9731 - DNA, 201 bp, Homo sapiens
gcgctcccgggggctgcgccgtgccgcctgttgtgcgcgcgcagaggccggacagcccggctgcgggaagggacccgagcgcagggtctgccccgcgtcccggaaagtgcctagtctgcggagccggaggttgagctggggcagatcggcgccagacgggggcctgggtgagatacgagttgggggtgcggcctgcagaat

SEQ ID NO: 9732 - DNA, 201 bp, Homo sapiens
ctctccctatcacccccccgcccccccacctctctcctttttctgctctgcaggactgagcagctaggcgcgagcgaaaacaaacagctggggctgcgagcgcccccgccccggccccgagagcacgccggcccagtcccccacctggggcgcccgtctgcccaccatgaggaagatccgcgccaatgccatcgccatcct

SEQ ID NO: 9733 - DNA, 201 bp, Homo sapiens
gctcgtgccgctgctgctggctccagcgcccgggtcctcggtgagtgcggtcctgccccggcccccggaggaacctgcaggggagtcgggggcggggacgcgcgggcccgcaggcaacgtccccaggaaaggggcgatgtcagggaagctgggctgggaggaggcgagcccgcaccgctgagctccctcagaaagggctgg

SEQ ID NO: 9734 - DNA, 201 bp, Homo sapiens
cgctgggcgtcgcccgccggtctaggcgcgcgaacctggcgttcccagtgaatcacccgcggcccgggcgcccgggttcgggaccggccccctcccctcccgctgagccgcggccgagctggctccctgcaccctacccagcgtcgccgggacgcgatcacaccgagatggcaccgagcctccttcaaaggcttcggcttg

SEQ ID NO: 9735 - DNA, 201 bp, Homo sapiens
gcctcagtctctgggccggaagccccctctcctcccccgccgcagccccctcctagtccctctccctccgccgatgcgggaaaccttctccgccccgtcccgccctcttcctccagttgcatctccgcccggctcctccgtccagtctccaacccaggccccgcccctccccacccatttcccgccctgggccgggccccc

SEQ ID NO: 9736 - DNA, 201 bp, Homo sapiens
gatggcgacgcggatctgcaccgccgtcttgggcccgggccgagcctccccgccggactgggccatggctcgcgggactgcggcgccgccggggtcctcacgccgcaaggcccagccagccggtcggcagcgactgcgacgagggggcgggggcggtgcgagcgcgcctgccgctcggcccaggggagggacaggggtcgc

SEQ ID NO: 9737 - DNA, 201 bp, Homo sapiens
gtctgtctcgccgcccgggctttgtggctggccacccgcgagctcgcctcgcctcctctgccccggcccgtccggcccgtcccggggctcccgccgcaaccgagcggagcccagcgacccgccgggcttacatcagcggccgcctcccccgaagcgccctccggcagcgctcgggctcccgcgccccggaatattcatgaa

SEQ ID NO: 9738 - DNA, 241 bp, Homo sapiens
cgcgctggcccggcccccagctcctccggccgccgccccccgcccgccgcgccgcggcgccaggagggcggggccggggcgcgcgccgctcctcagcaagcgggcgggcggcgttcggtctgagggagcggggcggtctccgccggcgtcgcgcgcgctgtgtgtgagcggggtcgcgcgcgcgcgcggcaggcgagtgagggaacgaggagcggccgggtgtgagtgtgtgggagtgaga

SEQ ID NO: 9739 - DNA, 201 bp, Homo sapiens
ggtgccaagcgtggggcgcgggcccgcggcgggagctgtccgcgaaacctagtgctgaagtaggcgcggacgtgcccggtgcctggcgcgtggtagcaggcgcccggtgccccggccggcgaagaccatggcgttcatggtgaagaccatggtgggcggccagctgaagaacctcactgggagcctgggaggcggcgagga

SEQ ID NO: 9740 - DNA, 201 bp, Homo sapiens
gcgcgggacggagctccatgaaagttggaagaagtgattacaaatcgggacccgactctcgcagccttggcgctcgcccctccacgcaggcccgggatgccggcctcagcccccagatgtcgggaagacggcgccggccagtccaaggaagagcttccaggaggctggggagcaagggtgccgggctcctcatgccgggtc

SEQ ID NO: 9741 - DNA, 201 bp, Homo sapiens
ccctgctggccagagccgggcacgggccgggcgggcggcggggatcgtgaccgcggctgcgtgcgtccgcgtccgggcgcttctgtgcggggtcctggcacgccggcgggggcgacccgggtgccggcccgtgcgggcgacacgcgcgtctctgcggggctgcgcggggtccggagcggctgggggctctctgccgggcgc

SEQ ID NO: 9742 - DNA, 201 bp, Homo sapiens
cagaccccgccggccggcgcgccacccgcgccagcaccatggacagcggccgccccagccgcgcgctcagggccaggcccgggctggcttccaccgcggacggctgcggggtcggggcagccccgcaatcccaaatcccggcagcccccgctcagcagggaggggccccgggggcgaagagtgggggagaagccgggaagg

SEQ ID NO: 9743 - DNA, 201 bp, Homo sapiens
gtgtgagtctcgggggtccgggccggcggccctgccagccgggtcgtgcggttgcgggggtggggcggcggcgccgctgccatattagccccgggagcggcgagagggaggctggggtgggggcgcgaggggggcggcgcgaggggggccgattctgcgggcaggtgacatcacacctcgaaggccccagtgcgcgggcgg

SEQ ID NO: 9744 - DNA, 201 bp, Homo sapiens
gccgcgccatggtgagccgggcggggcaggccgcgcgctcgggccgggcgggggcgccggggcccgggggcgggaagggggaggccaggacgaggaggggcgcgcgcggcggcggggccgggccggggtctgcgggcgggggaggggcggcccggcgggcgcggctcgggggagggtccgttccaggggccgcgcccgcgg

SEQ ID NO: 9745 - DNA, 201 bp, Homo sapiens
caaccgggcacccccgcgcgcacacgcccgtgcccacgtgtgcacgctcacacccttgcacacacccaggcgcgcgctggcacacttacccggagaacttcgcacacacacgcactcgcaaacacgcgggctccctgcgccaccaggaagcagccgccagaatcgccgggtgttccccaactactcctgggagacctggcc

SEQ ID NO: 9746 - DNA, 201 bp, Homo sapiens
acacgacatggccaagcgccgccgcccgaaccggccgccgccgacaccccgctccggcccggggctgaggaggaagccgagaaggaggaggaggaggcggcggcggagggcgggggaagaggacggccgttccgggttccgcctgagcccgcagggcaggacgagggagcggcgcggtgagagaggcggatgaaggcgagg

SEQ ID NO: 9747 - DNA, 201 bp, Homo sapiens
cgcgcacagcggcggcgagtgggtcgtgcacgcggatgcggggtgggagtgggggcgcacgcgcgggcgtgggcgagcgggccccggcagtgcacacacacggcaggggcgggcgacagatgcagtgcgtgcgccggagcccaagcgcacaaacggaaagagcgggcgcggtgcgcaggggcgggcgcccagcgggcttgg

SEQ ID NO: 9748 - DNA, 201 bp, Homo sapiens
cctcaggggagctaagcagctcgcctgaagccccccatctggaaatgacgtgtttaactcggcgcccctgcagctccggccgcccttttttgtttaactccgcgcccctccagctccggccgcccttttcgtcgctctcccctcgcggtcgctcacccctgagatccctggttccactgagacgctcagcttcattcggca

SEQ ID NO: 9749 - DNA, 219 bp, Homo sapiens
cgcctgcctcgccgcccgcaccggcccagcccccggcgtccgcccgctctcctcgcccggagcgctgtgagccaggagcagccgcaggctcctcggacgcgcccgccgcgcgcaccacgtggcccggaggcggccgccagtctgcgcccgcgaccgggggcggacgctgcaccaccggctcggagctgggcaggggaggcctcccgccccctccctagg

SEQ ID NO: 9750 - DNA, 315 bp, Homo sapiens
gacgcccctcagagacggcgctggctcccctcggcggggctggcggcggctgggggatgccagccgggcgggccgcgggtcgcctccctttataggctccgagagcggggcggggttgggggcgggcggggagctgcctcgggtggcctcgcccccagcacggaggaccctccccgcgaggcgccgccgccctggagccccgcccacggcgctcgacggccggggaaactgcgggagctgggcgctcagtgggggaaaacgagccgcggacgcgaaggggcgggatgaggcccccggggcggggctcggggctcg

SEQ ID NO: 9751 - DNA, 201 bp, Homo sapiens
cgcgccgccccagcgctctgcagcggaggcgccgtcctcatcccgaccgcaggcccgcccgggccgcccgcccgccgggcaccgagccgctctgccgcgcgctgcgcctcggggcggggtgggaggagagggagcagccgccaccctgcccaggtcgccgcgggccagccctgcagccagctccagccctgggccgggtgc

SEQ ID NO: 9752 - DNA, 201 bp, Homo sapiens
gctcggagcggccgtgaggggcggacggggggcttcggggcgggcctgcaggtcttggggacctgaggctgccgggaggggctgccagggggcgctggccgggcgccgggttctgcggagctggggcgccgacctctgacccgcgagaggggcgccttcgccgtgctggtcgtagttgttattctcagcgtccctattatt

SEQ ID NO: 9753 - DNA, 201 bp, Homo sapiens
cggcggtgactgcggccccgcgcgcggctcggctcaggcaggacccgaagcgcggctccgggcggcggcggcggcggcggcggcgtggtcccgtccgggcgggtcctgcgggacaagacggggagccggtcacggggtggggcgactggcgctccgggagcaggaggagaaccgcgggcaggcgggcggggagggtgcgcg

SEQ ID NO: 9754 - DNA, 201 bp, Homo sapiens
aagcctcccgcccagccctgccggctcggcctgggcgctgtggaccggtaacagcagttccaccaggatgcaggccggactaagctcctggggaaaacccgttgcaataattgtttttcacacacaacttccaacccttcccccatttccgcctccaattcggagacttgcaaagcccaagaaagggaaaagcaactctat

SEQ ID NO: 9755 - DNA, 201 bp, Homo sapiens
cagcatcgtcccggctccgcgccaggcggcgggggaggggaggagggatctctttaggggtgggcttggagggggtgggggcggctccttcccccgccccgccgcgggctcactgtccgggaggggcggggagacagtggggggcagtcccgggcgggagtggaggcggagatgccgccgccgcagccgccgcggtggctg

SEQ ID NO: 9756 - DNA, 201 bp, Homo sapiens
tctcatgacgccgaattgcctgggggatcgccagcggtgcgccggtcggagccagctggtggcggggcgggcggcccggagtgtttgctcaaccctgagcgcccgcgagggggaggggaggcagctggtcacgggctagggggtagcaaggtggaggagcgggggctgggaaaggggagggtatctcccgggctgcttgtt

SEQ ID NO: 9757 - DNA, 201 bp, Homo sapiens
tccccccgcttcagccagacggggcgctcgcgcccccttccccgccccgcgttggcctccaacaggaagtcgtcccggcccctagcacgtgactcccaccgtatctgcataccggagggcgaactggccaatcggcactctgcacctgagctcctcccccgcgcgcccctcccggcccattggctcctcggccaggccacg

SEQ ID NO: 9758 - DNA, 201 bp, Homo sapiens
gccgccaccgccaccgcagctgcagcgtctcttcatatttccagcgcgccgccggccgggcagcctggccgcggcacggaggaggggccctggagggggcggtcgggggaggcgacgccgagccaccgcccccgggcagccgccgccgggggggagcgcggagacttgaaagggcgcgtcgggcaacgcctcccctcctcc

SEQ ID NO: 9759 - DNA, 201 bp, Homo sapiens
tcactgcctcctgggcggtgtggatcagctgcagagtgtgatctgcggtcagggagtgccttcccggagttttcgctttcagacccctggtgttaaagacgttctgtgagcgggtggggccgggcgccccagtcacggcggccgccgcctcctcttcccgcaggacgggacagcgcccctgtggatcgcgtcccagatggg

SEQ ID NO: 9760 - DNA, 201 bp, Homo sapiens
cgtggaggcgacaggcgccggcgacaactttccagttcgggcgccgcgcgccgctccgcgggacgcgcactggggaccccggccgtccttcccgccccccgcgcggacacaaagcccggcagccgcggcgctcagagggccgagggccatcggacagtccgggcagactctggacccgctccgcgggagctgctcttttgt

SEQ ID NO: 9761 - DNA, 243 bp, Homo sapiens
aaggctggagggtgctagaaagatgatcggccgggcacggagcggggagcccggagccgcgcgcggggaggggaggtggaggagggggcgccgggggagcggggggcgcgtgaggggtgcgagcggggcccggggggcgcgcggtgggtgtggggggcgccgggctcacctacctctcgtcagcgccgccattgccggtcacatgactgaggctgttgctgggatgacggtccgggccttagc

SEQ ID NO: 9762 - DNA, 201 bp, Homo sapiens
ctctgcacctgcaacccctcggggcagtgacacagctggcctcggtgtcctggcggagggcagaagtgatggccggttgcggtcttgtagggtgagaatcgggttagacaagtgagtgctttagagccggggagctgcacacggaggggagggagtggcgggcgctgcgtcgggcttctccaggaagaggtgagcgggctg

SEQ ID NO: 9763 - DNA, 201 bp, Homo sapiens
cgaatgtggccaagggggccgtccagatgggtgtagacacggccaagaccgtgctgaccggtaccaaggacactgtctgcagtggggtcaccggtgctgcgaacgtggccaagggtgctgtgcaaactgggctgaaaacgacccaaaatatcgcaacaggtacaaagaacacccttggcagtggggtgaccggtgctgcga

SEQ ID NO: 9764 - DNA, 201 bp, Homo sapiens
gccgcgcccctgggaacggtcagggaagcaagcagaagccgggaagccgcgaaagaggcgagaaagtgcgaccccctccccagatccccggtcccccgtcgaaatccctgtcggccggtcaaaccctagacaatggaagctccacgttttcatcctcattctcccccacaagtccggtcgcgggttcccctcggcccggga

SEQ ID NO: 9765 - DNA, 201 bp, Homo sapiens
tgtgacgactcctcaagggggctctgtgagcaccccctttttacagccaggaaactgaggcacagaagggagggactgtttggcaggagccaacagaggcgcatagagcagcgtgatgagccccgggctctgggggcgggcccgcgagcaggcagcctccaccccatggtggaccttcaggctcctccttctgccccggct

SEQ ID NO: 9766 - DNA, 201 bp, Homo sapiens
tacggagcccctccacgcgtccactgcggttccgccgtgccaaggggagcttggctgttcacgggcctcacctgctagcgagaagatagcttggccgggcggctgatctcaccttgtaattctgacactgtgtctcccgggcttgtcggcttcatgacttgtgcccaaagtttgatttctcgcagaccaggtaaaagccaa

SEQ ID NO: 9767 - DNA, 201 bp, Homo sapiens
ccctgtgtcctcacggcgcgcagaggcggcgccgcgaaccttgtgtgcattttacacgacggcggggactgaggtccctcgcagcccagagccggagcccggggtcggccgagcccgcaggaccggcttcctcgccgactctcacggcctcacccagccccctgggcccatggcggcgccggcgttggtgagtggagggtt

SEQ ID NO: 9768 - DNA, 201 bp, Homo sapiens
ccaccgcagccgacagctccacaaacaccaccgctcgctcagcctccgcctccccgggccggctgccacctcgcgccctcggcctggccctggccccgccggctgcactgcacggcccgtccctccgtccatctgcccaccaattctgcagacgccctgtgtccatcctcccctccttcctggccactctccccttctgtc

SEQ ID NO: 9769 - DNA, 201 bp, Homo sapiens
ggcgcccctcccgcccgcttgcgggcccgctgcgctagccgccgcaacaaagtttgacagggcgtggccccgcgggaagcgggcccggcgctgcccggccggggcgcaggcggctcggctcgggcccctccggcagcgccgagcctagggctccccaactcgccaccgccgccgcctgctccgccggggcgtcccagcccc

SEQ ID NO: 9770 - DNA, 201 bp, Homo sapiens
aaaataaaggatgggtgaacaaattgagatccggcttgctgggcgtcatgtggagaccgtgtgcaggaagagccaagacaccagagccgggggggctccggtgatccctgccgctctctgcatcctgggctcatggttggggcctgtccccctccagctggtagtgccatcctctctgtgccctaccaagctcaccagtaa

SEQ ID NO: 9771 - DNA, 201 bp, Homo sapiens
tgccgtggtctcgggtcactgcagcctccctgccccgggctcccgtggttctcctgcctcggcctgccaagtgcctgggattgcgggcgggcgccgccacgcctgactggtttttgtatttttggaggagacggggtttcgccctgttgaccgggctggtctctggctcctgacctcgagtggtctgcccgccttggcctc

SEQ ID NO: 9772 - DNA, 233 bp, Homo sapiens
agcactcgacctgtgaaaaccacgcctatgcagcaacacaattggtccgaaagcgtcaaagagccaatcaagaggcctccggctccccgcagcccacagcgcagcccgaccttctagagccgccgagcagacgcccggtgaattctagaggcggcggagggtggcgaggagctctcgctttctctcgctccctccctctccgactccgtctctctctctctctctctctctcc

SEQ ID NO: 9773 - DNA, 201 bp, Homo sapiens
ccggagctgcagtagaagcgcttccgacctcgtccaggccctcagcctatcccctcctgaaggtcggcagggggcgtcattaccgttggcttctccgcgcggctccggcctccgcttcgggaaccgagtgcctgcagcccgcgatcctggggaggcacagggttagggtaccgcctcggcggagaaagtggctgtgccgcg

SEQ ID NO: 9774 - DNA, 201 bp, Homo sapiens
gggggacgggccagccagggcaggagcccaaggacatgaggcaaagatcccaggctgggactccccgcagctcggaggcggggggtggggagggagggccgggggggtgctgggcggagacgctgggcactggggccagcgctgggcagccatgcacgggggcggggcaacaggcaggccagctgctgctgcttctcagga

SEQ ID NO: 9775 - DNA, 201 bp, Homo sapiens
aagctcgtgcagcgcgcgccgctccaccaacgcgtcccggcgcaggcggcagaggaaagcggcctccacgcgcggcgcccgcggccccggggccaggggcgcggccagcagtgccagcacgtcccccaccacgtcgtcgtcgtcctccccggcggtggccgagaccggggcgaggctcgcagcgaccggcccggcggggcc

SEQ ID NO: 9776 - DNA, 201 bp, Homo sapiens
caggaatgagcttgctgagggcccagccccggggccgggagtctgctgcaaaggatatgaaaaattctcaccattacttctgcatgtgaaaagaatatgcgtgttggaaataacttcctaacttacatatttttaaacatttgtttagacttataggagaaatatttttactgacttttgcataaagtgtactggaggaaa

SEQ ID NO: 9777 - DNA, 201 bp, Homo sapiens
ggggcggggaggagggcggagggggtgtaaactaagtggtgggaaagagacaaaggaagagtgaagagcgagacggtgcggatggggaagggggaggggcgcggaggggcagccggtgggcagcgcgccgaggagctcgagcttgaacttgatcaagcactgggggccctgccgtgggggtggggcgggggtacggccgag

SEQ ID NO: 9778 - DNA, 201 bp, Homo sapiens
agcccccaagggaggaggggagagctgcagagaggaggaggggtcggggaggccggctttataaaggcggctggaacaaccctgcccgccagaccccgtcgcccggatcccctgagctgcccgccatcccacgtgaccgcgccgccccccagctccaccgctgagtgagttggggcgcgtccctatcccgttcccagtccc

SEQ ID NO: 9779 - DNA, 201 bp, Homo sapiens
gaggagcagcagcgctcgccgggggatgcagcagcggcagcggcggcggcggcggcggcagcggcagcggcggcgcggagtcccctgcgcccagcggcccggccgggctgcggcagaggcggcggcggcgccccgctccgggtgaggttgccggggccgtgcgcgctggtgagtggggcgtggggggcaggtgggtggctg

SEQ ID NO: 9780 - DNA, 201 bp, Homo sapiens
gtccggagaagtggatcccgtcccaccgagaggccagggctcctatgccctcgtccccgacctcggtccagtggcccctgcctcccggactgtcctcggcggggcggggctgcaccccggagccccagctcacctcgcagtcctcttcgtacttgacattatcggttattttccacaacatggcgtccggcgtcccccaaa

SEQ ID NO: 9781 - DNA, 201 bp, Homo sapiens
ggaacctggaggaacatggcgctgtcgcctcctggcggaagcgcccgggcctgcgggcaggggcagccctccagggcccggaggcgcagtgaactcccgcgagtccgtagcccgagctccgcgctcccggcgcccctgagctcgcctagcgctgcctgcgtcttcttcctcttcccgctcgccgcctccttcttccctccc

SEQ ID NO: 9782 - DNA, 201 bp, Homo sapiens
gtcagggaccgtcctttactgtcctttggttgccgaggagcggtcaccgggcccggccccagtccctctgccctgatctttttttccaagtccccatgccgagttggagagcggtccctgagcacgcatgtggtccgaaaggtggcagctggccgggcttgggtccctcatgtgatccagtcatgcgagggaccggctgaa

SEQ ID NO: 9783 - DNA, 410 bp, Homo sapiens
agacatgttgggccagcagtgctggctccatcctagatttcttccagtcctccccagttagccgccaaggggcttttccaaccggaaacctccaatccgcgaccccggcgggtgcaccgccgagccccccgggaagtgtagttccagcgcgagcgggacgctgggaaatgtagttctgcgcgttcacgtccccgatcgggccgtgtccgccgcggccctgcgaggtccgaggggtaagggagcgtgcagcgggggcgggaccacgaggcggcggggctgggggcggcctctgtgtctgcgccggggatcgcggtgaccccgctgcggaccggctcgcggtgaccccagcgcgaacgagctggctgccggctggggcgagaaaggcctgcggaccggcctgggcgcatgcg

SEQ ID NO: 9784 - DNA, 201 bp, Homo sapiens
gagccagagatgcattcctggccggcctgagcatctgcgggaaccctgtgagcccctgaggttcacttcttgctccccacttctctctcctgcaaactccgagcccggggtaaagctgcttcccctccccacaccccttttcaacccgacaactaacgccctctagcttccgggaatgggacggatctttcccaaggactt

SEQ ID NO: 9785 - DNA, 201 bp, Homo sapiens
gggatcccccgctccccggcctagggggcacccactccgcacgtggagcccgggcagcgtccccagacgcacccagcgggataccggagaggacgccgacgcagtgcaacgccccggccgaagcgccgaacaacatgcgcgcgtcgcggaggaggtgcggggcgtgctcgctcaggcagcgggtcgccccgacgtggtaga

SEQ ID NO: 9786 - DNA, 201 bp, Homo sapiens
atgtgccctgccgagttgatttgctcagctcactctttattttgaaacgacgtcaagcatgaagaagagttgcacaaataatgccaataactccggtgccgccttcatgggggttatggtggttccagtgcactccacatgtcccccctctctctgtccctctctctcgtgtacacacacactgtttcctgatccaagagt

SEQ ID NO: 9787 - DNA, 201 bp, Homo sapiens
gtgactctgcgaggttacactccgggtgcgtcgctgcgggctcgtgggctcgtgggctgcagccccccgctcctgtcgggtggacgagccccgggcccgcgtggagctgctcggtcaaggccggcccgggaggggcgcggcgcagggcgggcaggggcggggtcctaggtcaacgtccagccccagacccagccccgccgc

SEQ ID NO: 9788 - DNA, 201 bp, Homo sapiens
ggagggagaaagggagagagttccagccgccccggctgtggcaggaggagccccaagagcgctccccgagcccgccccgcacctccaggctcagcccggcgcaggctccctctcccgccccctccacccccgccagctgctgaaacccccccaccgtccctccgcgggcaacagtgcccgccaggcgccgccgcgcggtgc

SEQ ID NO: 9789 - DNA, 201 bp, Homo sapiens
gtcctcaatgcgggcggcccccgcaccccacgcggcccggggtccctgcccatcccccgcgggcgggccccggacccctggggctccccagcccctctccgctccccccccgcgccggccccgtgccctgcggcccggcggccccggcggcgcgagtcgggggaggcggcgaggggtgtccccgaggcccggcggcgcggc

SEQ ID NO: 9790 - DNA, 201 bp, Homo sapiens
cccgcattccctttgatttttatggacattcagctaacagtaggaacaaaaattaagatctttcctttcccattcgcctggacacttatctttccggctcgcgccgccgtgtcctctacccggctacacagcgactccaaaagtttagctttcaccccgcggagatttcgacagctctgggaggctctttttaaaagggaa

SEQ ID NO: 9791 - DNA, 201 bp, Homo sapiens
agccgttcggctgacgtgacaagggaggtgcaggccaacacggcgactccgcgccctctggcggcagtgccggagcagcggcgctgtctttgacctatccggcattcggcttccgggaccgcttggcggctgtgaatgcagagctggggcgacgtggggctcgcttcctgggactgggtgtgagcttgcgcagtgagccat

SEQ ID NO: 9792 - DNA, 201 bp, Homo sapiens
aactgaacgtctgaaacgaaggtggcgcggcctggacaaacctgacccttcgacatcccccgcccctgcgcccgccctcgctaagcggggaggagcgaccgctacaatggatcctcccgcaggctttgtgcgcgctgggaatccagctgtcgccgccccgcagagccccctgtccccggagggcgctcatttccgggccgc

SEQ ID NO: 9793 - DNA, 201 bp, Homo sapiens
gccccgggcgcctgctgctccgtgcctccaccgacgacctcactcagctgcgttacgcgccgctccggctgccggccgcgcgccttgcccgccggctcccgcccgcaatcggcggctcagggcggacccgggtctctgcgttctcgcgagaagcgcggcgctgcggggccgtgggcgcctgagcccgcgcggccctcgagg

SEQ ID NO: 9794 - DNA, 294 bp, Homo sapiens
ctcgccgcccatgcttccactgcaaggccgcagcccccgccgccgatcccgatcccccgccccgcccagccgcggccccgcccggcgccccctccccggcggaagctcaagcccaattaattgagtccgaggcgggagggaagggccctgcgcgccgtggcccgccccgcccctcttccgcgccccttttcccgccctgggtggcatctcctccgccggcatccacaacaagccgctgattaatgaggccggggccgccccaccccgcccggccgggccggggccttcgcggga

SEQ ID NO: 9795 - DNA, 201 bp, Homo sapiens
caagtccatagaagagcaaattctcacccttcgaggctgctgtggaagctaccggggctgggacagcagagaggaacccagacgggaacaccgccctcccgccagactcccggcggctcctcctccctctcccaaacccactcccaaagctaagtgcaggcttccccgttccagccagaagcgctgcgtgagcctccacac

SEQ ID NO: 9796 - DNA, 201 bp, Homo sapiens
gaggcccacgctttccagaccgccacagtcgctgtcacagggcctgagtttgggcggcgccccgccccggccgcacggtgcgccggcgttaatcctccccgaaggttccggcagccaagattgcaggttcccaccaagcattgtttccgaactgggccacgagagcgtgtccctgattggcttgctctggaggctgggaag

SEQ ID NO: 9797 - DNA, 201 bp, Homo sapiens
tcccccgcgcgccgcctccccccgccgccggccgcgtgcgcccccgcccctccccccgcggcgggagcacctccgctcgccacctggggacccgcgccgcgctccccgcccccgcccgcccggcgcccatcccccgcgccctccgctcgctggggttataattgcctctcaccccccggaggggttattttgggggtggtt

SEQ ID NO: 9798 - DNA, 201 bp, Homo sapiens
gcggccccggtgagcggggcgaggggcgggtgggcagcggcgccgggggaggtcgaggaggcgaatggtggtgtcggggcggcgggtaccgggcgaggtcgcggccagccttctcgggccggagttgggcatcgcggggacggggagtgtcgggggcaggtgaggccagggcaggagcccacgcggtgggtgcgaaggcct

SEQ ID NO: 9799 - DNA, 201 bp, Homo sapiens
ggaggcgctgcgccaggcggaggaggagcgcaaggccaagtacgccaagatggaggcggagcgcgaggccgtgcgccagggcatccgagacaaggtgcgcgccgggccggccccgcctgcgggaaggcggccctgagtccagcggggacccagatcccgcctgggtggaaggggctgcccggaagaggggcgggcgtcccc

SEQ ID NO: 9800 - DNA, 201 bp, Homo sapiens
aaagagaaaagaaacagataaaaccagggcagggggtaaaaaagttccccgcgcctctcggaatccagcggccgcggccgcggctaccgccgccgccgccgggggtgggctccggaagagcctgcccagcagggaaggggaggacgggccaggagcgaaatcctgcaggcgaggaagggacagacgcgcaaagaaaaagtg

SEQ ID NO: 9801 - DNA, 201 bp, Homo sapiens
cgcgggcgcagcggcggccgggcacgaggccgggctgacaccaccatctgctggggcgcgggaagaacggcagctgctctgcgttgccccggcgagggacgcctggaaaaggctgaagccctgggcgtcctcaagcccgttatccacggggtccccgtcaccccagcctgctcgccgccggccgtcttttgtgattccctg

SEQ ID NO: 9802 - DNA, 201 bp, Homo sapiens
tttcccagggatggccttgtgcctgggctctcttcccctccaaactccggggtggcccctgctttatcagactgaaccggctctaaggagaaaagttgacgatcatcctgctctagcctccgggaagtcttgctccacaaagaacaagagtctctggttttgtgaaatgagtcacaggctgccttgaccatgcctatctgg

SEQ ID NO: 9803 - DNA, 201 bp, Homo sapiens
ccccaaaccccgaccgccggcctggcgcgcggctgcgcccaccggctccgcgctgctgccgccgccaccgccaccccgccgccgccccggcccgcgggccgcccaggctagtacccgggccggcctgcctccgccggccgtccgggtgcccgccgccgcgccgcgccccggccgggcgtggatggagggcgccgcgcgccc

SEQ ID NO: 9804 - DNA, 201 bp, Homo sapiens
cggccggacctcctcccagactgcctgcggtctgaaggggtcaggtccgcgcaaggtcccaggctgcttgggcgccgggtcgcactgtcaggagctgcccgggagtggctttccaggaacaccaggcactgaccacacaccaggggctgggaaaccaggtggcctgcaccaaggcggcttcggggacttgtctgtggcaag

SEQ ID NO: 9805 - DNA, 463 bp, Homo sapiens
agcgggcgccccgcagccgtgccagcgtcacgctgtagcagccgagcatcagcccgaaaggaagcacgaaagcggtcagagtctccaggctcaggtgggcggcggcgtggaccggcgacgggtggcacagctggcatacgcggtccctccacaggtggcggtagacggcggccgggacggcgagcaacagggcggccagccagaccgccagcagcaggcggcgggccagggccgggctgcgcagccgaggcgccaggaaggggcgggtgactgcgaggcagcgctgcaggctgagcaggccggtgagcagcacgctggcgtacatgctgagcgcgcacacgtagtacaccgccttgcagcccgcctggcccagcggccaggcctgccgggtcaggaaggccacaaagagcggcgtgagcagcagcaccgcgccgtcggccagcgccaggtgcagcacaagcgt

SEQ ID NO: 9806 - DNA, 201 bp, Homo sapiens
ggggacgccagtggactggagccgcggagcttcgagggaaaaactttgcaggcgccgcggccgggattcggttacggctccagcccaccccagcaggtgcgggaggaagaggcagcgccggagtcccgaggccagagagcctcggcggcggcggccgcttctttcccccgagctggcctgaagtcgctgggcactcccggt

SEQ ID NO: 9807 - DNA, 201 bp, Homo sapiens
agggctgggaggatctgcagttctcctgctggccctccctttccaggaagccggccagcttggagccggctgctcaccccgactcaccccccgcctgggcggagcaggaatgtggaagttggcccgaaaggactgtgccccctccccgtcaaacaccccccccccgcgtcccccaccaagttctggccggggctgtggagc

SEQ ID NO: 9808 - DNA, 201 bp, Homo sapiens
agggcggagctcccggggcagaggcgctccgcggcaagaccgtcgaagtgggtttcgacggctgggccgctgcccccggggggccgaagggtgcgggctcgggctccgggggccggggcttcttcctcagcaccacgaacttgacgccgtcgagctccttcaccaccgccacgttgttgacgaactgcttgaagcggtccc

SEQ ID NO: 9809 - DNA, 201 bp, Homo sapiens
cggaggaggctgcggggggctccggcccaggcgaaggaagggcaagaggctgttcgaccgggggcggcgccgggaggtgggtgggcttaacacccaggtcgggggaggggtttaagagacaccgggaagggcagccgagccccaggggcgggtggggtggtagctgtgtgtagtaggggacagggctgggcctctggaagc

SEQ ID NO: 9810 - DNA, 201 bp, Homo sapiens
tagtcgacatgacgcgcggcgcagccaatgggaggcggagttggcgtttcttggtcgggggggggccggaggggtgggccccgcgtctccggtgtctgccgtgctcactgaatggagagagcgagcgccggccagctcacccggccgccccgtgccccagccgcagccgccgcgctccccagcccagccccaagccggacc

SEQ ID NO: 9811 - DNA, 201 bp, Homo sapiens
ctttttttaagttttcccttggggactgacattttattagcacagagatcaataatgccagataagagacctctgattttacatctggggctcccggaacgatgtctgggagagaaaacatgacgtttcttgcagaggcgaatcccagcccgggaggagggaggccgctgggatgtgccgccggcggcttttgggctcggt

SEQ ID NO: 9812 - DNA, 201 bp, Homo sapiens
agactggacccgaacccggcccaccccacccgagcggcgacgccagcgctgaccccaggcgtgtcccggcccccggcgcggctccggcccaaccgtgcacgcccgcggaaggcctcgcacccgcgtcagaagtggcctgcccggggccaccggcccgcaagtccccggtgttctcgaggtccctgccccgtcccgcgcggc

SEQ ID NO: 9813 - DNA, 201 bp, Homo sapiens
ggggctggggagggctgccggcggcgcggcggggtcggcgggaggcgggaggctgcgcgcggcgcgggagcgtgcgccggggtcagcaggggcggggtccgcgcggccgccgggactggaggcgcgggggtagcgggtagggtaccctgagggcacacccccggccacctggcgggagacccagctctgccgcgcgccgcc

SEQ ID NO: 9814 - DNA, 201 bp, Homo sapiens
gccccggccgccgggcgcgcagccgccctccccgcgccctgcccgcttttatggcattttctaggaacgggaagggggtgggagccgagccggcggccgcgccgcgccgaatgtgtgctctccctcccggctgtttacggcggccgaggcgcattgtattttgctggcgtcgaagggtgttttggaacagcagagggagga

SEQ ID NO: 9815 - DNA, 201 bp, Homo sapiens
cctagtgctgcccgggcgccctcccgcagcagccccagggcgaggaggatggggggggtcctcgcaggggccacactgtcggagccccacggatccgggcgggacggtgaggcctccacactgagccggtggcaaagtccccgcgaggatgaaggaggaaccccgtgctcctcaccccaccaggccccgcatttcctggct

SEQ ID NO: 9816 - DNA, 258 bp, Homo sapiens
ctctctgggacaagaagtggagtggggcggccaggacgcgggccgtggggatcgcgagggaggagggggcggccgcccggacttaccccgtggggtccccgcgcgcgggcgccccggcgtgtcggatcatgccgccggcagctccgggacggggaacggaggcgctcaggcgccgggccgcgcggaacgcggagtcccgggcgcccgcatgtccctggctctggccctctggaagggccaggccgccgctgccgccgc

SEQ ID NO: 9817 - DNA, 201 bp, Homo sapiens
cccggtcgccacgccccttccgagggtcgctccgcccccgtcgggccccgcgagcgcgcggtgggggaggggagggccccggagcgcgcctgcgtggggcgggggcggcagccgactaggggctgggtctggccgtttagggccgggtcttggcccgtcgcccacggtgcggagggctggtgggctttccttggccgtcgg

SEQ ID NO: 9818 - DNA, 201 bp, Homo sapiens
cagcagctccccagagccctggcttggcagggaggggacggcgcccgagcagccatattgcagccccccgggtccctcctccggccggcgcaggccccgcgctcacgacctcctctgggagccggatctgtcctctccatcgccgccacccgccggcctctgcgtcccttggcttccgacatcccgtctggccgtccccct

SEQ ID NO: 9819 - DNA, 201 bp, Homo sapiens
tccccgcgccatctcgggcccgtccccgctcggcctctccggagcggccgcgccctcagccggggagcccaggggtcctggtccgcggagccgggcgcgcggggggcggctggggccgcagcagggggaggctcggcgctcgcagccgccggcgcggggctcatcgggcgtgtgggtccatcccggccggggcgcgacggg

SEQ ID NO: 9820 - DNA, 201 bp, Homo sapiens
gggcccttagcacgcgccccagcgccggagcagggtcagggtcttcttgcgacccggccccgctccagatccccccagctctcggccgcggacccgggccgcgtgtgagcgccctttgcacctcctatctccagggtccgccgagagccacgattttttacagaaaatgagcgataaagagattttgtactgtcctgactg

SEQ ID NO: 9821 - DNA, 201 bp, Homo sapiens
ccgggcctagggcgccgcctgcagttgcgcgcggccgcctctagatggaactttctcaccaacgcaaggcccggccggagcagctacccgggagctgggcggcgaggggctactttctctcattccggcgggtgcaggatcggggggcctgggcagtaactagtggggaggagcgctggactgtgcacgtcgagcccggca

SEQ ID NO: 9822 - DNA, 201 bp, Homo sapiens
ctcgccccacctcctgcctgttcccggctgtcagagacccaggtgcagagagacctcagaggtggcgtccggggtcctggcgtccctcctgcggacgctcgctgcagagcaggaagccgccgccccggggcggaggggcgagccgggccagggggccggggtggagaggtctgcagggcctgcgcgctttccttacccgcg

SEQ ID NO: 9823 - DNA, 201 bp, Homo sapiens
agcaccaggtccggctccccgtacaccgccccgaaccccgggggtacgggcgcgggctccccgggctcctcgggggacgcggggtcctcaagccaaacgcgcggttcgggggacggcgccgcgggctcttccgggcacgcgcgctcctcaggggacgcgagctcctccggggacgcggcgcccgcgctgccggcctcccac

SEQ ID NO: 9824 - DNA, 201 bp, Homo sapiens
tccccggccgaggaggggccgcgtggcgccgcggggggcgggccgcgcacgccccccgcagggaggactcagggacagtcagggccccgggagagtccgcgcgcatcgcccggctccgcggcgccagccatggcgtccgtgcgtggccccgccagggatggggcgacgcggtcagagccgcacgcgaccgaaatccgcact

SEQ ID NO: 9825 - DNA, 201 bp, Homo sapiens
gctagaaaggatcgagaaaaatcccaaagctctaagcctgagctagggagggtctcagagggaggtctgactgcagaccgggagtcttctcctcccgtgcgccgctgcccgggacgagaaacccgtggggcatccaggactaggacacgaggtctcagcctgggcaggtggacaagctgtggggtcccaccctccgcaggc

SEQ ID NO: 9826 - DNA, 201 bp, Homo sapiens
gccgctgagtacgcgctccaggcaggctctgggaagtccgggatggaagcagctccctttctctcgccttcctccctcccctctcccctccctcctctccgcgcctctcctcctccctccgccctccctggacgtgggctgccggctgcagcccggagggacggggcgcgggacggagccccccgcgggaggaggggccgg

SEQ ID NO: 9827 - DNA, 203 bp, Homo sapiens
gtaggagcggcccgtgtccgcgggcgggagcgtgcggcctggactgccccgccggacaggcattgtctccccgccctctcgggctcgaggcgggccgcgcgcgccggccgccgtccgggcgtcccgcggtgggcgagatgcgccgcgtccgttccatgcctgccgcccgcgcgccccttgctccccaccccgtagccgctcgc

SEQ ID NO: 9828 - DNA, 201 bp, Homo sapiens
ctcctcgcagagggcaggacacccacctccccgtgcacctgcttcttctccggtctcccgcccccagcagcattctaggacccaggggtgtcatcgggtcggggagggaggggctgagcctgggtttggggacatcgggacagggggaggggctggcgctcccgtctggccgggaccccgtggcctagcgcggctccacga

SEQ ID NO: 9829 - DNA, 201 bp, Homo sapiens
agcgcctgcctaatttgcagtgacaccgctcagctgcccagggctccagctgtcacagccaattagcccgcggccggggaggagcgccgggcaggggggcgggggggcatgaaggggtcggcgggggaggctgtgggggttgcaggaggggtaggcgcaggaggaggcctgtggccttcaggtccggcccgcccccccagg

SEQ ID NO: 9830 - DNA, 201 bp, Homo sapiens
gggcgcactgggcgaaggcgacgcgcggctcgtgggtgcagcgctgggcgccctgaggaggctcctgctgcggccccgggcgcctgtgcggctcctgagcgcggagctgggaccgcgcctccctccgctactggacgacgtgagcaaacgccccgcctccgggtcccgcccctgccgctgtcaccgcccccgcccttccag

SEQ ID NO: 9831 - DNA, 201 bp, Homo sapiens
caggtagaggggggcgggagggggtgtgagggagaggaggagccggagccgccgctgcggccccctccggggaggggagaggagaacccccttcctcctcgccccctcccagccccccgctggcccgggagggggtggggcgccgaggccgcggcgacccggcagggcctggccggtgaagagcaggcgggcggggtgcgg

SEQ ID NO: 9832 - DNA, 201 bp, Homo sapiens
ccaaccctgcgctcccctcccagcccgagtcctcccgctgctctttctcctcctcctcccgagcctcctcccctccggcgcggcgccgccagccagcctcggcggggagagtgcaggtactttgccttcagaataattagcaggacccaagccggctttccgagcgcgctttctttttcttcctttgccccctccctccgg

SEQ ID NO: 9833 - DNA, 201 bp, Homo sapiens
cgcggacggcgcccgacagcagctggaggagcggtttgccgacctggcggcgagccacttggaggccatccgtgcgcgggacgagtgggaccggcagaacgcgcggctgcgtcaggagaacgcccggctgcggctcgagaaccggcggctgaagcgcgagaaccgcagcctcttccgtcaggctttgcggctccccggcga

SEQ ID NO: 9834 - DNA, 201 bp, Homo sapiens
cccgcctccccgcctcagtccgcgcactcaccgcgcacgcagagcagtgacatggccgaggatcgggcaagcctctgccgcgccccagccgcgccggaccgctccctctttcctctcagcaggtgccgcgactgctctcgttaccggccccacgggtctggcagctcctcatggtcccggtcgcaggtagcgtcccgccgc

SEQ ID NO: 9835 - DNA, 201 bp, Homo sapiens
tggccattgttgcgcaggcgcagttctgggagcggcgggagctggaagcccaggagttccagggggcgcagggccgggcagaaggcggcgagctgggggcggatatccaccggggactggaagcggcccgcgcaggctggggacacccggggccagggcgggtcgcctggggtgggagagtatagtgaggaagtctgacgc

SEQ ID NO: 9836 - DNA, 201 bp, Homo sapiens
ttggggacgccgcagcccggctcggggagggggcgctaggccgggagccgcagcgcgggagggacgagcccgggccggcggggggaggggagcgggaagcgtctttgttgttggcgaccgggatcccttctcggcacaggggaaaggcggggaagccactcctcatcgggtctgtgtttttgagaggattctctgatggtt

SEQ ID NO: 9837 - DNA, 201 bp, Homo sapiens
ggtctctgggaggcgccgcgtgggggcgcggcccgtggagcccgggcgctagggaccggccggggccggcgtacgggtgcgctctgggttcgcccgggccgcgggagccagggagccagggagccagggaccccggctcccgcacggggcagacaggggcagcgcgggcgacccggagcgcctgcgtctccgcggccctcc

SEQ ID NO: 9838 - DNA, 523 bp, Homo sapiens
agagtaccgggcccctcactgcctcagagcgcgtgtgcggctctgggcgcgcacagtgacggtgacggcacccctggcccggcagcgccgaggccgcttcgccagacagccagcggccggcggcaggccgggccatgagcggcaggggccgggccgggcctcgctgaccctggctccgcgcggcagcttccccagtttccgctccggtctctcggcatgagagtccgcccgggcccggggctgcggctgccccagacccgccgcacgctggcgcgctccgggcccgcggagccgcggtgctgatacctgcgccgcactgcgccgcccgcccgtccgctgtgtgccccgggggcgcggccatggaggtggtgggtgacttcgagtacagcaagagggatctcgtgggacacggggccttcgccgtggtcttccgggggcggcaccgccaggtgagcgccggccggggcgaggccgggccccgggcggcaggcacggggctaggtggttctgaaacttggcgcag

SEQ ID NO: 9839 - DNA, 201 bp, Homo sapiens
cggcggcaggcgggggagggggtgggggtgcaggggcggccccgcgggccgcggggggggcgcgcggcgcagcggggtcccgggcggggcgcagcgggccgcggggctccgggcgcgctccccgcgctactccagtgccatggtgcgcccgctgagccgccgggtttagagctggggctggcggcggagggatacgggccg

SEQ ID NO: 9840 - DNA, 201 bp, Homo sapiens
cgccctcccgccttcccggtacctgcctacccccgcaactgtcccggcccccaacacctgcatcgcccaaccccttccccccccgccccctgccttccccgcacctgcccggagtcccagcacctgccccgccccccgctatccccctccttgctggcctgatggggtgtgggcccaagggagccacacttgggcggaggc

SEQ ID NO: 9841 - DNA, 201 bp, Homo sapiens
ccccggtctgacggaacacaggcgacgcacgtgaagtccaggccctatcccagcgcaggcgggcctccagcgacccacagttgtcacatatccggccagcgccgactcccgaaggcgcactccccatactccactccgagcaccggtcccatcgttagggaaggtccccctggatagcaaggccggggcccaggatctgcg

SEQ ID NO: 9842 - DNA, 201 bp, Homo sapiens
cggcaaccccctctatcgtcccctgcagcaggcgccgagccgccgccatcttgtcccccgtccctccccccccctcaccgatatttacatagcgaaaatcggcccggccggcctgcggccttcacctcacgcctgcagccttcgcctcctcgccaggcctcaccccggcgcggtgccccaggtcggccgcggagccgaccc

SEQ ID NO: 9843 - DNA, 201 bp, Homo sapiens
cgccggcgggcgggaggcacacacgcgcgcacaagcggaaagaaagcgggcttactgcgtggggatgctcgcccgcgcagctgtctcggcggcggcggccgctgcctgcaccgaggccgaggcgcggcggtggcggcggcggctgcggactgagccccctccgccgggcggtggatgtagggcgcgggaggggcgcgaggg

SEQ ID NO: 9844 - DNA, 201 bp, Homo sapiens
tctcccgccagcgtcctccgcccgcccgccccttctcggccccgccccgcggggctgctggagaaatcaagtctggggctccccttgtcgagcacggggcgagctccagaaggctctgccgtgatggaaaacttccaggcaaattcctccgggcccgtggcccccaggccgggaagcctccgccacgtgaagggcccccgc

SEQ ID NO: 9845 - DNA, 201 bp, Homo sapiens
tctccacacagaaaatctgcaccagttatgtaagctaaaaagctgtgtgaacccaggtgtcccggaaaggggctgcaggacacagcaaaatgccagcagcgtgccggacccctcccttccatcctcctctccaaagaacagaggtcaggaaaaacactggctgggacgctagaagggtcatgtgttaactataatcacatt

SEQ ID NO: 9846 - DNA, 301 bp, Homo sapiens
gcggatggggccttgattagctgtggatttctgtcccagcgcactcatttaaccgtgtttctcttggttggcagagggcgccaaaggcgacgtgccggccgccagctccaggccgagccccgagcgcctgcaggaacacgccccttcacccggcgcgggacgcagagctgcgagagaatcttgttcagcgcggactcaacgccagggcgccgcctagaggttggtctctgtctcggcctcacccgccgggagaccacagagctgcttccccagccgcccgccgccagaaattggaaaaaaa

SEQ ID NO: 9847 - DNA, 223 bp, Homo sapiens
ccagagctgcacgtagatgaacacgaagagcagcgcgtagaacacggtgtagacgacggtgaggccaagcttcacgtaggggggcacggccggggtcagcgtgggcggcagcgagtcgttgcgggctgggtcccacggcggggtctccatcgggccgggggcgctgccgcgcggccggggacgctcgggcctcatcggggctcacggccgccgccgcccccgc

SEQ ID NO: 9848 - DNA, 720 bp, Homo sapiens
cagctgaatgaatgggggaggaaggcgggcgccggcccctccccgcgcgctgcgcccccgccccgcccccgcctcccgggcggatcaggttcccgcacccgcaccggcctccctgtctcgcactggctgctccgcccgcctgtcaaggccaggcctggggggctggggcccgagtggccgctgggggacagtcctgggcacacgaccggagcgcccccctcctccccgcctggcccgcgcccaggggacggcgagagacgcggcctcagcccctccccccgggcgccccgctgcggccagatgtgggcggatgtggaggccgggccatggcgaggagggcgggcgcccagaggggaagagattcctccccttccccgggcgcagggtccttctgcaggaggctgtatttgggcagccaaacaaagttctctgtcaccgccgccgcgcgctctgcgcctgcaagggttaaacggcagcgcacgcggctggcaggcaggatcccggcctgtgggctcaagagccgaggggcgcagggcgaacatgcgagtcccatggcaccagcgagaggccaccaactcccacccaccgagggcacccctgcagctaacacccccaccacgaccaccgccccgggggccaccgctgcaccctcctgggtgagccctggagaaggcactgtccgggagaaggggcacagggcggggatggaacacggctgtc

SEQ ID NO: 9849 - DNA, 1683 bp, Homo sapiens
accgagggagggtgcaaaaggcggggggcggagggggggtagatcagattaggcgaaactcaataagctcccagccctccagcccaaagcttccaccatcgccgccaccaacgagccactccaattgagccagcatcgccgcccacccgccggcccgccggaatcgcgcccatctcctgcaacctcgcccggaccggcatcccgccccctcggcccggtctcccccttcccgccgggtgcaaagtcaaagacccagcaaggcgacgtgaacttttgcatgcagggcacacacgtcgcccccggttccgggagtgcgggggcccgcggcgcggagggaggctgggcgcccgggctcccgggccaaggtcgccgcgcgtgctcacccatgtcccggcggctccggctccgctggccccggcgctcgctcagatcccggctcccgtcgctcgcccgagcccccaaaggtgctgctgcggcaactccatggcgatgagcatctgtcaaacggcgagccgcgagctggccgccctagctcggggggcgccggggcccccgggcgcgcggaggcggcggcgagcggcgggcgccccggccggccccgcgcttcccgcccgactctgccgcctccgccgcgccaccgatttatggagagagatatcaagggggaaaatggcgtctccggagcccgaggagtcctggagtaatcacattcacacacacacgcccgcacgcacacacactcgcacacactggcacacaggcgcgcggcgagccctgctaattttagcaggagccaaaaaaaattttatatatatatatatatatatatatatatatatatccccgtctctccgatcaatgctttttctttttttgcttttttttttttttttttttttttttttgcttttcttcaaaggatgggttggagcgttaaaaaatgttggtgggtttgggctcgcaggaggcggcgcgcggagggcgagggcgcttttgctgagctgtgcagttcggtccgctgagcccggcggccctgcccgcccgctcgtccgcccgcggtcgctagtgttgccgccgccgccgccgccgccgccgctgctgctccatggccgcgcccgccccgcgcccccgccgcgtcccgtcgccgcccgcccgcgtccccggtgagcgctggagtggggtcgggcccgtgtgcctgcctcccgcgccctctccgaatcccggactcctagtgaaaggaagggggagggcgcgggcgcggaagggaggtggatcggagcggcagcgcggcccagccgaacgggtaccgaccgtcaccccgcgatcttcctcgcagggggcgccggcgcccaagctgctcgcccggagggcccagagccgcttcccagaccagagccgggggaggcgcagccagtagcgagccctgagcgacctctctccccactcgcccccctgccccagtgaatttctgtcagttgaagggagcggggctcttgcccggggaaaaggaaaacagttcgtggcctgggatctgggaccccttgccgcccccagcgcccctcccgctccccggcgcccttgcggcccagtggctcctgcgcgccggagtccgccgcgaagactgagcggccgcggggatcgccgcgggctccgcgcgtattcctgggctcaacactgccacta

SEQ ID NO: 9850 - DNA, 233 bp, Homo sapiens
aaacaaaaagattaaaggagcagcggccggggcggcagcggtccccaggccgggacacccggggtggtgcgcccgggttcgcgggggctgcgccggcgccggggaggcggggggagcgggagcgggcgacgcggggaaggggggagccagggggagggcgccggccggaggaggggcggacccgcccgccctagccgagcagagcacagccgagccgagcggcccgggcgggg

SEQ ID NO: 9851 - DNA, 213 bp, Homo sapiens
ccttcccccaaagcaaacagcatcctcccactaccctgcagctgggccccccccactggtccccgctttcccggtggagacggcgacgtggcccacacgcgagcccctcgccgaggatgaatcaccagccagctcgagttgccacactttatctcagtacagttatcgcgagagtcccggggccgcgccggcgtgctctacgcacgcgcagtc

SEQ ID NO: 9852 - DNA, 236 bp, Homo sapiens
cgcgctgagccctaccctgcggcggccggacgcttcggcgcagggggcggcgcggcgggcgcggtgctgggcatcgacaacgtgtgcgagctggcggcgcggctgctcttcagcaccgtggagtgggcgcgccacgcgcccttcttccccgagctgccggtggccgaccaggtggcgctgctgcgcctgagctggagcgagctcttcgtgctgaacgcggcgcaggcggcgctgcc

SEQ ID NO: 9853 - DNA, 233 bp, Homo sapiens
ttagctgtggattcccaatacctgcaggtcacaggaccagaggctgggcctctaggagcagaggacacagagcagtgaagacgagacccggagttccagcggcagccaaagacaaagaagcggacaaatcccgccacatcccggaagccgtcctctccgctcaagctgcgtgcctgattggacagttcccagcccagcgtcgctgattggataacgtttaaaaccccaccctc

SEQ ID NO: 9854 - DNA, 737 bp, Homo sapiens
ctcgcccgactcaggctccgagttctcccctcgaccctccccagcctaaaggctgtacccgcttcaggccttcccagcccggccctccagttccttcttcggcctccctcagcctggggtccgggtttcctcctcggctgagcagccgggtccgcgactcccttcaccctccccggcccgggcttccggttctttccagaggtgaggcaggggccacctagaattccgcggccccccacctcccccaagaccaccctcgccccagcttcctgttccccattctgtcctcccaacctgggttcccgattactgcctcgacttcaccttgccgtcagggaccaccagccgcctcttccgcgcctaggggacgcgcagcggcagcctctgctgatggcaagggtctgcgcacccggaaactccagggtctggggcgtggtgcggcccctgcggccagcgggctccgcttgagcttcagggctctttcgttgttggactacgtttcccacaggcctcagggccgcggatgaacttcgacctttgcttccttttccggtgttgtggttattgagttaagcctggcgagtcgaggtgacccgggccgggctgcgggaggagctcgcggtgaggtggccccgcgctgccgggcgaggtcggtccacgtggagccgggagcctgaggcctctgtacgcgggagctgcggacgatggtggttagtgctattgtttacgacgtcatt

SEQ ID NO: 9855 - DNA, 308 bp, Homo sapiens
acagaggtgcagttcagggtccaagatctggctcccgggttccaagcccaatttcgggttcgccagcccagcaggtgcggagccaagctcctccacagacgcggccctctccccacgcgaggcctccaaatctcgcaaactaacggaaatgaagctacgctccgggagcggtgcctctgggaaatgtagtccagcgctccggacgccgtgcctctgggaaatgtagtccagcgcttggctagccggccagaacgccaggaggcccgggccgctcacccctcgaggggctcgtgggctcggcctgtgga

SEQ ID NO: 9856 - DNA, 1100 bp, Homo sapiens
tgatgcgtttggtgacttttcctgggttcttgcttaagcggagccacaggttgtgggggcggccaggcctctggggaagagcaggtgccgcggtgccggcgcgccagcagcccgcggccaaggccacctgctcccagggccccggcacctctgcggggaggcggcaggcagaggacgcgcgcgcagtcgcgcaggagccctcaggcgagtgggggaagcatcgcaagagacgcggacctggagcgcggtcactgcgttaccgcagcgacctgggttacctaagccggcgggactgagaggccgctgcgcgtgggcaggggctcagattgcgcccgcggtgcctgtcccggcccccaccccggaacgattgcagccctgcggggctcgccgcccacaccgcgctgaggacgctgcccaagccaggcgcccgcccccgcccgcggtctcagccgctcgcagcgcgccgcccccagacgcgcgtggctgctggcgagggctgagaccgcgctcccgccggccagttcccagcagcagcgcatcctccctgctccgcgccttcgctccggacccgcgtcgtcgcagccccgcggtgatgagccccgagccggtcccgccgccgccgccgccccagtgtcctggctgcgaccgcgcggagccgatcgcccagcgcttagaggagggcgacgaggccttccgcgcgggcgactacgagatggcagccgagctctttcgctccatgctagccgggctggcgcagccggaccgcggcctgtgcctgaggctgggggacgcgctggcccgcgccggccgcctccccgaagccctgggcgcgttccgcggcgccgcgcggctcggggcgctgcggccggaggagctggaagagctggcgggcggcctggtgcgcgccgtgggcctgcgcgaccggccgctgtccgcggagaacccgggcggcgagcccgaggcgcccggcgagggagggccggccccggagccccgcgcgccccgcgacctgctcggctgcccgcgctgccggcggctgctgcataagccggtgacgctgccctgcgggctcacagtctgcaagcgctgcgtggagccag

SEQ ID NO: 9857 - DNA, 214 bp, Homo sapiens
gaagaaataatatattgcagattgtaacgagcacggggagccagcgaaaggcagggcgtccactagggcgcgctgagagaccgggaatccccgcaagggcgcccgcgccgcccgccacccgccgccgcgcgcacgccgcgccctcgcccacctccaaataatatttacagttagggtttttttttttttttttttttttttttttgctctcgcc

SEQ ID NO: 9858 - DNA, 582 bp, Homo sapiens
agcttgctttttccaggaggagctgctctcgccgttctcccgggccatggccgacgagcgcggcgcggaggagcggccgggggcgcgctggggagggggcgccgggggcgcggcgcgggcgcagaggcggcggggatgccgggcggctcgggctgcggcgcagcttcctcctctgcagtttcctctttcgctctcgccgccgccgccgcggccgcggtccctccctggctcttatttctgctgttctcgggcacagacttcctgccgccgccgcgcgccggctcctttgccgccgcctgccagcctcactttctgctactttcttgcctccctcccgctccctccctgccgcccgccgcgctcccccccacctcgcgcctcctccccctcctccccctcctccccctcccgcgggctccccgccctctccgtgcgccccggccgctccccgcctccagcgcgccgccttcggggatgtcccgctcccctcccaagagcgccgggccacggccgtcgtgccccctggagccccggcgagggcgggtacgggcccccggcaggtgcggggcgcacgcgggagag

SEQ ID NO: 9859 - DNA, 203 bp, Homo sapiens
cctccaggaggcgtcctgaccccgcactccggcctttcacctcccgaccgtcagcctcagggccgccgcggcgacgcgcgaccccttccctctgaggggcgcgggctccggacgcgccgggctctgccaggcatctagtggagggtcggaggtcggcgaccagcccgagcccagccgtcccgggagctggcgcgagtgtcgcc

SEQ ID NO: 9860 - DNA, 823 bp, Homo sapiens
caactacttgttccagaccgcgttacctgcaacctgctccgggctggcgccatactcggcgtcccggcgcttctcacaagtgccctcgcccatgaccagcgcctgcaggggcagctcggagcccgggtggggatagcagcgcagcccctggccgcagcgcggggtgtagacgccgcacgcctcgccctccagccgggcgcacaccgagcagcagccgcagcccggctcccggacgagctccgcgcatggcatgcgggcgcctccggccactgcggccaccgcggcgggcggcgcaaccggcgggggcccgcaggcggccaggcgctcgggtgtgcagggcgggcagcggaacagcacctccgcgcgcgccccgccgccgccgccactcgcgcccagtagcagcagcagcagcggcagcagcggcggcggcggcagcggcagcgcggggcagcccactctcggcagcatgctggcggtcggcagcgcggcgcggcgggcgagcgagcgagcgggcgggcgggcaggtggcacggccctgcgagcgcgggagccgcctcctccgcttcttcctcctccctcgccgccgcagccgggtcctaaagggccggcttctccccgccccctgccttctcccctcccccttttggagaccactcccttcccccccgacactccctcgcgccggcaagtgagtgcgcgcacgcccgctcgcccacctccgcgttggctgcgggctctgggggttccctgctcttcccgggccccgtccctccgcactcttctggcctgactatgactcctgaaggagaatacggataactcg

SEQ ID NO: 9861 - DNA, 293 bp, Homo sapiens
ctctgttcctaagggagagggacagcaccctcccgggcttccagctcccttgggtgtggcgggagagttctgggcgaggctgcgcctacacctgcacctcggccggctcctccggctgatttcgctctggttgatttcgcgcacattcctctcccagcgctgcaaggaccgcctgaactcgctggctatctcggtgatgaaccagtggcccggtgtgaagctgcgggtgaccgagggctgggacgaggacggccaccactcagaggagtccctgcattatgagggccgcgcgg

SEQ ID NO: 9862 - DNA, 262 bp, Homo sapiens
gcggggcatgttggcgcggcccgagggcacggcactggctcggtcccccctccgcgctcggccccggcggccctcagtgcccccggcccattgcccgggcgcggcggctgcgggactcgcgtggcgccggcgacggctcggcccagctctgcgccctgcacgcgcgtccctgtccccgggcccggcagccgctcccttttaacggggggagggggccattgttctcgcctcccgcttcccctggagccaatcagcgcgtccg

SEQ ID NO: 9863 - DNA, 240 bp, Homo sapiens
gccttcctcccactgtcctcccgccaccagccgcccctgtcgccgagcccgcagtcgccagcgcgccccgagcccctccaggccagaggctcccgcaggcgatggcggacaagagggcggggaccccagaagccgcggcgcgcccgccgcccggccttgcccgggagggggacgcgcgcacggtccccgcggcccgggcccgagaagctggggggcgcgggtccctccaccccgcagcgg

SEQ ID NO: 9864 - DNA, 1240 bp, Homo sapiens
ggcgcctttgcgcacagtggccacttggggtcgcactttatgcctgtttgagcctctccgcggcgggctgacgccgggatctgcttaatcgttacaaaacgttcaaacaaaaacagggccggctccccagcagtggagagctactcggagcaccgtcccgggccggcctcggccccgaggctccgggggctcaggattccgtgcgtgtggcggggaagaggaattcagagcctttgggctgctgcttttcccgtcgccttcactgtgaacattgtgcggtggggtgaacgcggggagcggcggggccagtggagtcgaacctcagggctctgcgactgcacccgccaggaggggccctcgcttggcctgagaaaggtcccctgaggttaagagttgggtctgaacacaactctcggagcctcgagcccgccctccccaacatacaaatacgcgcagatctccagaaacaggaacgcacgacacacacggccagaagccgcgaggacacacagagcgtcgcccactgggcgggggccgcttgggaacaaagggcccaggaggcgttgtcccggcgctcattctgagcctccttgggggtgacacgggatgggggtggggtgcaaagggaactgagggaggagagtgcgcgaggaggggaaagcggtgatttggcctagaggtggggcgcgcactccaggcgagcgtgcgtgggccgggacctgcagggtacgggggtgggcccaggctggccgtcccactccgctccagcgctccgccaggcctccgccgctccggggccgctcgggccgccagtcagctgacgcggggggcgggggagctgtcaggcgcgccccgccctgcgccgctgggccgcggaggccgtgcagctattggcccgcgcaccgggccgcccgggcccccgcaccccagtgacatcaggaggcgataaaaggctgcggcgccgccggatccagcacagctgcaccgccgagctgcgagcggctgcgagcgagagagcgtaagagcaagagagctagagagcgagcaacgggcactcgccccacgcctcccctcagccccaccgcgcgctccgcttgcctctccaccccgcccgactctacccggcccggtccctgcgcgggcacagcccagagctctggggcggtgcaggcagcctcgggactctccggcgcgccgccgcgtccccagacaaaggcttggccggcggccccggcccgct

SEQ ID NO: 9865 - DNA, 222 bp, Homo sapiens
aataaaaacccacactacacagcgatggtggtgtctggtggcggtggcggggtggggggtctgactagatgagccgctcctcgcgcccccggcgccgggcgccatggcccgagccgaaggcgcctctggccccggagcgcccgcggcctctgcgcttggcgcggccgcccaagtaggagaagaaggcgcagcccaggaacactcggaagcagcaggtcgccc

SEQ ID NO: 9866 - DNA, 714 bp, Homo sapiens
tgtgattcctttttcctgccccaagtggctggcgatacagcccccggcgcgccgggcactgaggccctggagcacagcgtggggggcctggcacagacacgactcacgaccgggccgatctccggccagaaagaactatgttccggccgcccgggtcgcgggcccgcggtgcatccctgcaggcctccatcctgcctcggcagaggtctgcaagaatcctgtgggtgtcccccggagcgggcagaggaggagcccagcgccgaggcccaggcgcgccccgccctcgcccctccccgtgcccctcccccgctgctcccctcccaaaggccgagacctggacgctgcccggtggcctcggcgggggccctgtccttggccgctgcctctctgaatcccaggtgagaagaataaaacgtcctgacgctgtccggcttccggttcttggagaggacgggccgtctctgccgagagaactgtgcggaatcaggaagcgctggtgctccttcgctttcacgggactaagcgaaatccggctttaaacgaagtaaagccggctgcctcctggagtatttttgtcatagtatttttattttgggtcagggtattctgctgcggaccctgagtcttaggaaggaggcttataacagcggaaagccatttttttttaagaattgctgagttttccggattgtactttcaaagactttccctgaa

SEQ ID NO: 9867 - DNA, 1216 bp, Homo sapiens
cttaccctgaggttccccagaccccgtagggtctcccacgccaccaagtttgcctcgacttcccctcgctgcctcccacacctcctgccgcggcgcggccggccagggacttaccccgaggcccagctggtgggggtgttggggtgcgcgcggacccggcacccacggcggcggcggcggcagcagcagcaggaggaggagaaagacgaggaggaggaggaggactagctgagcggcgcctccttcccagcccgcagcgcgcactggctccttggggcacccccgggagagcaccaagaccggagactaggcggcgacacaggcaaccgctgctgcacggggctgggctcagtcggctctcagaggccagggcagggggaggcaggactgggaaggagggtcggagaagtggggtgcagagggcggggcagcgagcggccaggtccggaggaaggcgccccaggcgcctagggatgccgccgcccgggctgacgccgtcggcccctctccccgccaggcgggcgcttgcagccgcgggcgcacgggcctcgcctcgttcaccggctcgttgccggcgcccgcggtgcgccccgctttgtgctccccgcagccggcgtgcacctggtgtaagcaaaggcggtcagctgatgggccgcgcgcggattggctgctccgccgtctcctcccctcccgcccgaccctcttcgcggcctcccgcccccgccctcggcgcggccccgtgctgggcaccatctgtggaccgcccaacaaaggcgcagcgcggcggggctcgggtggccgggccgcggtcgccgctttttgtctaggggacggcaggctgcggctgggcagggaggcgaagcgcactgccggtttttagcaaaagacagaccaaaagaaaatacacgtccgtgctaggaggccagctaggcacaatggggccccatctctttgcggcgtagaactcgggctcgggggctgagaaccagacacagttcggcctggggctgtgggagccaagtttcggggtgaaatccgaccctgcgtcttaaaatacagggcgcgtcctcgggctgtgtgtgcgcgcccgggggcgtcctccgcagacctggcccgggccggtgtccctgccgcgggaaggaggattcggacgcttaactcagcggcgaagtcgcttcccattggaggaggctttccgaaaacgtttctgaaactt

SEQ ID NO: 9868 - DNA, 207 bp, Homo sapiens
ggcctgcctagctcccaccccggcatcgaagccgcagctctcgggcccacctccgcatcctcaggggttcccgggggctgccgacaggttcctgaccagcgagcgcgcccccggggcaagcattcttggcgggcagaaacctgggagcggagcacagcggtgcaagggaaccgtgccaggcgggaagggcggaatttgcggggaact

SEQ ID NO: 9869 - DNA, 253 bp, Homo sapiens
ggctgcgcagcgctctcaacccaacccctggactcatcttcgccccagcctccttcgtgcccagcgtcccttgtaaatgacccccccggccgggtgccccgctttctctctcggcctcttccgcgtggtctgctctccgcccgcctgcgctcgcccggcctccctgcctctgcgccttcacctgaccgcaaaggcggccagggcagcctccgcgcggcctgacagtcacggctcccagtttgtccctggacgt

SEQ ID NO: 9870 - DNA, 209 bp, Homo sapiens
ggccaggcctgagcctcacctacctacgccgtatttctcctcctccgtgggggtccacatggccgtgccgggcgcggccccgcgggcgcggcgaccgggcgacaacgcggcggggacggccgcgggcccggctgtggcgcaccgcgagtcgaggcggggacggtcaggcggcgcggggcagtgggcggcgcatccctcacaggccgtcc

SEQ ID NO: 9871 - DNA, 225 bp, Homo sapiens
ctgcgatcggcttccaacttgggtcgagttgcgcagcggggcgggcgcgcggggcggggcgggccgcgggccctggggagctggccgggaaccggagcccgcggccgcctggtcgaacctgcccgcgcggcgccggggaggagtccggggcggcggcgcggggcgcgcgctcggcgagggcgccccctccagggccgcctgcagcctgcgggacggggccgagcg

SEQ ID NO: 9872 - DNA, 1133 bp, Homo sapiens
ggaggagaagcgacgcaagtgggtagcttttcagcgccggcgaggcgcgggaggaggagaagcagtggggaggcgcagccgctcacctgcggggcagggcgcggaggagggacccgggctgcgcgctctcgggccgaggaaccaggacgcgcccggagcctcgcacgcggccaagctcggggcgtcccctcccctcggccgggcgaactcaaggggcgcagctctttgctttgacagagctggccggcggaggcgtgcagagcggcgagccggcgagccaggctgagaaactcgagccgggaacaaagaggggtcggactgagtgtgtgtgtcggctcgagctccgggcagaggcatttgggcccgaggcccccgctgtgactccccgagactccgcagtgccctccactgcggagtccccgcgcttgccggcaaaaactttattcttggcaaacttctctttctcttcccctcctcctcggcccccatcttctgctcctcctccttctctagcagattaaatgagcctcgagaagaaaaaccgaagcgaaagggaagaaaataagaagatctaaaacggacatctccagcgtgggtggctcctttttctttttctttttttcccacccttcaggaagtggacgtttcgttatcttctgatccttgcaccttcttttggggcaaacggggcccttctgcccagatcccctctcttttctcggaaaacaaactactaagtcggcatccggggtaactacagtggagagggtttccgcggagacgcgccgccggaccctcctctgcactttggggaggcgtgctccctccagaaccggcgttctccgcgcgcaaatcccggcgacgcggggtcgcggggtggccgccggggcagcctcgtctagcgcgcgccgcgcagacgcccccggagtcgccagctaccgcagccctcgccgcccagtgcccttcggcctcgggggcgggcgcctgcgtcggtctccgcgaagcgggaaagcgcggcggccgccgggattcgggcgccgcggcagctgctccggctgccggccggcggccccgcgctcgcccgccccgcttccgcccgctgtcctgctgcacgaacccttccaactctcctt

SEQ ID NO: 9873 - DNA, 478 bp, Homo sapiens
tgaactgagggggtccggcggccgctgaggaggggagcgcgcgggaggaggggcgaggagcccggaggcgggcgcggctggcagcttagagggcccgggcggaggcctgagagcagggctggaggggcggaggaccggggagacccgcccgcggcgttcccggccggttctgagcaggcgccgtggcagcgcccgcgccccctgcccgccctccgccgtcgccaggacgcaggctcgcgtcagggctggcggtagggcccgcagctgtcggcctggcgtcttcaccccgcgcagtcggcctcgcctagccttctcgcgcctgactggccggaccctgcccctggcggaggtaactgcccgcggattccttaccccgcgatcctggcctcctcgtaagctccccggacccgggcgtcctcggtctcccctcatctactcttctgtcgggcaggtccgcgaccttccgcctcccgggccg

SEQ ID NO: 9874 - DNA, 201 bp, Homo sapiens
ttaatgtgttttaacacgttttaatgtgttgtgacaggaaaagagccggctaacggtattacggaagtactagttggcacagaggctcggtgcaattaccgttctgcaccgtaaaacgggtttaggaagttcctaggagatactagcggtgccagaaccgagaaagtgacgacacagacaacttatggactccgcgtacgg

SEQ ID NO: 9875 - DNA, 208 bp, Homo sapiens
gctcccgccgccgcccgggccgcgcccgccccgcctctaggcgccggccccggagcccggtccgcgagcagcggcggctgccggagggacgatgagctgcgcggggcgggcgggccctgcccggctcgccgcgctcgccctgctgacctgcagcctgtggccggcacgggcagacaacgcgagccaggagtactacacggcgctcatc

SEQ ID NO: 9876 - DNA, 210 bp, Homo sapiens
ccagctccccgggaagcagcaggcgcacggccgtctggatctccctggaggtgatggtcgagcgcttgttgtaatgcgccaggcgggaagcctcgccggcgatgcgctcgaagatgtcgttgacaaaggaattcatgatccccatggctttagaggagatgccggtgtcggggtggacctgtttcagcaccttgtacacgtatacggagt

SEQ ID NO: 9877 - DNA, 229 bp, Homo sapiens
ttttaagacagggtctccctctcgcccgggctggagtgcggtggtacgatctccggtcgctgcaacgtccgctcctgggttcaagtgattctcctgcctcggcctcctgagtagctgagattacaagcgtcagccaccatagcccggctaatttttgtattttttagtagagacagggtttcaccatattggtcatcctggtctcaaacccctgagctcaggtgagcca

SEQ ID NO: 9878 - DNA, 209 bp, Homo sapiens
ctctctctctcttctaacattcccctccagaaaaagaggaacgcaacgaagggagttcagctactatgttggagctgtggaccggccctgtgaggcccacgcgggagcgcggaggctcctgggtctcagggcgccggcagatggcctgcagcgcaccgcccggcccccgcgctggccacgtccgccagcgtcatctctctcccccgcct

SEQ ID NO: 9879 - DNA, 255 bp, Homo sapiens
gttattccgcagcgagtcaaagccactccctaccctgggcccgctacgcgacctctgccggcctccgccccacgcggttttagtacggcgccaaggccccgcccacaaatcggccccgtcccctcgtgtccgggcccgccgctcatcagacgccgttccggcgcagcgagttgagggcacgcctaccctccctccgggtccccagtcctcaaggtcccagcacaatgccccaggaggaagactccaggccccttc

SEQ ID NO: 9880 - DNA, 297 bp, Homo sapiens
ctcaccattgtcaacgccgccgccgcgtcccccctactccactcctcttccctcaggagaactcccagccccggctccctccgctccggcgctccgtcacgtgacctcgggccgcccctcacacgtgaccgctcccttcctctcccccacccccgcacccgtccctctcccagcctcctgccccgccctgctggccgccaggcactccggggagaggccgcttggaggcggggcctcaggctccacccttcggagggtggagaggggcgggcaaattacgtcgagtgggcggggcct

SEQ ID NO: 9881 - DNA, 232 bp, Homo sapiens
tagtcgctccaagccccttcctcctcctcctcctcctcttccgccccggaaagttagcgagcctccggcagcggccgcattttcgccccggtggcctgacgacggcggcggccgcccctgcgcgtcctcccgcctccctccggctcagcccagacgccgcagtggcggcaactgcggcagcggtggcggctctgactccgcgcactccgccccctctttccagccagctcac

SEQ ID NO: 9882 - DNA, 247 bp, Homo sapiens
cccttcgcggcctcccctcccccgcgccttccctcccacatcgggctctcggggcagcagcggggaggggagaccggcgggggagggaggacagggaggcgaaggaattggggtggggggtgcgtgtgtggtggagggggtgggacgacacaggtgtcctgaggggaggagccgggaggaaggcgaggaggccgggccaagtgggggtgcggaggtcggggagacaggaacgcggctgcgggcgcgg

SEQ ID NO: 9883 - DNA, 292 bp, Homo sapiens
gggcgctgaggctgaagctggggccgggggtgggactgggggcgctggggctgggccgggggtgggactgaggctgcgggcgttcaactgggattgagtcgagggcagcggtggggctgggccgggggagcaggggtcgcgccgggcagcgtcgcgtgctggagcggaggcgggtgcggccggggcaggtcgcgggaggaggaagcgcctggggagcaggagctgggccgggcgggtccgcgccccgcacccgcgggggtgaatcggagtcgccgcagggggctcggggggc

SEQ ID NO: 9884 - DNA, 201 bp, Homo sapiens
tgctgtggggctcagggctgcatggggcagcaaggcgcgggggcccgggccgcagagcctccggggaggatccggaggggaggcagtggctcggcggctcgggttacagcccggtgtggtgggggggagggagacggggcgggagagggggcaaggctgcccctgaagggaaccagctggcccgtccgttggccgagctgc

SEQ ID NO: 9885 - DNA, 201 bp, Homo sapiens
acccttgctcctcacactcactccccactctcgccccagaaacacgcccctcacaccgggcccgccggatccccacacttcccactcgcgccagaaacgcgcgcaccctcgtggcccctccctgccgcgcgtaaacacgcccggtccgcgcacgccctcccggcctggccccgcacactcgcgccagaaacacgcgtggcc

SEQ ID NO: 9886 - DNA, 201 bp, Homo sapiens
cgacgcccgagccagcggagcccggagccgctgggcctcccgtcccctccgcccgtccgccctccccgccccctcggctccctccgccccgccgccccgcgccgctttaccataaaaggtgaggctcggggggagggggcgcgggattcccgccccgcggaagcggcccctacctgccccccaacctgcccggccgcgccc

SEQ ID NO: 9887 - DNA, 201 bp, Homo sapiens
gctttattaagcggtctcagctacaacggcgtgcatgccaattacgcctgcaggctaccgcccgcccccggctgccggaccacccagcgcgcctccccccgagtcccggacggggagaggaggagccaggggaggaggcgggaggaagggaaggatggggaggacaatgggggaagaagagggaggatggaggaagggggt

SEQ ID NO: 9888 - DNA, 201 bp, Homo sapiens
cactactccgctgtcggcggcgtctccttgggaagcagcagcaactggtggagctggagccgcagcagcctgagtcgccgcagcagcccctgccggagccgcagcaggaggaggaggaggcgggcgccggggtgggcgccggggcgggacacggagcggggccctgggacgaccccttggaaaagcctttggcggaaacgg

SEQ ID NO: 9889 - DNA, 201 bp, Homo sapiens
gggcggggtcggaggaaaaggggcggggcggcggggaaaatacaaattaaaatttaaaaatcagtcaaaggaaggatggaagccccgcggctcctccggcgcccagcggtgcttttgctttggtgtccggatcccagcccgcggcctgcctgcctgtcagtcccgtggacaccgcactgccgggcagcgccccggccgcac

SEQ ID NO: 9890 - DNA, 201 bp, Homo sapiens
cagcatgatgccgtcctcctggcagtggcagggggccgggcaggcggtgggccccgggccgggctggggggcgccgccggccctccgggaagcgcacagcgcggcgcaaagccatagcgcccggagccccggcgggctgggcatctcggcggtcgggctactggggcacctggcggccgggcgcggacgcacggcgcgatg

SEQ ID NO: 9891 - DNA, 241 bp, Homo sapiens
cgaagaaaggggcgcgggggcgcgggggcgcgggggcgcgtggggcgctgggcgccggaggcctggcaggatgcgcggtggggtcgccgccgtcgccgccgttgcgcgctcgctctctggccgggcgcgcgcctcgctccgcagtacttatagggcgccgcggtcccgcccctccataggccccgccccggccagctcacgccccgcccccggccccgcctcctgccgccagggcgcgcag

SEQ ID NO: 9892 - DNA, 201 bp, Homo sapiens
gccgctgccgccctgccgctcggtgtgcgagcgcgccaaggccggctgcgcgccgctcatgcgccagtacggcttcgcctggcccgaccgcatgcgctgcgaccggctgcccgagcaaggcaaccctgacacgctgtgcatggactacaaccgcaccgacctaaccaccgccgcgcccagcccgccgcgccgcctgccgcc

SEQ ID NO: 9893 - DNA, 201 bp, Homo sapiens
agaggaagtgagaggtgtccaattcggtcatgcagaacgcagctgggctgctcgaaacgaaacaaagcggctactccgaaggaggtgttgtccctgggccggtccaggttgagtcagagcagacgccactcccacgtcaaaaataccaggccactgtcccagggagctgggctattcactgaggtcattttcaccccactt

SEQ ID NO: 9894 - DNA, 201 bp, Homo sapiens
gcacccacccccctgacggtcccgccccgcagggagggcctgtgccggctgctggagctcacccgcagacccatcttcatcaccttcgagggccagaggcgcgaccccgcgcacccggcgctccgcctgctgcgccagcaccgccacctggtgaccttgctgctctggaggcccggctccgtggtgcggagcaggcgcggg

SEQ ID NO: 9895 - DNA, 201 bp, Homo sapiens
ggtccctggagtcactggctcagggcgggcccgcgggatggggcgggcggcccggggcgcagccggccaggccgttgctatggcaacgcggtggaaaaacgggcctctgggtatctcgctgccggccggctggtaaccccccagcggagggaccgggccgagcccgcggacccctccgagtgtctcctggggcccagccgt

SEQ ID NO: 9896 - DNA, 201 bp, Homo sapiens
ccaaaagtagcttctttgaatttcatttgggttttgtagggctcccccgaggcccgagaactgggagaagggaaagagctcatcggtttgtttgaaggccggcgggcggtgcaggcagcttttcccagactctcccagctccggcttttcacgcataccagaagagccgcttttttcctccagtgattgaaaccatctgga

SEQ ID NO: 9897 - DNA, 201 bp, Homo sapiens
ggtcttgctctagggctctgcattcccgagagctgctgtatgccggggattggcttccaagcctgcctgagcttctccagtctcccgggcatcgccatgcggtgggagggtgagccttcctctcctgctgaaattccggcggcttggcaaccggccggggggtcttggattcctcggggagacaccactgatgctttgtgg

SEQ ID NO: 9898 - DNA, 201 bp, Homo sapiens
gtgctttccgctgatccccagaggagacactggccagggctcttttttccgagacaaacttcattctggaaaggctgtcagaccgggcgcggtgactcacgcctgtaatcccagtactttgggaggatgaggtgggcggattgcctgagctcaggagttcgaaaccaccctgggcaacatgttgaaaccccgtctctacta

SEQ ID NO: 9899 - DNA, 201 bp, Homo sapiens
gcacactccggccgggtgcgggccggcggggcacagcggcctctacggcccgcctccgtcagtcattccccggtccctcctcccgctgctcgcgtgctccgggccggcccagcaccctccgagttacgtgcccgcgctccccggcggggaggagcgcagccgcgggggcgcgccccggtgactccgcccctcagctcccct

SEQ ID NO: 9900 - DNA, 201 bp, Homo sapiens
cccccgcgcaccgccgccgcgtactcaccctcacgggtggagcggggcggggcagcacggttccgcgcgcagctccgatccgctaggcgcaccgaccggcggcgcagcgctggcgcgacggctcgactcggccgggtccctgtcccgggcgcgggtccggcctgggagcgggcgagtccgcctgcaggggaggcggggacc

SEQ ID NO: 9901 - DNA, 201 bp, Homo sapiens
ggggcggagcggggaggggcggggcggagcggggaggggcggggcggagaaggatcgcagggctgagcggggcgccagcgccagtgcccggcactgccccgggctgggtcccctgcgttagaggaaggggagcccggggacggggcacggggcccgcgaggcacgggtgctctctcggggttccggaagcctccctccccg

SEQ ID NO: 9902 - DNA, 239 bp, Homo sapiens
gagaggaagggggaaggagacagaggaaccgagactggggtgagggagcggccgcgcgtggcccccggagaggcgcccatcacctgcgtggcgcccccccgcgccggagtgcggccctgctcccagcgccagtgcgccgcgcggctcgccggcctcgtaggattggctaccgcctcccattcatgtaacctgcgtgtgcgtgtgcgtgtgtgtgtgtgtctctctctcgctcgccctct

SEQ ID NO: 9903 - DNA, 201 bp, Homo sapiens
tcttctcgtgggtggtctccgtgagctccttggttagcctctctatctcagtcttataatggtccaccgtctgcaatacctcttctgcggccatagccccggtggatggaggcaggagggggttacggggtgggggagatggatgcgaagctggcggggaaagggagaaggaaatgggaagggatgggtggaaacggaaaa

SEQ ID NO: 9904 - DNA, 201 bp, Homo sapiens
ccacctgaaattgacaggcctgccctctatgataatagctgctactaactagtcctcctcacaccctttcactcaccggtctcagcactctgcacacctcgcggagaatccgctcctggttcttcacagagcacagcaccagggtgcagaccaccacatccacagagccatcagccacctggtgcatgttctccccggcag

SEQ ID NO: 9905 - DNA, 201 bp, Homo sapiens
aaaacagtagtctcatggaaaacaacagaaaaaaaccccactccagcctggtaaccaacggttggccgggggacgtgtccgcgctgctccccctccggccgccagggggcgcaggaagaagctttggaggtctgtcccgggaccgcgtactcgtccttctttcccgttagtcttttcttcacttccgttgagttccgcctc

SEQ ID NO: 9906 - DNA, 201 bp, Homo sapiens
gcctgacgaagccctccttgggggtcgatgcctctctccgggtgggaaggggcgctgtcggtgagggctatcctggcgccggcctgcgccgtccgaagtcgggggggaggggaggtctccgttcagcaggggtcacgcccgccccggacgggggccgcgcgggcgctcaggcgacgcatcttcgccggggcccgtgatcgc

SEQ ID NO: 9907 - DNA, 201 bp, Homo sapiens
tcttgagaagcaatagatttcgaccaatgtgcaccgttcccgcggcgccccgccgcgcccggaaccgctgcttacctggcgcccggcaaggaaggctgccggagggttcataggtgtttcctccgcccccggagaagcccggtgtgggcggcgtcacctcagaaacgccatcggcgcgcctgccccgagcggcgggggcga

SEQ ID NO: 9908 - DNA, 201 bp, Homo sapiens
cctgccatttgcatccaagatggactctccgctgccgccgctgctcctccggcttccttgtcatcatccctcacgccctgcagccctgcctcctgttcacgggttgccaagccgcggcctggccggtggtggcagtggcggagttagacaaagcccccgcctcccccgccccagagccccccaggcgccccaagtggcggg

SEQ ID NO: 9909 - DNA, 201 bp, Homo sapiens
ccctagggcggccgcctccactcccggctcccacccagcggggatccaccagggcgagggctgaagacctcgcgggacgccgcgcgccggggacagcgacgcacctaccttcccagccacctgggaggctgcaggtccgggccggagcccgaggctcaggggcgcgcggagcagtcctggttaaggcgcagggcgcggggt

SEQ ID NO: 9910 - DNA, 201 bp, Homo sapiens
ctttggggccgggcggggcggggcggggcaggggggccgggcgcggcctacgcgccccctcgagtgcgcggtgcgggacgggcgcggttgacgcgctcccgccggtgtctgtgcttctccgcaggccaggagggcatcctgcgctgccacccggacctggcgggcagcgagctgcagcggggcacgctcacggccgagtcg

SEQ ID NO: 9911 - DNA, 201 bp, Homo sapiens
cgggcttggacaggtcagcctgagagcatgcgaagtcggtccccgggcagacaacaagagacaccgccgggaagtgccaggaactccgcgcgttgcccgcggggtcctcctgtagccggggctgggccagaaggatggcaaagttgcgcggcgccgtccgggctggagccgcagccgaggagccgaagccttcccaggccg

SEQ ID NO: 9912 - DNA, 201 bp, Homo sapiens
gactcggagctacgcggggcgggggccggcaccgagggccgggaggcgcgaagggtacgcggcggcgggaagcggggcgacccgaaggcccacgggggccgggaggttgcggggcgcccgggatcccctcccgggtggtcaccgtgcggccggggcgcggaagccagaggtgcccagaggcgccgactccgccgaggttgc

SEQ ID NO: 9913 - DNA, 201 bp, Homo sapiens
cagccgaggcagaaatccgtcccgaggcgcgggcgccgggtccgggtcccaaggatgcgcgtcgggctccctcccgcggggacagccgagctccgccggcgctccaggtgttcccgcagtgcgtccgggcgcggacgcctctctgccctcggaggggaagcgggagggcccttggggtaacgccccgacctcgggcttcct

SEQ ID NO: 9914 - DNA, 201 bp, Homo sapiens
cacaggtgctcccgtcgtaggtctcgcacacccactcatggcactcacacaggggcccgaagaacatgcccggctcagtcacgtggcagatgcagacgccgcagtcgcagcggccccggccgtggcacagcgcggcccccgggggctgcccaggtgcgcggcagcgtcgctccgactcggcccgggacagcctgcaggcgg

SEQ ID NO: 9915 - DNA, 201 bp, Homo sapiens
agaccgctgcttggccactctacgcccctgagccccccacacagccagccccgtgacctccgagccccgtgacctccgagccccgtgacctccaagccccggaagccgctgtaggcagcggcccagccaggccccgccccctccaccggagctccacgcgtcaattccagccaggccccgcccccggccgccccaggcgtg

SEQ ID NO: 9916 - DNA, 201 bp, Homo sapiens
gcagcagctcaccgaggacggggactcgtaagtggcggaggcccggggctgggggtcgtcgggagggcgggacgcgcgcggcctgggggtgggaggcgccgggcctggagcccgagccgggggaccagcgatgcagccgggcgggcgccgcggcaccccggggctcctgcaccgccccgaacgctgcagggctgcagggcc

SEQ ID NO: 9917 - DNA, 201 bp, Homo sapiens
attctgcaggccgcacccccaactcgtatctcacccaggcccccgtctggcgccgatctgccccagctcaacctccggctccgcagactaggcactttccgggacgcggggcagaccctgcgctcgggtcccttcccgcagccgggctgtccggcctctgcgcgcgcacaacaggcggcacggcgcagcccccgggagcgc

SEQ ID NO: 9918 - DNA, 201 bp, Homo sapiens
aggatggcgatggcattggcgcggatcttcctcatggtgggcagacgggcgccccaggtgggggactgggccggcgtgctctcggggccggggcgggggcgctcgcagccccagctgtttgttttcgctcgcgcctagctgctcagtcctgcagagcagaaaaaggagagaggtgggggggcgggggggtgatagggagag

SEQ ID NO: 9919 - DNA, 201 bp, Homo sapiens
ccagccctttctgagggagctcagcggtgcgggctcgcctcctcccagcccagcttccctgacatcgcccctttcctggggacgttgcctgcgggcccgcgcgtccccgcccccgactcccctgcaggttcctccgggggccggggcaggaccgcactcaccgaggacccgggcgctggagccagcagcagcggcacgagc

SEQ ID NO: 9920 - DNA, 201 bp, Homo sapiens
caagccgaagcctttgaaggaggctcggtgccatctcggtgtgatcgcgtcccggcgacgctgggtagggtgcagggagccagctcggccgcggctcagcgggaggggagggggccggtcccgaacccgggcgcccgggccgcgggtgattcactgggaacgccaggttcgcgcgcctagaccggcgggcgacgcccagcg

SEQ ID NO: 9921 - DNA, 201 bp, Homo sapiens
gggggcccggcccagggcgggaaatgggtggggaggggcggggcctgggttggagactggacggaggagccgggcggagatgcaactggaggaagagggcgggacggggcggagaaggtttcccgcatcggcggagggagagggactaggagggggctgcggcgggggaggagagggggcttccggcccagagactgaggc

SEQ ID NO: 9922 - DNA, 201 bp, Homo sapiens
gcgacccctgtccctcccctgggccgagcggcaggcgcgctcgcaccgcccccgccccctcgtcgcagtcgctgccgaccggctggctgggccttgcggcgtgaggaccccggcggcgccgcagtcccgcgagccatggcccagtccggcggggaggctcggcccgggcccaagacggcggtgcagatccgcgtcgccatc

SEQ ID NO: 9923 - DNA, 201 bp, Homo sapiens
ttcatgaatattccggggcgcgggagcccgagcgctgccggagggcgcttcgggggaggcggccgctgatgtaagcccggcgggtcgctgggctccgctcggttgcggcgggagccccgggacgggccggacgggccggggcagaggaggcgaggcgagctcgcgggtggccagccacaaagcccgggcggcgagacagac

SEQ ID NO: 9924 - DNA, 241 bp, Homo sapiens
tctcactcccacacactcacacccggccgctcctcgttccctcactcgcctgccgcgcgcgcgcgcgaccccgctcacacacagcgcgcgcgacgccggcggagaccgccccgctccctcagaccgaacgccgcccgcccgcttgctgaggagcggcgcgcgccccggccccgccctcctggcgccgcggcgcggcgggcggggggcggcggccggaggagctgggggccgggccagcgcg

SEQ ID NO: 9925 - DNA, 201 bp, Homo sapiens
tcctcgccgcctcccaggctcccagtgaggttcttcagctggccgcccaccatggtcttcaccatgaacgccatggtcttcgccggccggggcaccgggcgcctgctaccacgcgccaggcaccgggcacgtccgcgcctacttcagcactaggtttcgcggacagctcccgccgcgggcccgcgccccacgcttggcacc

SEQ ID NO: 9926 - DNA, 201 bp, Homo sapiens
gacccggcatgaggagcccggcacccttgctccccagcctcctggaagctcttccttggactggccggcgccgtcttcccgacatctgggggctgaggccggcatcccgggcctgcgtggaggggcgagcgccaaggctgcgagagtcgggtcccgatttgtaatcacttcttccaactttcatggagctccgtcccgcgc

SEQ ID NO: 9927 - DNA, 201 bp, Homo sapiens
gcgcccggcagagagcccccagccgctccggaccccgcgcagccccgcagagacgcgcgtgtcgcccgcacgggccggcacccgggtcgcccccgccggcgtgccaggaccccgcacagaagcgcccggacgcggacgcacgcagccgcggtcacgatccccgccgcccgcccggcccgtgcccggctctggccagcaggg

SEQ ID NO: 9928 - DNA, 201 bp, Homo sapiens
ccttcccggcttctcccccactcttcgcccccggggcccctccctgctgagcgggggctgccgggatttgggattgcggggctgccccgaccccgcagccgtccgcggtggaagccagcccgggcctggccctgagcgcgcggctggggcggccgctgtccatggtgctggcgcgggtggcgcgccggccggcggggtctg

SEQ ID NO: 9929 - DNA, 201 bp, Homo sapiens
ccgcccgcgcactggggccttcgaggtgtgatgtcacctgcccgcagaatcggcccccctcgcgccgcccccctcgcgcccccaccccagcctccctctcgccgctcccggggctaatatggcagcggcgccgccgccccacccccgcaaccgcacgacccggctggcagggccgccggcccggacccccgagactcacac

SEQ ID NO: 9930 - DNA, 201 bp, Homo sapiens
ccgcgggcgcggcccctggaacggaccctcccccgagccgcgcccgccgggccgcccctcccccgcccgcagaccccggcccggccccgccgccgcgcgcgcccctcctcgtcctggcctcccccttcccgcccccgggccccggcgcccccgcccggcccgagcgcgcggcctgccccgcccggctcaccatggcgcggc

SEQ ID NO: 9931 - DNA, 201 bp, Homo sapiens
ggccaggtctcccaggagtagttggggaacacccggcgattctggcggctgcttcctggtggcgcagggagcccgcgtgtttgcgagtgcgtgtgtgtgcgaagttctccgggtaagtgtgccagcgcgcgcctgggtgtgtgcaagggtgtgagcgtgcacacgtgggcacgggcgtgtgcgcgcgggggtgcccggttg

SEQ ID NO: 9932 - DNA, 201 bp, Homo sapiens
cctcgccttcatccgcctctctcaccgcgccgctccctcgtcctgccctgcgggctcaggcggaacccggaacggccgtcctcttcccccgccctccgccgccgcctcctcctcctccttctcggcttcctcctcagccccgggccggagcggggtgtcggcggcggccggttcgggcggcggcgcttggccatgtcgtgt

SEQ ID NO: 9933 - DNA, 201 bp, Homo sapiens
ccaagcccgctgggcgcccgcccctgcgcaccgcgcccgctctttccgtttgtgcgcttgggctccggcgcacgcactgcatctgtcgcccgcccctgccgtgtgtgtgcactgccggggcccgctcgcccacgcccgcgcgtgcgcccccactcccaccccgcatccgcgtgcacgacccactcgccgccgctgtgcgcg

SEQ ID NO: 9934 - DNA, 201 bp, Homo sapiens
tgccgaatgaagctgagcgtctcagtggaaccagggatctcaggggtgagcgaccgcgaggggagagcgacgaaaagggcggccggagctggaggggcgcggagttaaacaaaaaagggcggccggagctgcaggggcgccgagttaaacacgtcatttccagatggggggcttcaggcgagctgcttagctcccctgagg

SEQ ID NO: 9935 - DNA, 219 bp, Artificial Sequence
  Description of Artificial Sequence: Synthetic polynucleotide
tttagggagggggygggaggttttttttgtttagtttygagtyggtggtgtagygttygttttyggtygygggygtagattggyggtygttttygggttaygtggtgygygyggygggygygttygaggagtttgyggttgtttttggtttatagygtttygggygaggagagygggyggaygtygggggttgggtyggtgygggyggygaggtaggyg

SEQ ID NO: 9936 - DNA, 315 bp, Artificial Sequence
  Description of Artificial Sequence: Synthetic polynucleotide
ygagtttygagtttygtttygggggttttatttygttttttygygttygyggttygtttttttttattgagygtttagttttygtagttttttyggtygtygagygtygtgggyggggttttagggyggyggygtttygyggggagggtttttygtgttgggggygaggttattygaggtagtttttygttygtttttaatttygtttygttttyggagtttataaagggaggygattygyggttygttyggttggtattttttagtygtygttagtttygtygaggggagttagygtygtttttgaggggygtt

SEQ ID NO: 9937 - DNA, 201 bp, Artificial Sequence
  Description of Artificial Sequence: Synthetic polynucleotide
gtattyggtttagggttggagttggttgtagggttggttygyggygatttgggtagggtggyggttgttttttttttttttatttygtttygaggygtagygygyggtagagyggttyggtgttyggygggygggyggttygggygggtttgyggtygggatgaggayggygttttygttgtagagygttggggyggygyg

SEQ ID NO: 9938 - DNA, 201 bp, Artificial Sequence
  Description of Artificial Sequence: Synthetic polynucleotide
aataatagggaygttgagaataataattaygattagtayggygaaggygtttttttygygggttagaggtyggygttttagtttygtagaattyggygttyggttagygttttttggtagtttttttyggtagttttaggtttttaagatttgtaggttygtttygaagtttttygttygttttttayggtygtttygagt

SEQ ID NO: 9939 - DNA, 201 bp, Artificial Sequence
  Description of Artificial Sequence: Synthetic polynucleotide
ygygtatttttttygttygtttgttygyggttttttttttgttttyggagygttagtygttttatttygtgatyggtttttygttttgtttygtaggattygttyggaygggattaygtygtygtygtygtygtygtygttyggagtygygtttygggttttgtttgagtygagtygygygyggggtygtagttatygtyg

SEQ ID NO: 9940 - DNA, 201 bp, Artificial Sequence
  Description of Artificial Sequence: Synthetic polynucleotide
atagagttgttttttttttttttgggttttgtaagttttygaattggaggyggaaatgggggaagggttggaagttgtgtgtgaaaaataattattgtaaygggttttttttaggagtttagttyggtttgtattttggtggaattgttgttatyggtttatagygtttaggtygagtyggtagggttgggygggaggttt

SEQ ID NO: 9941 - DNA, 201 bp, Artificial Sequence
  Description of Artificial Sequence: Synthetic polynucleotide
tagttatygyggyggttgyggyggyggtattttygtttttattttygttygggattgttttttattgttttttygtttttttyggatagtgagttygyggyggggygggggaaggagtygtttttattttttttaagtttatttttaaagagatttttttttttttttttygtygtttggygyggagtygggaygatgttg

SEQ ID NO: 9942 - DNA, 201 bp, Artificial Sequence
  Description of Artificial Sequence: Synthetic polynucleotide
aataagtagttygggagatattttttttttttttagttttygtttttttattttgttattttttagttygtgattagttgttttttttttttttygygggygtttagggttgagtaaatatttygggtygttygtttygttattagttggtttygatyggygtatygttggygattttttaggtaattyggygttatgaga

SEQ ID NO: 9943 - DNA, 201 bp, Artificial Sequence
  Description of Artificial Sequence: Synthetic polynucleotide
ygtggtttggtygaggagttaatgggtygggaggggygygygggggaggagtttaggtgtagagtgtygattggttagttygtttttyggtatgtagatayggtgggagttaygtgttaggggtygggaygattttttgttggaggttaaygyggggyggggaagggggygygagygtttygtttggttgaagygggggga

SEQ ID NO: 9944 - DNA, 201 bp, Artificial Sequence
  Description of Artificial Sequence: Synthetic polynucleotide
ggaggaggggaggygttgttygaygygtttttttaagttttygygttttttttyggyggyggttgttygggggyggtggttyggygtygtttttttygatygttttttttagggtttttttttygtgtygyggttaggttgttyggtyggyggygygttggaaatatgaagagaygttgtagttgyggtggyggtggyggt

SEQ ID NO: 9945 - DNA, 201 bp, Artificial Sequence
  Description of Artificial Sequence: Synthetic polynucleotide
tttatttgggaygygatttataggggygttgtttygttttgygggaagaggaggyggyggtygtygtgattggggygttyggttttattygtttatagaaygtttttaatattaggggtttgaaagygaaaatttygggaaggtattttttgatygtagattatattttgtagttgatttatatygtttaggaggtagtga

SEQ ID NO: 9946 - DNA, 201 bp, Artificial Sequence
  Description of Artificial Sequence: Synthetic polynucleotide
ataaaagagtagttttygyggagygggtttagagtttgttyggattgttygatggttttyggttttttgagygtygyggttgtygggttttgtgttygygyggggggygggaaggayggtyggggtttttagtgygygtttygyggagyggygygyggygttygaattggaaagttgtygtyggygtttgtygtttttayg

SEQ ID NO: 9947 - DNA, 243 bp, Artificial Sequence
  Description of Artificial Sequence: Synthetic polynucleotide
gttaaggttyggatygttattttagtaatagttttagttatgtgatyggtaatggyggygttgaygagaggtaggtgagttyggygttttttatatttatygygygtttttygggtttygttygtattttttaygygtttttygttttttyggygtttttttttttattttttttttttgygygyggtttygggtttttygtttygtgttyggtygattatttttttagtattttttagtttt

SEQ ID NO: 9948 - DNA, 201 bp, Artificial Sequence
  Description of Artificial Sequence: Synthetic polynucleotide
tagttygtttatttttttttggagaagttygaygtagygttygttattttttttttttygtgtgtagtttttyggttttaaagtatttatttgtttaattygatttttattttataagatygtaatyggttattatttttgtttttygttaggatatygaggttagttgtgttattgtttygaggggttgtaggtgtagag

SEQ ID NO: 9949 - DNA, 201 bp, Artificial Sequence
  Description of Artificial Sequence: Synthetic polynucleotide
tygtagtatyggttattttattgttaagggtgttttttgtatttgttgygatattttgggtygtttttagtttagtttgtatagtatttttggttaygttygtagtatyggtgattttattgtagatagtgtttttggtatyggttagtayggttttggtygtgtttatatttatttggayggtttttttggttatattyg

SEQ ID NO: 9950 - DNA, 201 bp, Artificial Sequence
  Description of Artificial Sequence: Synthetic polynucleotide
tttygggtygaggggaattygygatyggatttgtgggggagaatgaggatgaaaaygtggagtttttattgtttagggtttgatyggtygatagggatttygaygggggatyggggatttggggagggggtygtattttttygtttttttygyggtttttyggtttttgtttgtttttttgatygtttttaggggygyggc

SEQ ID NO: 9951 - DNA, 201 bp, Artificial Sequence
  Description of Artificial Sequence: Synthetic polynucleotide
agtyggggtagaaggaggagtttgaaggtttattatggggtggaggttgtttgttygygggttygtttttagagttyggggtttattaygttgttttatgygtttttgttggtttttgttaaatagttttttttttttgtgttttagttttttggttgtaaaaagggggtgtttatagagtttttttgaggagtygttata

SEQ ID NO: 9952 - DNA, 201 bp, Artificial Sequence
  Description of Artificial Sequence: Synthetic polynucleotide
ttggtttttatttggtttgygagaaattaaattttgggtataagttatgaagtygataagttygggagatatagtgttagaattataaggtgagattagtygttyggttaagttattttttygttagtaggtgaggttygtgaatagttaagttttttttggtayggyggaatygtagtggaygygtggaggggtttygta

SEQ ID NO: 9953 - DNA, 201 bp, Artificial Sequence
  Description of Artificial Sequence: Synthetic polynucleotide
aattttttatttattaaygtyggygtygttatgggtttagggggttgggtgaggtygtgagagtyggygaggaagtyggttttgygggttyggtygatttygggtttyggttttgggttgygagggattttagttttygtygtygtgtaaaatgtatataaggttygyggygtygtttttgygygtygtgaggatataggg

SEQ ID NO: 9954 - DNA, 201 bp, Artificial Sequence
  Description of Artificial Sequence: Synthetic polynucleotide
gatagaaggggagagtggttaggaaggaggggaggatggatatagggygtttgtagaattggtgggtagatggayggagggaygggtygtgtagtgtagtyggyggggttagggttaggtygagggygygaggtggtagtyggttyggggaggyggaggttgagygagyggtggtgtttgtggagttgtyggttgyggtgg

SEQ ID NO: 9955 - DNA, 201 bp, Artificial Sequence
  Description of Artificial Sequence: Synthetic polynucleotide
ggggttgggaygtttyggyggagtaggyggyggyggtggygagttggggagttttaggttyggygttgtyggaggggttygagtygagtygtttgygtttyggtygggtagygtygggttygtttttygyggggttaygttttgttaaattttgttgyggyggttagygtagygggttygtaagygggygggaggggygtc

SEQ ID NO: 9956 - DNA, 201 bp, Artificial Sequence
  Description of Artificial Sequence: Synthetic polynucleotide
ttattggtgagtttggtagggtatagagaggatggtattattagttggagggggataggttttaattatgagtttaggatgtagagagyggtagggattatyggagttttttyggttttggtgttttggttttttttgtatayggtttttatatgaygtttagtaagtyggattttaatttgtttatttattttttatttt

SEQ ID NO: 9957 - DNA, 201 bp, Artificial Sequence
  Description of Artificial Sequence: Synthetic polynucleotide
gaggttaaggygggtagattattygaggttaggagttagagattagttyggttaatagggygaaatttygttttttttaaaaatataaaaattagttaggygtggyggygttygttygtaattttaggtatttggtaggtygaggtaggagaattaygggagttyggggtagggaggttgtagtgattygagattayggta

SEQ ID NO: 9958 - DNA, 233 bp, Artificial Sequence
  Description of Artificial Sequence: Synthetic polynucleotide
ggagagagagagagagagagagagayggagtyggagagggagggagygagagaaagygagagtttttygttatttttygtygtttttagaatttatygggygtttgttyggyggttttagaaggtygggttgygttgtgggttgyggggagtyggaggttttttgattggttttttgaygttttyggattaattgtgttgttgtataggygtggtttttataggtygagtgtt

SEQ ID NO: 9959 - DNA, 201 bp, Artificial Sequence
  Description of Artificial Sequence: Synthetic polynucleotide
ygyggtatagttatttttttygtygaggyggtattttaattttgtgtttttttaggatygygggttgtaggtattyggttttygaagyggaggtyggagtygygyggagaagttaayggtaatgaygttttttgtygatttttaggaggggataggttgagggtttggaygaggtyggaagygtttttattgtagtttygg

SEQ ID NO: 9960 - DNA, 201 bp, Artificial Sequence
  Description of Artificial Sequence: Synthetic polynucleotide
ttttgagaagtagtagtagttggtttgtttgttgtttygttttygtgtatggttgtttagygttggttttagtgtttagygttttygtttagtattttttyggttttttttttttatttttygttttygagttgyggggagttttagtttgggatttttgttttatgtttttgggtttttgttttggttggttygtttttt

SEQ ID NO: 9961 - DNA, 201 bp, Artificial Sequence
  Description of Artificial Sequence: Synthetic polynucleotide
ggtttygtygggtyggtygttgygagtttygtttyggtttyggttatygtyggggaggaygaygaygaygtggtgggggaygtgttggtattgttggtygygtttttggtttyggggtygygggygtygygygtggaggtygtttttttttgtygtttgygtygggaygygttggtggagyggygygygttgtaygagttt

SEQ ID NO: 9962 - DNA, 201 bp, Artificial Sequence
  Description of Artificial Sequence: Synthetic polynucleotide
ttttttttagtatattttatgtaaaagttagtaaaaatattttttttataagtttaaataaatgtttaaaaatatgtaagttaggaagttatttttaataygtatattttttttatatgtagaagtaatggtgagaattttttatattttttgtagtagattttyggtttyggggttgggtttttagtaagtttatttttg

SEQ ID NO: 9963 - DNA, 201 bp, Artificial Sequence
  Description of Artificial Sequence: Synthetic polynucleotide
ttyggtygtattttygttttatttttayggtagggtttttagtgtttgattaagtttaagttygagtttttyggygygttgtttatyggttgttttttygygttttttttttttttttattygtatygtttygttttttattttttttttgttttttttttattatttagtttatatttttttygttttttttttygtttt

SEQ ID NO: 9964 - DNA, 201 bp, Artificial Sequence
  Description of Artificial Sequence: Synthetic polynucleotide
gggattgggaaygggatagggaygygttttaatttatttagyggtggagttggggggyggygyggttaygtgggatggygggtagtttaggggattygggygayggggtttggygggtagggttgttttagtygtttttataaagtyggttttttygatttttttttttttttgtagtttttttttttttttttgggggtt

SEQ ID NO: 9965 - DNA, 201 bp, Artificial Sequence
  Description of Artificial Sequence: Synthetic polynucleotide
tagttatttatttgttttttaygttttatttattagygygtayggtttyggtaattttattyggagyggggygtygtygtygtttttgtygtagttyggtygggtygttgggygtaggggatttygygtygtygttgtygttgtygtygtygtygtygtygttgtygttgttgtatttttyggygagygttgttgtttttt

SEQ ID NO: 9966 - DNA, 201 bp, Artificial Sequence
  Description of Artificial Sequence: Synthetic polynucleotide
tttgggggaygtyggaygttatgttgtggaaaataatygataatgttaagtaygaagaggattgygaggtgagttggggtttyggggtgtagtttygtttygtygaggatagttygggaggtaggggttattggatygaggtyggggaygagggtataggagttttggtttttyggtgggaygggatttattttttyggat

SEQ ID NO: 9967 - DNA, 201 bp, Artificial Sequence
  Description of Artificial Sequence: Synthetic polynucleotide
gggagggaagaaggaggyggygagygggaagaggaagaagaygtaggtagygttaggygagtttaggggygtygggagygyggagttygggttayggattygygggagtttattgygttttygggttttggagggttgtttttgttygtaggttygggygttttygttaggaggygatagygttatgtttttttaggtttt

SEQ ID NO: 9968 - DNA, 201 bp, Artificial Sequence
  Description of Artificial Sequence: Synthetic polynucleotide
tttagtyggtttttygtatgattggattatatgagggatttaagttyggttagttgttatttttyggattatatgygtgtttagggatygttttttaattyggtatggggatttggaaaaaaagattagggtagagggattggggtygggttyggtgatygtttttyggtaattaaaggatagtaaaggayggtttttgat

SEQ ID NO: 9969 - DNA, 410 bp, Artificial Sequence
  Description of Artificial Sequence: Synthetic polynucleotide
ygtatgygtttaggtyggttygtaggtttttttygttttagtyggtagttagttygttygygttggggttatygygagtyggttygtagyggggttatygygattttyggygtagatatagaggtygtttttagtttygtygtttygtggtttygttttygttgtaygtttttttatttttyggatttygtagggtygyggyggatayggttygatyggggaygtgaaygygtagaattatattttttagygtttygttygygttggaattatatttttyggggggttyggyggtgtattygtyggggtygyggattggaggttttyggttggaaaagttttttggyggttaattggggaggattggaagaaatttaggatggagttagtattgttggtttaatatgttt

SEQ ID NO: 9970 - DNA, 201 bp, Artificial Sequence
  Description of Artificial Sequence: Synthetic polynucleotide
aagtttttgggaaagattygttttattttyggaagttagagggygttagttgtygggttgaaaaggggtgtggggaggggaagtagttttatttygggttyggagtttgtaggagagagaagtggggagtaagaagtgaattttaggggtttatagggttttygtagatgtttaggtyggttaggaatgtatttttggttt

SEQ ID NO: 9971 - DNA, 201 bp, Artificial Sequence
  Description of Artificial Sequence: Synthetic polynucleotide
tttattaygtyggggygattygttgtttgagygagtaygtttygtatttttttygygaygygygtatgttgttyggygtttyggtyggggygttgtattgygtyggygtttttttyggtatttygttgggtgygtttggggaygttgttygggttttaygtgyggagtgggtgttttttaggtyggggagygggggatttt

SEQ ID NO: 9972 - DNA, 201 bp, Artificial Sequence
  Description of Artificial Sequence: Synthetic polynucleotide
atttttggattaggaaatagtgtgtgtgtataygagagagagggatagagagaggggggatatgtggagtgtattggaattattataatttttatgaaggyggtatyggagttattggtattatttgtgtaatttttttttatgtttgaygtygttttaaaataaagagtgagttgagtaaattaattyggtagggtatat

SEQ ID NO: 9973 - DNA, 201 bp, Artificial Sequence
  Description of Artificial Sequence: Synthetic polynucleotide
gyggyggggttgggtttggggttggaygttgatttaggatttygtttttgttygttttgygtygygtttttttygggtyggttttgatygagtagttttaygygggttyggggttygtttattygataggagyggggggttgtagtttaygagtttaygagttygtagygaygtattyggagtgtaatttygtagagttac

SEQ ID NO: 9974 - DNA, 201 bp, Artificial Sequence
  Description of Artificial Sequence: Synthetic polynucleotide
gtatygygyggyggygtttggygggtattgttgttygyggagggayggtgggggggttttagtagttggygggggtggagggggygggagagggagtttgygtygggttgagtttggaggtgyggggygggttyggggagygtttttggggttttttttgttatagtyggggyggttggaatttttttttttttttttttt

SEQ ID NO: 9975 - DNA, 201 bp, Artificial Sequence
  Description of Artificial Sequence: Synthetic polynucleotide
gtygygtygtygggtttyggggatatttttygtygtttttttygattygygtygtyggggtygtygggtygtagggtayggggtyggygyggggggggagyggagaggggttggggagttttaggggttyggggttygttygygggggatgggtagggatttygggtygygtggggtgygggggtygttygtattgaggac

SEQ ID NO: 9976 - DNA, 201 bp, Artificial Sequence
  Description of Artificial Sequence: Synthetic polynucleotide
tttttttttaaaaagagttttttagagttgtygaaattttygyggggtgaaagttaaatttttggagtygttgtgtagtygggtagaggatayggyggygygagtyggaaagataagtgtttaggygaatgggaaaggaaagattttaatttttgtttttattgttagttgaatgtttataaaaattaaagggaatgyggg

SEQ ID NO: 9977 - DNA, 201 bp, Artificial Sequence
  Description of Artificial Sequence: Synthetic polynucleotide
atggtttattgygtaagtttatatttagttttaggaagygagttttaygtygttttagttttgtatttatagtygttaagyggtttyggaagtygaatgtyggataggttaaagatagygtygttgtttyggtattgtygttagagggygyggagtygtygtgttggtttgtattttttttgttaygttagtygaayggtt

SEQ ID NO: 9978 - DNA, 201 bp, Artificial Sequence
  Description of Artificial Sequence: Synthetic polynucleotide
gyggttyggaaatgagygtttttyggggatagggggttttgyggggyggygatagttggatttttagygygtataaagtttgygggaggatttattgtagyggtygttttttttygtttagygagggygggygtaggggygggggatgtygaagggttaggtttgtttaggtygygttattttygttttagaygtttagtt

SEQ ID NO: 9979 - DNA, 201 bp, Artificial Sequence
  Description of Artificial Sequence: Synthetic polynucleotide
tttygagggtygygygggtttaggygtttayggtttygtagygtygygtttttygygagaaygtagagattygggttygttttgagtygtygattgygggygggagtyggygggtaaggygygyggtyggtagtyggagyggygygtaaygtagttgagtgaggtygtyggtggaggtayggagtagtaggygttyggggc

SEQ ID NO: 9980 - DNA, 294 bp, Artificial Sequence
  Description of Artificial Sequence: Synthetic polynucleotide
tttygygaaggtttyggttyggtygggyggggtggggyggtttyggttttattaattagyggtttgttgtggatgtyggyggaggagatgttatttagggygggaaaaggggygyggaagaggggyggggygggttayggygygtagggtttttttttttygtttyggatttaattaattgggtttgagtttttgtyggggagggggygtygggyggggtygyggttgggyggggygggggatygggatyggyggygggggttgyggttttgtagtggaagtatgggyggygag

SEQ ID NO: 9981 - DNA, 201 bp, Artificial Sequence
  Description of Artificial Sequence: Synthetic polynucleotide
gtgtggaggtttaygtagygtttttggttggaayggggaagtttgtatttagttttgggagtgggtttgggagagggaggaggagtygtygggagtttggygggagggyggtgttttygtttgggtttttttttgttgttttagtttyggtagtttttatagtagtttygaagggtgagaatttgtttttttatggatttg

SEQ ID NO: 9982 - DNA, 201 bp, Artificial Sequence
  Description of Artificial Sequence: Synthetic polynucleotide
ttttttagtttttagagtaagttaattagggataygttttygtggtttagttyggaaataatgtttggtgggaatttgtaattttggttgtyggaattttyggggaggattaaygtyggygtatygtgyggtyggggyggggygtygtttaaatttaggttttgtgatagygattgtggyggtttggaaagygtgggtttc

SEQ ID NO: 9983 - DNA, 201 bp, Artificial Sequence
  Description of Artificial Sequence: Synthetic polynucleotide
aattatttttaaaataattttttyggggggtgagaggtaattataattttagygagtggagggygygggggatgggygtygggygggygggggyggggagygyggygygggtttttaggtggygagyggaggtgttttygtygyggggggaggggygggggygtaygyggtyggyggyggggggaggyggygygyggggga

SEQ ID NO: 9984 - DNA, 201 bp, Artificial Sequence
  Description of Artificial Sequence: Synthetic polynucleotide
aggttttygtatttatygygtgggtttttgttttggttttatttgttttygatatttttygttttygygatgtttaatttyggttygagaaggttggtygygatttygttyggtattygtygtttygatattattattygttttttygatttttttyggygtygttgtttattygtttttygtttygtttatyggggtygt

SEQ ID NO: 9985 - DNA, 201 bp, Artificial Sequence
  Description of Artificial Sequence: Synthetic polynucleotide
ggggaygttygtttttttttygggtagttttttttatttaggygggatttgggttttygttggatttagggtygttttttygtaggyggggtyggttyggygygtattttgtttyggatgttttggygtayggtttygygtttygtttttattttggygtatttggttttgygtttttttttygtttggygtagygttttt

SEQ ID NO: 9986 - DNA, 201 bp, Artificial Sequence
  Description of Artificial Sequence: Synthetic polynucleotide
tattttttttttgygygtttgtttttttttygtttgtaggatttygtttttggttygttttttttttttttgttgggtaggttttttyggagtttattttyggyggyggyggyggtagtygyggtygyggtygttggatttygagaggygyggggaatttttttattttttgttttggttttatttgtttttttttttttt

SEQ ID NO: 9987 - DNA, 201 bp, Artificial Sequence
  Description of Artificial Sequence: Synthetic polynucleotide
tagggaattataaaagayggtyggyggygagtaggttggggtgayggggatttygtggataaygggtttgaggaygtttagggttttagttttttttaggygtttttygtyggggtaaygtagagtagttgtygtttttttygygttttagtagatggtggtgttagttyggtttygtgttyggtygtygttgygttygyg

SEQ ID NO: 9988 - DNA, 201 bp, Artificial Sequence
  Description of Artificial Sequence: Synthetic polynucleotide
ttagataggtatggttaaggtagtttgtgatttattttataaaattagagatttttgttttttgtggagtaagatttttyggaggttagagtaggatgatygttaatttttttttttagagtyggtttagtttgataaagtaggggttatttyggagtttggaggggaagagagtttaggtataaggttatttttgggaaa

SEQ ID NO: 9989 - DNA, 201 bp, Artificial Sequence
  Description of Artificial Sequence: Synthetic polynucleotide
gggygygyggygttttttatttaygttyggtyggggygyggygyggyggygggtattyggayggtyggyggaggtaggtyggttygggtattagtttgggyggttygygggtyggggyggyggyggggtggyggtggyggyggtagtagygyggagtyggtgggygtagtygygygttaggtyggyggtyggggtttgggg

SEQ ID NO: 9990 - DNA, 201 bp, Artificial Sequence
  Description of Artificial Sequence: Synthetic polynucleotide
tttgttatagataagttttygaagtygttttggtgtaggttatttggttttttagtttttggtgtgtggttagtgtttggtgtttttggaaagttattttygggtagtttttgatagtgygattyggygtttaagtagtttgggattttgygyggatttgatttttttagatygtaggtagtttgggaggaggttyggtyg

SEQ ID NO: 9991 - DNA, 463 bp, Artificial Sequence
  Description of Artificial Sequence: Synthetic polynucleotide
aygtttgtgttgtatttggygttggtygayggygyggtgttgttgtttaygtygttttttgtggtttttttgattyggtaggtttggtygttgggttaggygggttgtaaggyggtgtattaygtgtgygygtttagtatgtaygttagygtgttgtttatyggtttgtttagtttgtagygttgtttygtagttattygtttttttttggygtttyggttgygtagttyggttttggttygtygtttgttgttggyggtttggttggtygttttgttgttygtygtttyggtygtygtttatygttatttgtggagggatygygtatgttagttgtgttattygtygtyggtttaygtygtygtttatttgagtttggagattttgatygttttygtgttttttttygggttgatgttyggttgttatagygtgaygttggtayggttgyggggygttygtt

SEQ ID NO: 9992 - DNA, 201 bp, Artificial Sequence
  Description of Artificial Sequence: Synthetic polynucleotide
atygggagtgtttagygattttaggttagttygggggaaagaagyggtygtygtygtygaggttttttggtttygggatttyggygttgtttttttttttygtatttgttggggtgggttggagtygtaatygaatttyggtygyggygtttgtaaagtttttttttygaagtttygyggttttagtttattggygttttt

SEQ ID NO: 9993 - DNA, 201 bp, Artificial Sequence
  Description of Artificial Sequence: Synthetic polynucleotide
gttttatagtttyggttagaatttggtgggggaygyggggggggggtgtttgayggggagggggtatagttttttygggttaatttttatatttttgtttygtttaggyggggggtgagtyggggtgagtagtyggttttaagttggtyggttttttggaaagggagggttagtaggagaattgtagatttttttagtttt

SEQ ID NO: 9994 - DNA, 201 bp, Artificial Sequence
  Description of Artificial Sequence: Synthetic polynucleotide
gggatygttttaagtagttygttaataaygtggyggtggtgaaggagttygayggygttaagttygtggtgttgaggaagaagtttyggttttyggagttygagttygtatttttyggtttttygggggtagyggtttagtygtygaaatttatttygayggttttgtygyggagygtttttgtttygggagtttygtttt

SEQ ID NO: 9995 - DNA, 201 bp, Artificial Sequence
  Description of Artificial Sequence: Synthetic polynucleotide
gtttttagaggtttagttttgttttttattatatatagttattattttattygtttttggggttyggttgtttttttyggtgttttttaaatttttttttygatttgggtgttaagtttatttatttttyggygtygttttyggtygaatagttttttgtttttttttygtttgggtyggagtttttygtagtttttttyg

SEQ ID NO: 9996 - DNA, 201 bp, Artificial Sequence
  Description of Artificial Sequence: Synthetic polynucleotide
ggttyggtttggggttgggttggggagygyggyggttgyggttggggtayggggyggtygggtgagttggtyggygttygttttttttatttagtgagtayggtagatatyggagaygyggggtttattttttyggttttttttygattaagaaaygttaatttygttttttattggttgygtygygygttatgtygatta

SEQ ID NO: 9997 - DNA, 201 bp, Artificial Sequence
  Description of Artificial Sequence: Synthetic polynucleotide
atygagtttaaaagtygtyggyggtatattttagyggttttttttttttygggttgggattygtttttgtaagaaaygttatgtttttttttttagatatygtttygggagttttagatgtaaaattagaggttttttatttggtattattgatttttgtgttaataaaatgttagtttttaagggaaaatttaaaaaaag

SEQ ID NO: 9998 - DNA, 201 bp, Artificial Sequence
  Description of Artificial Sequence: Synthetic polynucleotide
gtygygygggayggggtagggatttygagaatatyggggatttgygggtyggtggtttygggtaggttatttttgaygygggtgygaggtttttygygggygtgtayggttgggtyggagtygygtygggggtygggataygtttggggttagygttggygtygtygttygggtggggtgggtygggttygggtttagttt

SEQ ID NO: 9999 - DNA, 201 bp, Artificial Sequence
  Description of Artificial Sequence: Synthetic polynucleotide
ggyggygygyggtagagttgggtttttygttaggtggtygggggtgtgtttttagggtattttattygttattttygygtttttagtttyggyggtygygyggatttygtttttgttgatttyggygtaygttttygygtygygygtagtttttygtttttygtygatttygtygygtygtyggtagttttttttagtttt

SEQ ID NO: 10000 - DNA, 201 bp, Artificial Sequence
  Description of Artificial Sequence: Synthetic polynucleotide
ttttttttttgttgttttaaaatatttttygaygttagtaaaatataatgygtttyggtygtygtaaatagtygggagggagagtatatattyggygyggygyggtygtyggttyggtttttatttttttttygtttttagaaaatgttataaaagygggtagggygyggggagggyggttgygygttyggyggtyggggt

SEQ ID NO: 10001 - DNA, 201 bp, Artificial Sequence
  Description of Artificial Sequence: Synthetic polynucleotide
agttaggaaatgyggggtttggtggggtgaggagtayggggttttttttttattttygyggggattttgttatyggtttagtgtggaggttttatygtttygttyggattygtggggtttygatagtgtggtttttgygaggattttttttatttttttygttttggggttgttgygggagggygttygggtagtattagg

SEQ ID NO: 10002 - DNA, 258 bp, Artificial Sequence
  Description of Artificial Sequence: Synthetic polynucleotide
gyggyggtagyggyggtttggtttttttagagggttagagttagggatatgygggygttygggatttygygtttygygyggttyggygtttgagygttttygtttttygtttyggagttgtyggyggtatgattygataygtyggggygttygygygyggggattttayggggtaagttygggyggtygtttttttttttttygygatttttayggttygygttttggtygttttattttattttttgttttagagag

SEQ ID NO: 10003 - DNA, 201 bp, Artificial Sequence
  Description of Artificial Sequence: Synthetic polynucleotide
tygayggttaaggaaagtttattagtttttygtatygtgggygaygggttaagattyggttttaaayggttagatttagtttttagtyggttgtygttttygttttaygtaggygygtttyggggttttttttttttttatygygygttygyggggttygaygggggyggagygattttyggaaggggygtggygatyggg

SEQ ID NO: 10004 - DNA, 201 bp, Artificial Sequence
  Description of Artificial Sequence: Synthetic polynucleotide
agggggayggttagaygggatgtyggaagttaagggaygtagaggtyggygggtggyggygatggagaggatagattyggtttttagaggaggtygtgagygyggggtttgygtyggtyggaggagggattyggggggttgtaatatggttgttygggygtygttttttttttgttaagttagggttttggggagttgttg

SEQ ID NO: 10005 - DNA, 201 bp, Artificial Sequence
  Description of Artificial Sequence: Synthetic polynucleotide
ttygtygygtttyggtygggatggatttataygttygatgagtttygygtyggyggttgygagygtygagtttttttttgttgyggttttagtygtttttygygygttyggtttygyggattaggatttttgggtttttyggttgagggygyggtygtttyggagaggtygagyggggaygggttygagatggygygggga

SEQ ID NO: 10006 - DNA, 201 bp, Artificial Sequence
  Description of Artificial Sequence: Synthetic polynucleotide
tagttaggatagtataaaatttttttatygtttattttttgtaaaaaatygtggttttyggyggattttggagataggaggtgtaaagggygtttataygyggttygggttygyggtygagagttggggggatttggagyggggtygggtygtaagaagattttgattttgtttyggygttggggygygtgttaagggttc

SEQ ID NO: 10007 - DNA, 201 bp, Artificial Sequence
  Description of Artificial Sequence: Synthetic polynucleotide
tgtygggttygaygtgtatagtttagygtttttttttattagttattgtttaggtttttygattttgtattygtyggaatgagagaaagtagtttttygtygtttagttttygggtagttgtttyggtygggttttgygttggtgagaaagttttatttagaggyggtygygygtaattgtaggyggygttttaggttygg

SEQ ID NO: 10008 - DNA, 201 bp, Artificial Sequence
  Description of Artificial Sequence: Synthetic polynucleotide
ygygggtaaggaaagygygtaggttttgtagatttttttatttyggttttttggttyggttygttttttygtttyggggyggyggttttttgttttgtagygagygttygtaggagggaygttaggatttyggaygttatttttgaggtttttttgtatttgggtttttgatagtygggaataggtaggaggtggggygag

SEQ ID NO: 10009 - DNA, 201 bp, Artificial Sequence
  Description of Artificial Sequence: Synthetic polynucleotide
gtgggaggtyggtagygygggygtygygttttyggaggagttygygttttttgaggagygygygtgttyggaagagttygyggygtygtttttygaatygygygtttggtttgaggatttygygtttttygaggagttyggggagttygygttygtattttyggggttyggggyggtgtayggggagtyggatttggtgtt

SEQ ID NO: 10010 - DNA, 201 bp, Artificial Sequence
  Description of Artificial Sequence: Synthetic polynucleotide
agtgyggatttyggtygygtgyggttttgatygygtygttttatttttggyggggttaygtayggaygttatggttggygtygyggagtygggygatgygygyggattttttyggggttttgattgtttttgagttttttttgyggggggygtgygyggttygtttttygyggygttaygyggttttttttyggtygggga

SEQ ID NO: 10011 - DNA, 201 bp, Artificial Sequence
  Description of Artificial Sequence: Synthetic polynucleotide
gtttgyggagggtgggattttatagtttgtttatttgtttaggttgagatttygtgttttagttttggatgttttaygggtttttygtttygggtagyggygtaygggaggagaagattttyggtttgtagttagatttttttttgagattttttttagtttaggtttagagttttgggatttttttygattttttttagt

SEQ ID NO: 10012 - DNA, 201 bp, Artificial Sequence
  Description of Artificial Sequence: Synthetic polynucleotide
tyggttttttttttygyggggggtttygtttygygtttygttttttygggttgtagtyggtagtttaygtttagggagggtggagggaggaggagaggygyggagaggagggaggggagaggggagggaggaaggygagagaaagggagttgtttttatttyggattttttagagtttgtttggagygygtatttagyggt

SEQ ID NO: 10013 - DNA, 203 bp, Artificial Sequence
  Description of Artificial Sequence: Synthetic polynucleotide
gygagyggttayggggtggggagtaaggggygygygggyggtaggtatggaayggaygyggygtatttygtttatygygggaygttyggayggyggtyggygygygyggttygtttygagttygagagggyggggagataatgtttgttyggyggggtagtttaggtygtaygttttygttygyggataygggtygtttttat

SEQ ID NO: 10014 - DNA, 201 bp, Artificial Sequence
  Description of Artificial Sequence: Synthetic polynucleotide
tygtggagtygygttaggttayggggtttyggttagaygggagygttagtttttttttttgtttygatgtttttaaatttaggtttagttttttttttttygattygatgatatttttgggttttagaatgttgttgggggygggagatyggagaagaagtaggtgtayggggaggtgggtgttttgttttttgygaggag

SEQ ID NO: 10015 - DNA, 201 bp, Artificial Sequence
  Description of Artificial Sequence: Synthetic polynucleotide
tttgggggggygggtyggatttgaaggttataggtttttttttgygtttattttttttgtaatttttatagtttttttygtygatttttttatgttttttygtttttttgttyggygttttttttyggtygygggttaattggttgtgatagttggagttttgggtagttgagyggtgttattgtaaattaggtaggygtt

SEQ ID NO: 10016 - DNA, 201 bp, Artificial Sequence
  Description of Artificial Sequence: Synthetic polynucleotide
ttggaagggygggggyggtgatagyggtaggggygggattyggaggyggggygtttgtttaygtygtttagtagyggagggaggygyggttttagtttygygtttaggagtygtataggygttyggggtygtagtaggagtttttttagggygtttagygttgtatttaygagtygygygtygttttygtttagtgygttt

SEQ ID NO: 10017 - DNA, 201 bp, Artificial Sequence
  Description of Artificial Sequence: Synthetic polynucleotide
tygtatttygttygtttgttttttatyggttaggttttgtygggtygtygyggtttyggygttttattttttttygggttagyggggggttgggagggggygaggaggaagggggtttttttttttttttttyggagggggtygtagyggyggtttyggtttttttttttttttatattttttttygtttttttttatttg

SEQ ID NO: 10018 - DNA, 201 bp, Artificial Sequence
  Description of Artificial Sequence: Synthetic polynucleotide
tyggagggagggggtaaaggaagaaaaagaaagygygttyggaaagtyggtttgggttttgttaattattttgaaggtaaagtatttgtatttttttygtygaggttggttggyggygtygygttggaggggaggaggttygggaggaggaggagaaagagtagygggaggattygggttgggaggggagygtagggttgg

SEQ ID NO: 10019 - DNA, 201 bp, Artificial Sequence
  Description of Artificial Sequence: Synthetic polynucleotide
tygtyggggagtygtaaagtttgayggaagaggttgyggttttygygttttagtygtyggttttygagtygtagtygggygtttttttgaygtagtygygygttttgtyggttttattygtttygygtayggatggtttttaagtggttygtygttaggtyggtaaatygtttttttagttgttgtygggygtygttygyg

SEQ ID NO: 10020 - DNA, 201 bp, Artificial Sequence
  Description of Artificial Sequence: Synthetic polynucleotide
gyggygggaygttatttgygatygggattatgaggagttgttagattygtggggtyggtaaygagagtagtygyggtatttgttgagaggaaagagggagyggttyggygyggttggggygyggtagaggtttgttygattttyggttatgttattgttttgygtgygyggtgagtgygyggattgaggyggggaggyggg

SEQ ID NO: 10021 - DNA, 201 bp, Artificial Sequence
  Description of Artificial Sequence: Synthetic polynucleotide
gygttagatttttttattatatttttttattttaggygattygttttggtttygggtgtttttagtttgygygggtygtttttagttttyggtggatattygtttttagttygtygttttttgttyggttttgygttttttggaatttttgggtttttagttttygtygtttttagaattgygtttgygtaataatggtta

SEQ ID NO: 10022 - DNA, 201 bp, Artificial Sequence
  Description of Artificial Sequence: Synthetic polynucleotide
aattattagagaatttttttaaaaatatagattygatgaggagtggttttttygttttttttttgtgtygagaagggatttyggtygttaataataaagaygtttttygttttttttttttygtyggttygggttygtttttttygygttgyggttttyggtttagygtttttttttygagtygggttgyggygtttttaa

SEQ ID NO: 10023 - DNA, 201 bp, Artificial Sequence
  Description of Artificial Sequence: Synthetic polynucleotide
ggagggtygyggagaygtaggygtttygggtygttygygttgtttttgtttgtttygtgygggagtyggggtttttggttttttggttttttggtttttgyggttygggygaatttagagygtattygtaygtyggtttyggtyggtttttagygttygggttttaygggtygygtttttaygyggygttttttagagatt

SEQ ID NO: 10024 - DNA, 523 bp, Artificial Sequence
  Description of Artificial Sequence: Synthetic polynucleotide
ttgygttaagttttagaattatttagtttygtgtttgtygttyggggttyggtttygtttyggtyggygtttatttggyggtgtygttttyggaagattayggygaaggtttygtgttttaygagattttttttgttgtattygaagttatttattatttttatggtygygttttyggggtatatagyggaygggygggyggygtagtgyggygtaggtattagtatygyggtttygygggttyggagygygttagygtgyggygggtttggggtagtygtagtttygggttygggyggatttttatgtygagagatyggagyggaaattggggaagttgtygygyggagttagggttagygaggttyggttyggtttttgtygtttatggttyggtttgtygtyggtygttggttgtttggygaagyggtttyggygttgtygggttaggggtgtygttatygttattgtgygygtttagagtygtataygygttttgaggtagtgaggggttyggtatttt

SEQ ID NO: 10025 - DNA, 201 bp, Artificial Sequence
  Description of Artificial Sequence: Synthetic polynucleotide
yggttygtattttttygtygttagttttagttttaaattyggyggtttagygggygtattatggtattggagtagygyggggagygygttyggagtttygyggttygttgygtttygttygggatttygttgygtygygygtttttttygyggttygyggggtygtttttgtatttttattttttttttygtttgtygtyg

SEQ ID NO: 10026 - DNA, 201 bp, Artificial Sequence
  Description of Artificial Sequence: Synthetic polynucleotide
gttttygtttaagtgtggtttttttgggtttatattttattaggttagtaaggagggggatagyggggggyggggtaggtgttgggatttygggtaggtgyggggaaggtagggggyggggggggaaggggttgggygatgtaggtgttgggggtygggatagttgygggggtaggtaggtatygggaaggygggagggyg

SEQ ID NO: 10027 - DNA, 201 bp, Artificial Sequence
  Description of Artificial Sequence: Synthetic polynucleotide
ygtagattttgggtttyggttttgttatttagggggattttttttaaygatgggatyggtgttyggagtggagtatggggagtgygttttygggagtyggygttggtyggatatgtgataattgtgggtygttggaggttygtttgygttgggatagggtttggattttaygtgygtygtttgtgtttygttagatygggg

SEQ ID NO: 10028 - DNA, 201 bp, Artificial Sequence
  Description of Artificial Sequence: Synthetic polynucleotide
gggtyggtttygyggtygatttggggtatygygtyggggtgaggtttggygaggaggygaaggttgtaggygtgaggtgaaggtygtaggtyggtygggtygattttygttatgtaaatatyggtgagggggggggagggaygggggataagatggyggyggttyggygtttgttgtaggggaygatagagggggttgtyg

SEQ ID NO: 10029 - DNA, 201 bp, Artificial Sequence
  Description of Artificial Sequence: Synthetic polynucleotide
ttttygygtttttttygygttttatatttatygttyggyggagggggtttagttygtagtygtygtygttatygtygygtttyggtttyggtgtaggtagyggtygtygtygtygagatagttgygygggygagtatttttaygtagtaagttygtttttttttygtttgtgygygygtgtgtgtttttygttygtyggyg

SEQ ID NO: 10030 - DNA, 201 bp, Artificial Sequence
  Description of Artificial Sequence: Synthetic polynucleotide
gygggggttttttaygtggyggaggtttttyggtttgggggttaygggttyggaggaatttgtttggaagttttttattayggtagagttttttggagttygtttygtgttygataaggggagttttagatttgatttttttagtagtttygyggggyggggtygagaaggggygggygggyggaggaygttggygggaga

SEQ ID NO: 10031 - DNA, 201 bp, Artificial Sequence
  Description of Artificial Sequence: Synthetic polynucleotide
aatgtgattatagttaatatatgatttttttagygttttagttagtgttttttttgatttttgttttttggagaggaggatggaagggaggggttyggtaygttgttggtattttgttgtgttttgtagttttttttygggatatttgggtttatatagttttttagtttatataattggtgtagattttttgtgtggaga

SEQ ID NO: 10032 - DNA, 301 bp, Artificial Sequence
  Description of Artificial Sequence: Synthetic polynucleotide
tttttttttaatttttggyggygggyggttggggaagtagttttgtggtttttyggygggtgaggtygagatagagattaatttttaggyggygttttggygttgagttygygttgaataagattttttygtagttttgygtttygygtygggtgaaggggygtgtttttgtaggygttyggggttyggtttggagttggyggtyggtaygtygtttttggygttttttgttaattaagagaaatayggttaaatgagtgygttgggatagaaatttatagttaattaaggttttattygt

SEQ ID NO: 10033 - DNA, 223 bp, Artificial Sequence
  Description of Artificial Sequence: Synthetic polynucleotide
gygggggyggyggyggtygtgagtttygatgaggttygagygttttyggtygygyggtagygttttyggttygatggagatttygtygtgggatttagttygtaaygattygttgtygtttaygttgatttyggtygtgtttttttaygtgaagtttggttttatygtygtttatatygtgttttaygygttgtttttygtgtttatttaygtgtagttttgg

SEQ ID NO: 10034 - DNA, 720 bp, Artificial Sequence
  Description of Artificial Sequence: Synthetic polynucleotide
gatagtygtgttttattttygttttgtgttttttttttyggatagtgttttttttagggtttatttaggagggtgtagyggtggttttyggggyggtggtygtggtgggggtgttagttgtaggggtgttttyggtgggtgggagttggtggtttttygttggtgttatgggattygtatgttygttttgygtttttyggtttttgagtttataggtygggattttgtttgttagtygygtgygttgtygtttaatttttgtaggygtagagygygyggyggyggtgatagagaattttgtttggttgtttaaatatagttttttgtagaaggattttgygttyggggaaggggaggaatttttttttttttgggygttygtttttttygttatggttyggtttttatattygtttatatttggtygtagyggggygttyggggggaggggttgaggtygygtttttygtygttttttgggygygggttaggyggggaggaggggggygtttyggtygtgtgtttaggattgttttttagyggttattygggttttagttttttaggtttggttttgataggygggyggagtagttagtgygagatagggaggtyggtgygggtgygggaatttgattygttygggaggygggggyggggygggggygtagygygyggggaggggtyggygttygttttttttttttatttatttagttg

SEQ ID NO: 10035 - DNA, 1683 bp, Artificial Sequence
  Description of Artificial Sequence: Synthetic polynucleotide
tagtggtagtgttgagtttaggaataygygyggagttygyggygattttygyggtygtttagttttygyggyggatttyggygygtaggagttattgggtygtaagggygtyggggagygggaggggygttgggggyggtaaggggttttagattttaggttaygaattgtttttttttttttygggtaagagtttygttttttttaattgatagaaatttattggggtaggggggygagtggggagagaggtygtttagggttygttattggttgygtttttttyggttttggtttgggaagyggttttgggtttttygggygagtagtttgggygtyggygttttttgygaggaagatygyggggtgayggtyggtattygttyggttgggtygygttgtygtttygatttatttttttttygygttygygtttttttttttttttttattaggagttygggattyggagagggygygggaggtaggtataygggttygattttattttagygtttatyggggaygygggygggyggygaygggaygyggygggggygyggggygggygyggttatggagtagtagyggyggyggyggyggyggyggyggtaatattagygatygygggyggaygagygggygggtagggtygtygggtttagyggatygaattgtatagtttagtaaaagygttttygtttttygygygtygttttttgygagtttaaatttattaatattttttaaygttttaatttattttttgaagaaaagtaaaaaaaaaaaaaaaaaaaaaaaaaaaagtaaaaaaagaaaaagtattgatyggagagayggggatatatatatatatatatatatatatatatatataaaattttttttggtttttgttaaaattagtagggttygtygygygtttgtgtgttagtgtgtgygagtgtgtgtgygtgygggygtgtgtgtgtgaatgtgattattttaggatttttygggtttyggagaygttatttttttttttgatatttttttttataaatyggtggygyggyggaggyggtagagtygggygggaagygyggggtyggtyggggygttygtygttygtygtygttttygygygttygggggtttyggygtttttygagttagggyggttagttygyggttygtygtttgatagatgtttatygttatggagttgtygtagtagtatttttgggggttygggygagygaygggagtygggatttgagygagygtyggggttagyggagtyggagtygtygggatatgggtgagtaygygyggygattttggttygggagttygggygtttagttttttttygygtygygggttttygtattttyggaatygggggygaygtgtgtgttttgtatgtaaaagtttaygtygttttgttgggtttttgattttgtattyggygggaagggggagatygggtygagggggygggatgtyggttygggygaggttgtaggagatgggygygatttyggygggtyggygggtgggyggygatgttggtttaattggagtggttygttggtggyggygatggtggaagttttgggttggagggttgggagtttattgagtttygtttaatttgatttatttttttttygtttttygttttttgtattttttttyggt

SEQ ID NO: 10036 - DNA, 233 bp, Artificial Sequence
  Description of Artificial Sequence: Synthetic polynucleotide
tttygttygggtygttyggttyggttgtgttttgttyggttagggygggygggttygtttttttttyggtyggygttttttttttggtttttttttttttygygtygttygttttygtttttttygttttttyggygtyggygtagttttygtgaattygggygtattatttygggtgtttyggtttggggatygttgtygtttyggtygttgtttttttaatttttttgttt

SEQ ID NO: 10037 - DNA, 213 bp, Artificial Sequence
  Description of Artificial Sequence: Synthetic polynucleotide
gattgygygtgygtagagtaygtyggygyggtttygggattttygygataattgtattgagataaagtgtggtaattygagttggttggtgatttattttyggygaggggttygygtgtgggttaygtygtygtttttatygggaaagyggggattagtggggggggtttagttgtagggtagtgggaggatgttgtttgttttgggggaagg

SEQ ID NO: 10038 - DNA, 236 bp, Artificial Sequence
  Description of Artificial Sequence: Synthetic polynucleotide
ggtagygtygtttgygtygygtttagtaygaagagttygttttagtttaggygtagtagygttatttggtyggttatyggtagttyggggaagaagggygygtggygygtttattttayggtgttgaagagtagtygygtygttagttygtataygttgtygatgtttagtatygygttygtygygtygttttttgygtygaagygttyggtygtygtagggtagggtttagygyg

SEQ ID NO: 10039 - DNA, 233 bp, Artificial Sequence
  Description of Artificial Sequence: Synthetic polynucleotide
gagggtggggttttaaaygttatttaattagygaygttgggttgggaattgtttaattaggtaygtagtttgagyggagaggayggttttygggatgtggygggatttgttygtttttttgtttttggttgtygttggaatttygggtttygtttttattgttttgtgttttttgtttttagaggtttagtttttggttttgtgatttgtaggtattgggaatttatagttaa

SEQ ID NO: 10040 - DNA, 737 bp, Artificial Sequence
  Description of Artificial Sequence: Synthetic polynucleotide
aatgaygtygtaaataatagtattaattattatygttygtagttttygygtatagaggttttaggttttyggttttaygtggatygatttygttyggtagygyggggttattttatygygagtttttttygtagttyggttygggttatttygattygttaggtttaatttaataattataatatyggaaaaggaagtaaaggtygaagtttattygyggttttgaggtttgtgggaaaygtagtttaataaygaaagagttttgaagtttaagyggagttygttggtygtaggggtygtattaygttttagattttggagttttygggtgygtagatttttgttattagtagaggttgtygttgygygttttttaggygyggaagaggyggttggtggtttttgayggtaaggtgaagtygaggtagtaatygggaatttaggttgggaggatagaatggggaataggaagttggggygagggtggttttgggggaggtggggggtygyggaattttaggtggtttttgttttatttttggaaagaatyggaagttygggtyggggagggtgaagggagtygyggattyggttgtttagtygaggaggaaattyggattttaggttgagggaggtygaagaaggaattggagggtygggttgggaaggtttgaagygggtatagtttttaggttggggagggtygaggggagaattyggagtttgagtygggygag

SEQ ID NO: 10041 - DNA, 308 bp, Artificial Sequence
  Description of Artificial Sequence: Synthetic polynucleotide
tttataggtygagtttaygagtttttygaggggtgagyggttygggttttttggygttttggtyggttagttaagygttggattatattttttagaggtayggygttyggagygttggattatattttttagaggtatygttttyggagygtagttttattttygttagtttgygagatttggaggtttygygtggggagagggtygygtttgtggaggagtttggtttygtatttgttgggttggygaattygaaattgggtttggaattygggagttagattttggattttgaattgtatttttgt

SEQ ID NO: 10042 - DNA, 1100 bp, Artificial Sequence
  Description of Artificial Sequence: Synthetic polynucleotide
ttggttttaygtagygtttgtagattgtgagttygtagggtagygttatyggtttatgtagtagtygtyggtagygygggtagtygagtaggtygyggggygygyggggtttyggggtyggttttttttygtygggygtttygggttygtygttygggtttttygyggatagyggtyggtygygtaggtttayggygygtattaggtygttygttagtttttttagttttttyggtygtagygtttygagtygygyggygtygyggaaygygtttagggtttyggggaggyggtyggygygggttagygygttttttagttttaggtataggtygyggttyggttgygttagttyggttagtatggagygaaagagttyggttgttatttygtagtygttygygyggaaggtttygtygtttttttttaagygttgggygatyggtttygygyggtygtagttaggatattggggyggyggyggyggygggatyggttyggggtttattatygyggggttgygaygaygygggttyggagygaaggygyggagtagggaggatgygttgttgttgggaattggtyggygggagygyggttttagttttygttagtagttaygygygtttgggggyggygygttgygagyggttgagatygygggygggggygggygtttggtttgggtagygtttttagygyggtgtgggyggygagtttygtagggttgtaatygtttyggggtgggggtygggataggtatygygggygtaatttgagtttttgtttaygygtagyggttttttagtttygtyggtttaggtaatttaggtygttgyggtaaygtagtgatygygttttaggttygygttttttgygatgttttttttattygtttgagggtttttgygygattgygygygygttttttgtttgtygttttttygtagaggtgtyggggttttgggagtaggtggttttggtygygggttgttggygygtyggtatygyggtatttgtttttttttagaggtttggtygtttttataatttgtggtttygtttaagtaagaatttaggaaaagttattaaaygtatta

SEQ ID NO: 10043 - DNA, 214 bp, Artificial Sequence
  Description of Artificial Sequence: Synthetic polynucleotide
ggygagagtaaaaaaaaaaaaaaaaaaaaaaaaaaaaattttaattgtaaatattatttggaggtgggygagggygyggygtgygygyggyggygggtggygggyggygygggygtttttgyggggattttyggttttttagygygttttagtggaygttttgtttttygttggtttttygtgttygttataatttgtaatatattattttttt

SEQ ID NO: 10044 - DNA, 582 bp, Artificial Sequence
  Description of Artificial Sequence: Synthetic polynucleotide
ttttttygygtgygtttygtatttgtygggggttygtattygttttygtyggggttttagggggtaygayggtygtggttyggygtttttgggaggggagygggatattttygaaggyggygygttggaggyggggagyggtyggggygtayggagagggyggggagttygygggagggggaggagggggaggagggggaggaggygygaggtgggggggagygyggygggyggtagggagggagygggagggaggtaagaaagtagtagaaagtgaggttggtaggyggyggtaaaggagtyggygygyggyggyggtaggaagtttgtgttygagaatagtagaaataagagttagggagggatygyggtygyggyggyggyggygagagygaaagaggaaattgtagaggaggaagttgygtygtagttygagtygttyggtattttygtygtttttgygttygygtygygttttyggygttttttttttagygygttttyggtygttttttygygtygygttygtyggttatggttygggagaayggygagagtagttttttttggaaaaagtaagtt

SEQ ID NO: 10045 - DNA, 203 bp, Artificial Sequence
  Description of Artificial Sequence: Synthetic polynucleotide
ggygatattygygttagttttygggayggttgggttygggttggtygtygattttygattttttattagatgtttggtagagttyggygygttyggagttygygttttttagagggaaggggtygygygtygtygyggyggttttgaggttgayggtygggaggtgaaaggtyggagtgyggggttaggaygttttttggagg

SEQ ID NO: 10046 - DNA, 823 bp, Artificial Sequence
  Description of Artificial Sequence: Synthetic polynucleotide
ygagttattygtatttttttttaggagttatagttaggttagaagagtgyggagggayggggttygggaagagtagggaatttttagagttygtagttaaygyggaggtgggygagygggygtgygygtatttatttgtyggygygagggagtgtygggggggaagggagtggtttttaaaagggggaggggagaaggtagggggyggggagaagtyggttttttaggattyggttgyggyggygagggaggaggaagaagyggaggaggyggttttygygttygtagggtygtgttatttgttygttygttygttygttygttygttygttgygtygygttgtygatygttagtatgttgtygagagtgggttgtttygygttgtygttgtygtygtygtygttgttgtygttgttgttgttgttattgggygygagtggyggyggyggyggggygygygyggaggtgttgtttygttgttygttttgtatattygagygtttggtygtttgygggttttygtyggttgygtygttygtygyggtggtygtagtggtyggaggygttygtatgttatgygyggagttygttygggagtygggttgyggttgttgttyggtgtgygttyggttggagggygaggygtgyggygtttatatttygygttgyggttaggggttgygttgttatttttattygggtttygagttgtttttgtaggygttggttatgggygagggtatttgtgagaagygtygggaygtygagtatggygttagttyggagtaggttgtaggtaaygyggtttggaataagtagttg

SEQ ID NO: 10047 - DNA, 293 bp, Artificial Sequence
  Description of Artificial Sequence: Synthetic polynucleotide
tygygyggtttttataatgtagggatttttttgagtggtggtygttttygttttagttttyggttattygtagttttatatygggttattggtttattatygagatagttagygagtttaggyggtttttgtagygttgggagaggaatgtgygygaaattaattagagygaaattagtyggaggagtyggtygaggtgtaggtgtaggygtagtttygtttagaattttttygttatatttaagggagttggaagttygggagggtgttgttttttttttttaggaatagag

SEQ ID NO: 10048 - DNA, 262 bp, Artificial Sequence
  Description of Artificial Sequence: Synthetic polynucleotide
yggaygygttgattggttttaggggaagygggaggygagaataatggtttttttttttygttaaaagggagyggttgtygggttyggggatagggaygygygtgtagggygtagagttgggtygagtygtygtyggygttaygygagtttygtagtygtygygttygggtaatgggtygggggtattgagggtygtyggggtygagygyggaggggggatygagttagtgtygtgttttygggtygygttaatatgtttygc

SEQ ID NO: 10049 - DNA, 240 bp, Artificial Sequence
  Description of Artificial Sequence: Synthetic polynucleotide
tygttgyggggtggagggattygygttttttagtttttygggttygggtygyggggatygtgygygygtttttttttygggtaaggtygggyggygggygygtygyggtttttggggttttygtttttttgttygttatygtttgygggagtttttggtttggaggggttyggggygygttggygattgygggttyggygataggggyggttggtggygggaggatagtgggaggaaggt

SEQ ID NO: 10050 - DNA, 1240 bp, Artificial Sequence
  Description of Artificial Sequence: Synthetic polynucleotide
agygggtyggggtygtyggttaagtttttgtttggggaygyggyggygygtyggagagtttygaggttgtttgtatygttttagagttttgggttgtgttygygtagggatygggtygggtagagtygggyggggtggagaggtaagyggagygygyggtggggttgaggggaggygtggggygagtgttygttgttygttttttagtttttttgtttttaygttttttygttygtagtygttygtagttyggyggtgtagttgtgttggattyggyggygtygtagttttttatygttttttgatgttattggggtgygggggttygggyggttyggtgygygggttaatagttgtayggttttygyggtttagyggygtagggyggggygygtttgatagttttttygtttttygygttagttgattggyggttygagyggtttyggagyggyggaggtttggyggagygttggagyggagtgggayggttagtttgggtttattttygtattttgtaggtttyggtttaygtaygttygtttggagtgygygttttatttttaggttaaattatygttttttttttttygygtattttttttttttagttttttttgtattttatttttatttygtgttatttttaaggaggtttagaatgagygtygggataaygttttttgggttttttgtttttaagyggttttygtttagtgggygaygttttgtgtgttttygyggtttttggtygtgtgtgtygtgygtttttgtttttggagatttgygygtatttgtatgttggggagggygggttygaggtttygagagttgtgtttagatttaatttttaattttaggggattttttttaggttaagygagggttttttttggygggtgtagtygtagagttttgaggttygattttattggtttygtygtttttygygtttattttatygtataatgtttatagtgaaggygaygggaaaagtagtagtttaaaggttttgaatttttttttttygttataygtayggaattttgagttttyggagtttyggggtygaggtyggttygggayggtgtttygagtagttttttattgttggggagtyggttttgtttttgtttgaaygttttgtaaygattaagtagatttyggygttagttygtygyggagaggtttaaataggtataaagtgygattttaagtggttattgtgygtaaaggygtc

SEQ ID NO: 10051 - DNA, 222 bp, Artificial Sequence
  Description of Artificial Sequence: Synthetic polynucleotide
gggygatttgttgttttygagtgtttttgggttgygttttttttttttatttgggyggtygygttaagygtagaggtygygggygtttyggggttagaggygttttyggttygggttatggygttyggygtygggggygygaggagyggtttatttagttagattttttatttygttatygttattagatattattatygttgtgtagtgtgggtttttatt

SEQ ID NO: 10052 - DNA, 714 bp, Artificial Sequence
  Description of Artificial Sequence: Synthetic polynucleotide
tttagggaaagtttttgaaagtataattyggaaaatttagtaatttttaaaaaaaaatggtttttygttgttataagttttttttttaagatttagggttygtagtagaatattttgatttaaaataaaaatattatgataaaaatattttaggaggtagtyggttttatttygtttaaagtyggatttygtttagtttygtgaaagygaaggagtattagygttttttgatttygtatagttttttyggtagagayggttygttttttttaagaatyggaagtyggatagygttaggaygttttattttttttatttgggatttagagaggtagyggttaaggatagggttttygtygaggttatygggtagygtttaggtttyggtttttgggaggggagtagygggggaggggtayggggaggggygagggyggggygygtttgggtttyggygttgggttttttttttgttygtttygggggatatttataggatttttgtagatttttgtygaggtaggatggaggtttgtagggatgtatygygggttygygattygggyggtyggaatatagttttttttggtyggagatyggttyggtygtgagtygtgtttgtgttaggttttttaygttgtgttttagggttttagtgttyggygygtygggggttgtatygttagttatttggggtaggaaaaaggaattata

SEQ ID NO: 10053 - DNA, 1216 bp, Artificial Sequence
  Description of Artificial Sequence: Synthetic polynucleotide
aagttttagaaaygttttyggaaagttttttttaatgggaagygatttygtygttgagttaagygttygaattttttttttygyggtagggatatyggttygggttaggtttgyggaggaygttttygggygygtatatatagttygaggaygygttttgtattttaagaygtagggtyggattttatttygaaatttggtttttatagttttaggtygaattgtgtttggtttttagttttygagttygagttttaygtygtaaagagatggggttttattgtgtttagttggttttttagtayggaygtgtatttttttttggtttgttttttgttaaaaatyggtagtgygtttygtttttttgtttagtygtagtttgtygttttttagataaaaagyggygatygyggttyggttattygagtttygtygygttgygtttttgttgggyggtttatagatggtgtttagtayggggtygygtygagggygggggygggaggtygygaagagggtygggygggaggggaggagayggyggagtagttaattygygygyggtttattagttgatygtttttgtttatattaggtgtaygtyggttgyggggagtataaagyggggygtatygygggygtyggtaaygagtyggtgaaygaggygaggttygtgygttygyggttgtaagygttygtttggyggggagaggggtygayggygttagttygggyggyggtatttttaggygtttggggygttttttttyggatttggtygttygttgtttygttttttgtattttattttttygatttttttttttagttttgtttttttttgttttggtttttgagagtygattgagtttagtttygtgtagtagyggttgtttgtgtygtygtttagttttyggttttggtgttttttygggggtgttttaaggagttagtgygygttgygggttgggaaggaggygtygtttagttagttttttttttttttttygttttttttttttttttgttgttgttgtygtygtygtygtygtgggtgtygggttygygygtattttaatatttttattagttgggtttyggggtaagtttttggtyggtygygtygyggtaggaggtgtgggaggtagygaggggaagtygaggtaaatttggtggygtgggagattttayggggtttggggaattttagggtaag

SEQ ID NO: 10054 - DNA, 207 bp, Artificial Sequence
  Description of Artificial Sequence: Synthetic polynucleotide
agtttttygtaaatttygtttttttygtttggtayggtttttttgtatygttgtgtttygtttttaggtttttgttygttaagaatgtttgtttygggggygygttygttggttaggaatttgtyggtagttttygggaatttttgaggatgyggaggtgggttygagagttgyggtttygatgtyggggtgggagttaggtaggtc

SEQ ID NO: 10055 - DNA, 253 bp, Artificial Sequence
  Description of Artificial Sequence: Synthetic polynucleotide
aygtttagggataaattgggagtygtgattgttaggtygygyggaggttgttttggtygtttttgyggttaggtgaaggygtagaggtagggaggtygggygagygtaggygggyggagagtagattaygyggaagaggtygagagagaaagyggggtattyggtygggggggttatttataagggaygttgggtaygaaggaggttggggygaagatgagtttaggggttgggttgagagygttgygtagtc

SEQ ID NO: 10056 - DNA, 209 bp, Artificial Sequence
  Description of Artificial Sequence: Synthetic polynucleotide
ggayggtttgtgagggatgygtygtttattgtttygygtygtttgatygttttygtttygattygyggtgygttatagtygggttygyggtygttttygtygygttgtygttyggtygtygygttygyggggtygygttyggtayggttatgtggatttttayggaggaggagaaatayggygtaggtaggtgaggtttaggtttggtc

SEQ ID NO: 10057 - DNA, 225 bp, Artificial Sequence
  Description of Artificial Sequence: Synthetic polynucleotide
ygttyggtttygtttygtaggttgtaggyggttttggagggggygttttygtygagygygygtttygygtygtygtttyggattttttttyggygtygygygggtaggttygattaggyggtygygggtttyggttttyggttagttttttagggttygyggttygtttygtttygygygttygtttygttgygtaattygatttaagttggaagtygatygtag

SEQ ID NO: 10058 - DNA, 1133 bp, Artificial Sequence
  Description of Artificial Sequence: Synthetic polynucleotide
aaggagagttggaagggttygtgtagtaggatagygggyggaagyggggygggygagygyggggtygtyggtyggtagtyggagtagttgtygyggygttygaatttyggyggtygtygygttttttygtttygyggagatygaygtaggygttygttttygaggtygaagggtattgggyggygagggttgyggtagttggygatttygggggygtttgygyggygygygttagaygaggttgtttyggyggttatttygygatttygygtygtygggatttgygygyggagaaygtyggttttggagggagtaygtttttttaaagtgtagaggagggttyggyggygygttttygyggaaattttttttattgtagttatttyggatgtygatttagtagtttgtttttygagaaaagagaggggatttgggtagaagggtttygtttgttttaaaagaaggtgtaaggattagaagataaygaaaygtttattttttgaagggtgggaaaaaaagaaaaagaaaaaggagttatttaygttggagatgttygttttagatttttttatttttttttttttygtttyggttttttttttygaggtttatttaatttgttagagaaggaggaggagtagaagatgggggtygaggaggaggggaagagaaagagaagtttgttaagaataaagtttttgtyggtaagygyggggatttygtagtggagggtattgyggagtttyggggagttatagygggggtttygggtttaaatgtttttgttyggagttygagtygatatatatatttagttygatttttttttgttttyggttygagttttttagtttggttygtyggttygtygttttgtaygttttygtyggttagttttgttaaagtaaagagttgygttttttgagttygttyggtygaggggaggggaygtttygagtttggtygygtgygaggtttygggygygttttggtttttyggttygagagygygtagttygggtttttttttygygttttgtttygtaggtgagyggttgygtttttttattgtttttttttttttygygtttygtyggygttgaaaagttatttatttgygtygtttttttttt

SEQ ID NO: 10059 - DNA, 478 bp, Artificial Sequence
  Description of Artificial Sequence: Synthetic polynucleotide
yggttygggaggyggaaggtygyggatttgttygatagaagagtagatgaggggagatygaggaygttygggttyggggagtttaygaggaggttaggatygyggggtaaggaattygygggtagttattttygttaggggtagggttyggttagttaggygygagaaggttaggygaggtygattgygyggggtgaagaygttaggtygatagttgygggttttatygttagttttgaygygagtttgygttttggygayggyggagggygggtagggggygygggygttgttayggygtttgtttagaatyggtygggaaygtygygggygggttttttyggtttttygtttttttagttttgtttttaggttttygttygggttttttaagttgttagtygygttygttttygggtttttygttttttttttygygygtttttttttttagyggtygtyggatttttttagttta

SEQ ID NO: 10060 - DNA, 201 bp, Artificial Sequence
  Description of Artificial Sequence: Synthetic polynucleotide
tygtaygyggagtttataagttgtttgtgtygttattttttyggttttggtatygttagtattttttaggaattttttaaattygttttayggtgtagaayggtaattgtatygagtttttgtgttaattagtattttygtaatatygttagtyggttttttttttgttataatatattaaaaygtgttaaaatatattaa

SEQ ID NO: 10061 - DNA, 208 bp, Artificial Sequence
  Description of Artificial Sequence: Synthetic polynucleotide
gatgagygtygtgtagtatttttggttygygttgtttgttygtgtyggttataggttgtaggttagtagggygagygyggygagtygggtagggttygttygtttygygtagtttatygttttttyggtagtygtygttgttygyggatygggtttyggggtyggygtttagaggyggggygggygyggttygggyggyggygggagc

SEQ ID NO: 10062 - DNA, 210 bp, Artificial Sequence
  Description of Artificial Sequence: Synthetic polynucleotide
atttygtataygtgtataaggtgttgaaataggtttatttygatatyggtattttttttaaagttatggggattatgaatttttttgttaaygatattttygagygtatygtyggygaggtttttygtttggygtattataataagygttygattattatttttagggagatttagayggtygtgygtttgttgtttttyggggagttgg

SEQ ID NO: 10063 - DNA, 229 bp, Artificial Sequence
  Description of Artificial Sequence: Synthetic polynucleotide
tggtttatttgagtttaggggtttgagattaggatgattaatatggtgaaattttgtttttattaaaaaatataaaaattagtygggttatggtggttgaygtttgtaattttagttatttaggaggtygaggtaggagaattatttgaatttaggagyggaygttgtagygatyggagatygtattatygtattttagttygggygagagggagattttgttttaaaa

SEQ ID NO: 10064 - DNA, 209 bp, Artificial Sequence
  Description of Artificial Sequence: Synthetic polynucleotide
aggygggggagagagatgaygttggyggaygtggttagygygggggtygggyggtgygttgtaggttatttgtyggygttttgagatttaggagttttygygttttygygtgggttttatagggtyggtttatagttttaatatagtagttgaatttttttygttgygtttttttttttttggaggggaatgttagaagagagagagag

SEQ ID NO: 10065 - DNA, 255 bp, Artificial Sequence
  Description of Artificial Sequence: Synthetic polynucleotide
gaaggggtttggagttttttttttggggtattgtgttgggattttgaggattggggattyggagggagggtaggygtgtttttaattygttgygtyggaayggygtttgatgagyggygggttyggataygaggggayggggtygatttgtgggyggggttttggygtygtattaaaatygygtggggyggaggtyggtagaggtygygtagygggtttagggtagggagtggttttgattygttgyggaataat

SEQ ID NO: 10066 - DNA, 297 bp, Artificial Sequence
  Description of Artificial Sequence: Synthetic polynucleotide
aggtttygtttattygaygtaatttgttygtttttttttatttttygaagggtggagtttgaggtttygtttttaagyggttttttttyggagtgtttggyggttagtagggyggggtaggaggttgggagagggaygggtgygggggtgggggagaggaagggagyggttaygtgtgaggggyggttygaggttaygtgayggagygtyggagyggagggagtyggggttgggagtttttttgagggaagaggagtggagtaggggggaygyggyggyggygttgataatggtgag

SEQ ID NO: 10067 - DNA, 232 bp, Artificial Sequence
  Description of Artificial Sequence: Synthetic polynucleotide
gtgagttggttggaaagagggggyggagtgygyggagttagagtygttatygttgtygtagttgtygttattgyggygtttgggttgagtyggagggaggygggaggaygygtaggggyggtygtygtygtygttaggttatyggggygaaaatgyggtygttgtyggaggttygttaatttttyggggtggaagaggaggaggaggaggaggaaggggtttggagygatta

SEQ ID NO: 10068 - DNA, 247 bp, Artificial Sequence
  Description of Artificial Sequence: Synthetic polynucleotide
tygygttygtagtygygtttttgttttttygattttygtatttttatttggttyggttttttygtttttttttyggtttttttttttaggatatttgtgtygttttattttttttattatataygtattttttattttaattttttygtttttttgttttttttttttygtyggtttttttttttygttgttgtttygagagttygatgtgggagggaaggygygggggaggggaggtygygaaggg

SEQ ID NO: 10069 - DNA, 292 bp, Artificial Sequence
  Description of Artificial Sequence: Synthetic polynucleotide
gtttttygagttttttgyggygatttygatttattttygygggtgyggggygyggattygttyggtttagtttttgttttttaggygtttttttttttygygatttgtttyggtygtattygttttygttttagtaygygaygttgttyggygygatttttgttttttyggtttagttttatygttgttttygatttaattttagttgaaygttygtagttttagttttattttyggtttagttttagygtttttagttttattttyggttttagttttagttttagygttt

SEQ ID NO: 10070 - DNA, 201 bp, Artificial Sequence
  Description of Artificial Sequence: Synthetic polynucleotide
gtagttyggttaayggaygggttagttggttttttttaggggtagttttgttttttttttygtttygttttttttttttttattatatygggttgtaattygagtygtygagttattgtttttttttyggatttttttyggaggttttgyggttygggttttygygttttgttgttttatgtagttttgagttttatagta

SEQ ID NO: 10071 - DNA, 201 bp, Artificial Sequence
  Description of Artificial Sequence: Synthetic polynucleotide
ggttaygygtgtttttggygygagtgtgyggggttaggtygggagggygtgygyggatygggygtgtttaygygyggtagggaggggttaygagggtgygygygtttttggygygagtgggaagtgtggggattyggygggttyggtgtgaggggygtgtttttggggygagagtggggagtgagtgtgaggagtaagggt

SEQ ID NO: 10072 - DNA, 201 bp, Artificial Sequence
  Description of Artificial Sequence: Synthetic polynucleotide
gggygyggtygggtaggttggggggtaggtaggggtygttttygyggggygggaatttygygtttttttttttygagttttattttttatggtaaagyggygtggggyggyggggyggagggagtygagggggyggggagggyggaygggyggaggggaygggaggtttagyggtttygggtttygttggttygggygtyg

SEQ ID NO: 10073 - DNA, 201 bp, Artificial Sequence
  Description of Artificial Sequence: Synthetic polynucleotide
attttttttttttatttttttttttttttttttattgttttttttatttttttttttttttygtttttttttttggtttttttttttttygttygggattyggggggaggygygttgggtggttyggtagtygggggygggyggtagtttgtaggygtaattggtatgtaygtygttgtagttgagatygtttaataaagt

SEQ ID NO: 10074 - DNA, 201 bp, Artificial Sequence
  Description of Artificial Sequence: Synthetic polynucleotide
tygttttygttaaaggtttttttaaggggtygttttagggtttygtttygtgtttygtttyggygtttatttyggygttygtttttttttttttttgttgyggtttyggtaggggttgttgyggygatttaggttgttgyggttttagttttattagttgttgttgttttttaaggagaygtygtygatagyggagtagtg

SEQ ID NO: 10075 - DNA, 201 bp, Artificial Sequence
  Description of Artificial Sequence: Synthetic polynucleotide
gtgyggtyggggygttgttyggtagtgyggtgtttaygggattgataggtaggtaggtygygggttgggattyggatattaaagtaaaagtatygttgggygtyggaggagtygyggggtttttattttttttttgattgatttttaaattttaatttgtatttttttygtygtttygttttttttttttygatttygttt

SEQ ID NO: 10076 - DNA, 201 bp, Artificial Sequence
  Description of Artificial Sequence: Synthetic polynucleotide
tatygygtygtgygttygygttyggtygttaggtgttttagtagttygatygtygagatgtttagttygtyggggtttygggygttatggttttgygtygygttgtgygtttttyggagggtyggyggygttttttagttyggttyggggtttatygtttgttyggttttttgttattgttaggaggayggtattatgttg

SEQ ID NO: 10077 - DNA, 241 bp, Artificial Sequence
  Description of Artificial Sequence: Synthetic polynucleotide
ttgygygttttggyggtaggaggyggggtygggggyggggygtgagttggtyggggyggggtttatggaggggygggatygyggygttttataagtattgyggagygaggygygygttyggttagagagygagygygtaayggyggygayggyggygattttatygygtattttgttaggttttyggygtttagygttttaygygttttygygttttygygttttygygttttttttttyg

SEQ ID NO: 10078 - DNA, 201 bp, Artificial Sequence
  Description of Artificial Sequence: Synthetic polynucleotide
ggyggtaggyggygyggygggttgggygyggyggtggttaggtyggtgyggttgtagtttatgtatagygtgttagggttgttttgttygggtagtyggtygtagygtatgyggtygggttaggygaagtygtattggygtatgagyggygygtagtyggttttggygygttygtatatygagyggtagggyggtagyggt

SEQ ID NO: 10079 - DNA, 201 bp, Artificial Sequence
  Description of Artificial Sequence: Synthetic polynucleotide
aagtggggtgaaaatgattttagtgaatagtttagttttttgggatagtggtttggtatttttgaygtgggagtggygtttgttttgatttaatttggatyggtttagggataatatttttttyggagtagtygttttgtttygtttygagtagtttagttgygttttgtatgatygaattggatattttttatttttttt

SEQ ID NO: 10080 - DNA, 201 bp, Artificial Sequence
  Description of Artificial Sequence: Synthetic polynucleotide
ttygygtttgtttygtattayggagtygggtttttagagtagtaaggttattaggtggyggtgttggygtagtaggyggagygtygggtgygyggggtygygtttttggttttygaaggtgatgaagatgggtttgygggtgagttttagtagtyggtataggttttttttgyggggygggatygttaggggggtgggtgt

SEQ ID NO: 10081 - DNA, 201 bp, Artificial Sequence
  Description of Artificial Sequence: Synthetic polynucleotide
ayggttgggttttaggagatattyggaggggttygygggttyggttyggttttttygttggggggttattagtyggtyggtagygagatatttagaggttygtttttttatygygttgttatagtaayggtttggtyggttgygtttygggtygttygttttatttygygggttygttttgagttagtgattttagggatt

SEQ ID NO: 10082 - DNA, 201 bp, Artificial Sequence
  Description of Artificial Sequence: Synthetic polynucleotide
tttagatggttttaattattggaggaaaaaagyggtttttttggtatgygtgaaaagtyggagttgggagagtttgggaaaagttgtttgtatygttygtyggtttttaaataaatygatgagttttttttttttttttagttttygggtttygggggagttttataaaatttaaatgaaatttaaagaagttatttttgg

SEQ ID NO: 10083 - DNA, 201 bp, Artificial Sequence
  Description of Artificial Sequence: Synthetic polynucleotide
ttataaagtattagtggtgttttttygaggaatttaagatttttyggtyggttgttaagtygtyggaattttagtaggagaggaaggtttatttttttatygtatggygatgttygggagattggagaagtttaggtaggtttggaagttaattttyggtatatagtagttttygggaatgtagagttttagagtaagatt

SEQ ID NO: 10084 - DNA, 201 bp, Artificial Sequence
  Description of Artificial Sequence: Synthetic polynucleotide
tagtagagayggggttttaatatgttgtttagggtggtttygaatttttgagtttaggtaattygtttattttatttttttaaagtattgggattataggygtgagttatygygttyggtttgatagtttttttagaatgaagtttgtttyggaaaaaagagttttggttagtgttttttttggggattagyggaaagtat

SEQ ID NO: 10085 - DNA, 201 bp, Artificial Sequence
  Description of Artificial Sequence: Synthetic polynucleotide
aggggagttgaggggyggagttatyggggygygttttygyggttgygttttttttygtyggggagygygggtaygtaattyggagggtgttgggtyggttyggagtaygygagtagygggaggagggatyggggaatgattgayggaggygggtygtagaggtygttgtgtttygtyggttygtattyggtyggagtgtgc

SEQ ID NO: 10086 - DNA, 201 bp, Artificial Sequence
  Description of Artificial Sequence: Synthetic polynucleotide
ggttttygttttttttgtaggyggattygttygtttttaggtyggattygygttygggatagggattyggtygagtygagtygtygygttagygttgygtygtyggtyggtgygtttagyggatyggagttgygygyggaatygtgttgtttygtttygttttattygtgagggtgagtaygyggyggyggtgygyggggg

SEQ ID NO: 10087 - DNA, 201 bp, Artificial Sequence
  Description of Artificial Sequence: Synthetic polynucleotide
yggggagggaggttttyggaatttygagagagtattygtgtttygygggtttygtgtttygttttygggtttttttttttttaaygtaggggatttagttyggggtagtgtygggtattggygttggygtttygtttagttttgygattttttttygtttygttttttttygtttygtttygttttttttygtttygtttt

SEQ ID NO: 10088 - DNA, 239 bp, Artificial Sequence
  Description of Artificial Sequence: Synthetic polynucleotide
agagggygagygagagagagatatatatatataygtataygtataygtaggttatatgaatgggaggyggtagttaattttaygaggtyggygagtygygyggygtattggygttgggagtagggtygtatttyggygygggggggygttaygtaggtgatgggygttttttygggggttaygygyggtygtttttttattttagtttyggtttttttgtttttttttttttttttttt

SEQ ID NO: 10089 - DNA, 201 bp, Artificial Sequence
  Description of Artificial Sequence: Synthetic polynucleotide
tttttygtttttatttatttttttttattttttttttttttttttygttagtttygtatttattttttttatttygtaatttttttttgtttttatttatyggggttatggtygtagaagaggtattgtagayggtggattattataagattgagatagagaggttaattaaggagtttayggagattatttaygagaaga

SEQ ID NO: 10090 - DNA, 201 bp, Artificial Sequence
  Description of Artificial Sequence: Synthetic polynucleotide
ttgtyggggagaatatgtattaggtggttgatggttttgtggatgtggtggtttgtattttggtgttgtgttttgtgaagaattaggagyggatttttygygaggtgtgtagagtgttgagatyggtgagtgaaagggtgtgaggaggattagttagtagtagttattattatagagggtaggtttgttaattttaggtgg

SEQ ID NO: 10091 - DNA, 201 bp, Artificial Sequence
  Description of Artificial Sequence: Synthetic polynucleotide
gaggyggaatttaayggaagtgaagaaaagattaaygggaaagaaggaygagtaygyggtttygggatagatttttaaagtttttttttgygttttttggyggtyggagggggagtagygyggataygtttttyggttaatygttggttattaggttggagtggggtttttttttgttgttttttatgagattattgtttt

SEQ ID NO: 10092 - DNA, 201 bp, Artificial Sequence
  Description of Artificial Sequence: Synthetic polynucleotide
gygattaygggtttyggygaagatgygtygtttgagygttygygyggttttygttyggggygggygtgatttttgttgaayggagattttttttttttttygatttyggayggygtaggtyggygttaggatagtttttatygatagygtttttttttattyggagagaggtatygatttttaaggagggtttygttaggt

SEQ ID NO: 10093 - DNA, 201 bp, Artificial Sequence
  Description of Artificial Sequence: Synthetic polynucleotide
tygttttygtygttyggggtaggygygtygatggygtttttgaggtgaygtygtttatatygggttttttygggggyggaggaaatatttatgaatttttyggtagttttttttgtygggygttaggtaagtagyggtttygggygyggyggggygtygygggaayggtgtatattggtygaaatttattgttttttaaga

SEQ ID NO: 10094 - DNA, 201 bp, Artificial Sequence
  Description of Artificial Sequence: Synthetic polynucleotide
ttygttatttggggygtttggggggttttggggygggggaggygggggttttgtttaatttygttattgttattatyggttaggtygyggtttggtaattygtgaataggaggtagggttgtagggygtgagggatgatgataaggaagtyggaggagtagyggyggtagyggagagtttattttggatgtaaatggtagg

SEQ ID NO: 10095 - DNA, 201 bp, Artificial Sequence
  Description of Artificial Sequence: Synthetic polynucleotide
atttygygttttgygttttaattaggattgtttygygygtttttgagtttygggtttyggttyggatttgtagttttttaggtggttgggaaggtaggtgygtygttgttttyggygygyggygtttygygaggtttttagttttygttttggtggattttygttgggtgggagtygggagtggaggyggtygttttaggg

SEQ ID NO: 10096 - DNA, 201 bp, Artificial Sequence
  Description of Artificial Sequence: Synthetic polynucleotide
ygattyggtygtgagygtgtttygttgtagttygttgttygttaggttygggtggtagygtaggatgtttttttggtttgyggagaagtatagatatyggygggagygygttaatygygttygtttygtatygygtattygagggggygygtaggtygygttyggtttttttgtttygtttygtttygttyggttttaaag

SEQ ID NO: 10097 - DNA, 201 bp, Artificial Sequence
  Description of Artificial Sequence: Synthetic polynucleotide
yggtttgggaaggtttyggtttttyggttgyggttttagttyggayggygtygygtaattttgttatttttttggtttagtttyggttataggaggatttygygggtaaygygyggagtttttggtatttttyggyggtgttttttgttgtttgttyggggatygatttygtatgtttttaggttgatttgtttaagttyg

SEQ ID NO: 10098 - DNA, 201 bp, Artificial Sequence
  Description of Artificial Sequence: Synthetic polynucleotide
gtaatttyggyggagtyggygtttttgggtatttttggttttygygtttyggtygtayggtgattattygggaggggatttygggygtttygtaatttttyggttttygtgggttttygggtygtttygtttttygtygtygygtatttttygygtttttyggttttyggtgtyggttttygtttygygtagtttygagtt

SEQ ID NO: 10099 - DNA, 201 bp, Artificial Sequence
  Description of Artificial Sequence: Synthetic polynucleotide
aggaagttygaggtyggggygttattttaagggttttttygtttttttttygagggtagagaggygttygygttyggaygtattgygggaatatttggagygtyggyggagttyggttgttttygygggagggagttygaygygtatttttgggattyggattyggygttygygtttygggayggatttttgtttyggttg

SEQ ID NO: 10100 - DNA, 201 bp, Artificial Sequence
  Description of Artificial Sequence: Synthetic polynucleotide
tygtttgtaggttgtttygggtygagtyggagygaygttgtygygtatttgggtagttttygggggtygygttgtgttayggtyggggtygttgygattgyggygtttgtatttgttaygtgattgagtygggtatgtttttygggtttttgtgtgagtgttatgagtgggtgtgygagatttaygaygggagtatttgtg

SEQ ID NO: 10101 - DNA, 201 bp, Artificial Sequence
  Description of Artificial Sequence: Synthetic polynucleotide
taygtttggggyggtygggggyggggtttggttggaattgaygygtggagtttyggtggagggggyggggtttggttgggtygttgtttatagyggttttyggggtttggaggttayggggttyggaggttayggggttyggaggttayggggttggttgtgtggggggtttaggggygtagagtggttaagtagyggttt

SEQ ID NO: 10102 - DNA, 201 bp, Artificial Sequence
  Description of Artificial Sequence: Synthetic polynucleotide
ggttttgtagttttgtagygttyggggyggtgtaggagtttyggggtgtygyggygttygttyggttgtatygttggtttttyggttygggttttaggttyggygttttttatttttaggtygygygygtttygttttttygaygatttttagtttygggttttygttatttaygagttttygttttyggtgagttgttgt

SEQ ID NO: 10103 - DNA, 201 bp, Artificial Sequence
  Description of Artificial Sequence: Synthetic polynucleotide
gygttttygggggttgygtygtgtygtttgttgtgygygygtagaggtyggatagttyggttgygggaagggattygagygtagggtttgtttygygtttyggaaagtgtttagtttgyggagtyggaggttgagttggggtagatyggygttagaygggggtttgggtgagataygagttgggggtgyggtttgtagaat

SEQ ID NO: 10104 - DNA, 201 bp, Artificial Sequence
  Description of Artificial Sequence: Synthetic polynucleotide
ttttttttattattttttygtttttttattttttttttttttttgttttgtaggattgagtagttaggygygagygaaaataaatagttggggttgygagygttttygtttyggtttygagagtaygtyggtttagttttttatttggggygttygtttgtttattatgaggaagattygygttaatgttatygttatttt

SEQ ID NO: 10105 - DNA, 201 bp, Artificial Sequence
  Description of Artificial Sequence: Synthetic polynucleotide
gttygtgtygttgttgttggttttagygttygggttttyggtgagtgyggttttgtttyggttttyggaggaatttgtaggggagtygggggyggggaygygygggttygtaggtaaygtttttaggaaaggggygatgttagggaagttgggttgggaggaggygagttygtatygttgagtttttttagaaagggttgg

SEQ ID NO: 10106 - DNA, 201 bp, Artificial Sequence
  Description of Artificial Sequence: Synthetic polynucleotide
ygttgggygtygttygtyggtttaggygygygaatttggygtttttagtgaattattygyggttygggygttygggttygggatyggtttttttttttttygttgagtygyggtygagttggttttttgtattttatttagygtygtygggaygygattatatygagatggtatygagttttttttaaaggtttyggtttg

SEQ ID NO: 10107 - DNA, 201 bp, Artificial Sequence
  Description of Artificial Sequence: Synthetic polynucleotide
gttttagtttttgggtyggaagtttttttttttttttygtygtagtttttttttagttttttttttttygtygatgygggaaatttttttygtttygtttygttttttttttttagttgtattttygttyggttttttygtttagtttttaatttaggtttygtttttttttatttatttttygttttgggtygggttttc

SEQ ID NO: 10108 - DNA, 201 bp, Artificial Sequence
  Description of Artificial Sequence: Synthetic polynucleotide
gatggygaygyggatttgtatygtygttttgggttygggtygagttttttygtyggattgggttatggttygygggattgyggygtygtyggggtttttaygtygtaaggtttagttagtyggtyggtagygattgygaygagggggygggggyggtgygagygygtttgtygttyggtttaggggagggataggggtygc

SEQ ID NO: 10109 - DNA, 201 bp, Artificial Sequence
  Description of Artificial Sequence: Synthetic polynucleotide
gtttgtttygtygttygggttttgtggttggttattygygagttygtttygttttttttgtttyggttygttyggttygtttyggggttttygtygtaatygagyggagtttagygattygtygggtttatattagyggtygtttttttygaagygtttttyggtagygttygggttttygygtttyggaatatttatgaa

SEQ ID NO: 10110 - DNA, 241 bp, Artificial Sequence
  Description of Artificial Sequence: Synthetic polynucleotide
ygygttggttyggtttttagttttttyggtygtygtttttygttygtygygtygyggygttaggagggyggggtyggggygygygtygttttttagtaagygggygggyggygttyggtttgagggagyggggyggttttygtyggygtygygygygttgtgtgtgagyggggtygygygygygygyggtaggygagtgagggaaygaggagyggtygggtgtgagtgtgtgggagtgaga

SEQ ID NO: 10111 - DNA, 201 bp, Artificial Sequence
  Description of Artificial Sequence: Synthetic polynucleotide
ggtgttaagygtggggygygggttygyggygggagttgttygygaaatttagtgttgaagtaggygyggaygtgttyggtgtttggygygtggtagtaggygttyggtgtttyggtyggygaagattatggygtttatggtgaagattatggtgggyggttagttgaagaattttattgggagtttgggaggyggygagga

SEQ ID NO: 10112 - DNA, 201 bp, Artificial Sequence
  Description of Artificial Sequence: Synthetic polynucleotide
gygygggayggagttttatgaaagttggaagaagtgattataaatygggattygattttygtagttttggygttygtttttttaygtaggttygggatgtyggttttagtttttagatgtygggaagayggygtyggttagtttaaggaagagtttttaggaggttggggagtaagggtgtygggttttttatgtygggtt

SEQ ID NO: 10113 - DNA, 201 bp, Artificial Sequence
  Description of Artificial Sequence: Synthetic polynucleotide
ttttgttggttagagtygggtaygggtygggygggyggyggggatygtgatygyggttgygtgygttygygttygggygtttttgtgyggggttttggtaygtyggygggggygattygggtgtyggttygtgygggygataygygygtttttgyggggttgygyggggttyggagyggttgggggttttttgtygggygc

SEQ ID NO: 10114 - DNA, 201 bp, Artificial Sequence
  Description of Artificial Sequence: Synthetic polynucleotide
tagatttygtyggtyggygygttattygygttagtattatggatagyggtygttttagtygygygtttagggttaggttygggttggtttttatygyggayggttgyggggtyggggtagtttygtaattttaaatttyggtagttttygtttagtagggaggggtttygggggygaagagtgggggagaagtygggaagg

SEQ ID NO: 10115 - DNA, 201 bp, Artificial Sequence
  Description of Artificial Sequence: Synthetic polynucleotide
gtgtgagtttygggggttygggtyggyggttttgttagtygggtygtgyggttgygggggtggggyggyggygtygttgttatattagtttygggagyggygagagggaggttggggtgggggygygaggggggyggygygaggggggtygattttgygggtaggtgatattatatttygaaggttttagtgygygggygg

SEQ ID NO: 10116 - DNA, 201 bp, Artificial Sequence
  Description of Artificial Sequence: Synthetic polynucleotide
gtygygttatggtgagtygggyggggtaggtygygygttygggtygggygggggygtyggggttygggggygggaagggggaggttaggaygaggaggggygygygyggyggyggggtygggtyggggtttgygggygggggaggggyggttyggygggygyggttygggggagggttygttttaggggtygygttygygg

SEQ ID NO: 10117 - DNA, 201 bp, Artificial Sequence
  Description of Artificial Sequence: Synthetic polynucleotide
taatygggtattttygygygtataygttygtgtttaygtgtgtaygtttatatttttgtatatatttaggygygygttggtatatttattyggagaatttygtatatataygtattygtaaataygygggttttttgygttattaggaagtagtygttagaatygtygggtgttttttaattatttttgggagatttggtt

SEQ ID NO: 10118 - DNA, 201 bp, Artificial Sequence
  Description of Artificial Sequence: Synthetic polynucleotide
ataygatatggttaagygtygtygttygaatyggtygtygtygatatttygtttyggttyggggttgaggaggaagtygagaaggaggaggaggaggyggyggyggagggygggggaagaggayggtygtttygggtttygtttgagttygtagggtaggaygagggagyggygyggtgagagaggyggatgaaggygagg

SEQ ID NO: 10119 - DNA, 201 bp, Artificial Sequence
  Description of Artificial Sequence: Synthetic polynucleotide
ygygtatagyggyggygagtgggtygtgtaygyggatgyggggtgggagtgggggygtaygygygggygtgggygagygggtttyggtagtgtatatatayggtaggggygggygatagatgtagtgygtgygtyggagtttaagygtataaayggaaagagygggygyggtgygtaggggygggygtttagygggtttgg

SEQ ID NO: 10120 - DNA, 201 bp, Artificial Sequence
  Description of Artificial Sequence: Synthetic polynucleotide
ttttaggggagttaagtagttygtttgaagttttttatttggaaatgaygtgtttaattyggygtttttgtagtttyggtygtttttttttgtttaatttygygtttttttagtttyggtygtttttttygtygtttttttttygyggtygtttatttttgagatttttggttttattgagaygtttagttttattyggta

SEQ ID NO: 10121 - DNA, 219 bp, Artificial Sequence
  Description of Artificial Sequence: Synthetic polynucleotide
tttagggagggggcgggaggttttttttgtttagtttcgagtcggtggtgtagcgttcgttttcggtcgcgggcgtagattggcggtcgttttcgggttacgtggtgcgcgcggcgggcgcgttcgaggagtttgcggttgtttttggtttatagcgtttcgggcgaggagagcgggcggacgtcgggggttgggtcggtgcgggcggcgaggtaggcg

SEQ ID NO: 10122 - DNA, 315 bp, Artificial Sequence
  Description of Artificial Sequence: Synthetic polynucleotide
cgagtttcgagtttcgtttcgggggttttatttcgttttttcgcgttcgcggttcgtttttttttattgagcgtttagttttcgtagttttttcggtcgtcgagcgtcgtgggcggggttttagggcggcggcgtttcgcggggagggtttttcgtgttgggggcgaggttattcgaggtagtttttcgttcgtttttaatttcgtttcgttttcggagtttataaagggaggcgattcgcggttcgttcggttggtattttttagtcgtcgttagtttcgtcgaggggagttagcgtcgtttttgaggggcgtt

SEQ ID NO: 10123 - DNA, 201 bp, Artificial Sequence
  Description of Artificial Sequence: Synthetic polynucleotide
gtattcggtttagggttggagttggttgtagggttggttcgcggcgatttgggtagggtggcggttgttttttttttttttatttcgtttcgaggcgtagcgcgcggtagagcggttcggtgttcggcgggcgggcggttcgggcgggtttgcggtcgggatgaggacggcgttttcgttgtagagcgttggggcggcgcg

SEQ ID NO: 10124 - DNA, 201 bp, Artificial Sequence
  Description of Artificial Sequence: Synthetic polynucleotide
aataatagggacgttgagaataataattacgattagtacggcgaaggcgtttttttcgcgggttagaggtcggcgttttagtttcgtagaattcggcgttcggttagcgttttttggtagtttttttcggtagttttaggtttttaagatttgtaggttcgtttcgaagtttttcgttcgttttttacggtcgtttcgagt

SEQ ID NO: 10125 - DNA, 201 bp, Artificial Sequence
  Description of Artificial Sequence: Synthetic polynucleotide
cgcgtatttttttcgttcgtttgttcgcggttttttttttgttttcggagcgttagtcgttttatttcgtgatcggtttttcgttttgtttcgtaggattcgttcggacgggattacgtcgtcgtcgtcgtcgtcgtcgttcggagtcgcgtttcgggttttgtttgagtcgagtcgcgcgcggggtcgtagttatcgtcg

SEQ ID NO: 10126 - DNA, 201 bp, Artificial Sequence
  Description of Artificial Sequence: Synthetic polynucleotide
atagagttgttttttttttttttgggttttgtaagttttcgaattggaggcggaaatgggggaagggttggaagttgtgtgtgaaaaataattattgtaacgggttttttttaggagtttagttcggtttgtattttggtggaattgttgttatcggtttatagcgtttaggtcgagtcggtagggttgggcgggaggttt

SEQ ID NO: 10127 - DNA, 201 bp, Artificial Sequence
  Description of Artificial Sequence: Synthetic polynucleotide
tagttatcgcggcggttgcggcggcggtattttcgtttttattttcgttcgggattgttttttattgttttttcgtttttttcggatagtgagttcgcggcggggcgggggaaggagtcgtttttattttttttaagtttatttttaaagagatttttttttttttttttcgtcgtttggcgcggagtcgggacgatgttg

SEQ ID NO: 10128 - DNA, 201 bp, Artificial Sequence
  Description of Artificial Sequence: Synthetic polynucleotide
aataagtagttcgggagatattttttttttttttagttttcgtttttttattttgttattttttagttcgtgattagttgttttttttttttttcgcgggcgtttagggttgagtaaatatttcgggtcgttcgtttcgttattagttggtttcgatcggcgtatcgttggcgattttttaggtaattcggcgttatgaga

SEQ ID NO: 10129 - DNA, 201 bp, Artificial Sequence
  Description of Artificial Sequence: Synthetic polynucleotide
cgtggtttggtcgaggagttaatgggtcgggaggggcgcgcgggggaggagtttaggtgtagagtgtcgattggttagttcgtttttcggtatgtagatacggtgggagttacgtgttaggggtcgggacgattttttgttggaggttaacgcggggcggggaagggggcgcgagcgtttcgtttggttgaagcgggggga

SEQ ID NO: 10130 - DNA, 201 bp, Artificial Sequence
  Description of Artificial Sequence: Synthetic polynucleotide
ggaggaggggaggcgttgttcgacgcgtttttttaagttttcgcgttttttttcggcggcggttgttcgggggcggtggttcggcgtcgtttttttcgatcgttttttttagggtttttttttcgtgtcgcggttaggttgttcggtcggcggcgcgttggaaatatgaagagacgttgtagttgcggtggcggtggcggt

SEQ ID NO: 10131 - DNA, 201 bp, Artificial Sequence
  Description of Artificial Sequence: Synthetic polynucleotide
tttatttgggacgcgatttataggggcgttgtttcgttttgcgggaagaggaggcggcggtcgtcgtgattggggcgttcggttttattcgtttatagaacgtttttaatattaggggtttgaaagcgaaaatttcgggaaggtattttttgatcgtagattatattttgtagttgatttatatcgtttaggaggtagtga

SEQ ID NO: 10132 - DNA, 201 bp, Artificial Sequence
  Description of Artificial Sequence: Synthetic polynucleotide
ataaaagagtagttttcgcggagcgggtttagagtttgttcggattgttcgatggttttcggttttttgagcgtcgcggttgtcgggttttgtgttcgcgcggggggcgggaaggacggtcggggtttttagtgcgcgtttcgcggagcggcgcgcggcgttcgaattggaaagttgtcgtcggcgtttgtcgtttttacg

SEQ ID NO: 10133 - DNA, 243 bp, Artificial Sequence
  Description of Artificial Sequence: Synthetic polynucleotide
gttaaggttcggatcgttattttagtaatagttttagttatgtgatcggtaatggcggcgttgacgagaggtaggtgagttcggcgttttttatatttatcgcgcgtttttcgggtttcgttcgtattttttacgcgtttttcgttttttcggcgtttttttttttattttttttttttgcgcgcggtttcgggtttttcgtttcgtgttcggtcgattatttttttagtattttttagtttt

SEQ ID NO: 10134 - DNA, 201 bp, Artificial Sequence
  Description of Artificial Sequence: Synthetic polynucleotide
tagttcgtttatttttttttggagaagttcgacgtagcgttcgttattttttttttttcgtgtgtagtttttcggttttaaagtatttatttgtttaattcgatttttattttataagatcgtaatcggttattatttttgtttttcgttaggatatcgaggttagttgtgttattgtttcgaggggttgtaggtgtagag

SEQ ID NO: 10135 - DNA, 201 bp, Artificial Sequence
  Description of Artificial Sequence: Synthetic polynucleotide
tcgtagtatcggttattttattgttaagggtgttttttgtatttgttgcgatattttgggtcgtttttagtttagtttgtatagtatttttggttacgttcgtagtatcggtgattttattgtagatagtgtttttggtatcggttagtacggttttggtcgtgtttatatttatttggacggtttttttggttatattcg

SEQ ID NO: 10136 - DNA, 201 bp, Artificial Sequence
  Description of Artificial Sequence: Synthetic polynucleotide
tttcgggtcgaggggaattcgcgatcggatttgtgggggagaatgaggatgaaaacgtggagtttttattgtttagggtttgatcggtcgatagggatttcgacgggggatcggggatttggggagggggtcgtattttttcgtttttttcgcggtttttcggtttttgtttgtttttttgatcgtttttaggggcgcggc

SEQ ID NO: 10137 - DNA, 201 bp, Artificial Sequence
  Description of Artificial Sequence: Synthetic polynucleotide
agtcggggtagaaggaggagtttgaaggtttattatggggtggaggttgtttgttcgcgggttcgtttttagagttcggggtttattacgttgttttatgcgtttttgttggtttttgttaaatagttttttttttttgtgttttagttttttggttgtaaaaagggggtgtttatagagtttttttgaggagtcgttata

SEQ ID NO: 10138 - DNA, 201 bp, Artificial Sequence
  Description of Artificial Sequence: Synthetic polynucleotide
ttggtttttatttggtttgcgagaaattaaattttgggtataagttatgaagtcgataagttcgggagatatagtgttagaattataaggtgagattagtcgttcggttaagttattttttcgttagtaggtgaggttcgtgaatagttaagttttttttggtacggcggaatcgtagtggacgcgtggaggggtttcgta

SEQ ID NO: 10139 - DNA, 201 bp, Artificial Sequence
  Description of Artificial Sequence: Synthetic polynucleotide
aattttttatttattaacgtcggcgtcgttatgggtttagggggttgggtgaggtcgtgagagtcggcgaggaagtcggttttgcgggttcggtcgatttcgggtttcggttttgggttgcgagggattttagttttcgtcgtcgtgtaaaatgtatataaggttcgcggcgtcgtttttgcgcgtcgtgaggatataggg

SEQ ID NO: 10140 - DNA, 201 bp, Artificial Sequence
  Description of Artificial Sequence: Synthetic polynucleotide
gatagaaggggagagtggttaggaaggaggggaggatggatatagggcgtttgtagaattggtgggtagatggacggagggacgggtcgtgtagtgtagtcggcggggttagggttaggtcgagggcgcgaggtggtagtcggttcggggaggcggaggttgagcgagcggtggtgtttgtggagttgtcggttgcggtgg

SEQ ID NO: 10141 - DNA, 201 bp, Artificial Sequence
  Description of Artificial Sequence: Synthetic polynucleotide
ggggttgggacgtttcggcggagtaggcggcggcggtggcgagttggggagttttaggttcggcgttgtcggaggggttcgagtcgagtcgtttgcgtttcggtcgggtagcgtcgggttcgtttttcgcggggttacgttttgttaaattttgttgcggcggttagcgtagcgggttcgtaagcgggcgggaggggcgtc

SEQ ID NO: 10142 - DNA, 201 bp, Artificial Sequence
  Description of Artificial Sequence: Synthetic polynucleotide
ttattggtgagtttggtagggtatagagaggatggtattattagttggagggggataggttttaattatgagtttaggatgtagagagcggtagggattatcggagttttttcggttttggtgttttggttttttttgtatacggtttttatatgacgtttagtaagtcggattttaatttgtttatttattttttatttt

SEQ ID NO: 10143 - DNA, 201 bp, Artificial Sequence
  Description of Artificial Sequence: Synthetic polynucleotide
gaggttaaggcgggtagattattcgaggttaggagttagagattagttcggttaatagggcgaaatttcgttttttttaaaaatataaaaattagttaggcgtggcggcgttcgttcgtaattttaggtatttggtaggtcgaggtaggagaattacgggagttcggggtagggaggttgtagtgattcgagattacggta

SEQ ID NO: 10144 - DNA, 233 bp, Artificial Sequence
  Description of Artificial Sequence: Synthetic polynucleotide
ggagagagagagagagagagagagacggagtcggagagggagggagcgagagaaagcgagagtttttcgttatttttcgtcgtttttagaatttatcgggcgtttgttcggcggttttagaaggtcgggttgcgttgtgggttgcggggagtcggaggttttttgattggttttttgacgttttcggattaattgtgttgttgtataggcgtggtttttataggtcgagtgtt

SEQ ID NO: 10145 - DNA, 201 bp, Artificial Sequence
  Description of Artificial Sequence: Synthetic polynucleotide
cgcggtatagttatttttttcgtcgaggcggtattttaattttgtgtttttttaggatcgcgggttgtaggtattcggttttcgaagcggaggtcggagtcgcgcggagaagttaacggtaatgacgttttttgtcgatttttaggaggggataggttgagggtttggacgaggtcggaagcgtttttattgtagtttcgg

SEQ ID NO: 10146 - DNA, 201 bp, Artificial Sequence
  Description of Artificial Sequence: Synthetic polynucleotide
ttttgagaagtagtagtagttggtttgtttgttgtttcgttttcgtgtatggttgtttagcgttggttttagtgtttagcgttttcgtttagtattttttcggttttttttttttatttttcgttttcgagttgcggggagttttagtttgggatttttgttttatgtttttgggtttttgttttggttggttcgtttttt

SEQ ID NO: 10147 - DNA, 201 bp, Artificial Sequence
  Description of Artificial Sequence: Synthetic polynucleotide
ggtttcgtcgggtcggtcgttgcgagtttcgtttcggtttcggttatcgtcggggaggacgacgacgacgtggtgggggacgtgttggtattgttggtcgcgtttttggtttcggggtcgcgggcgtcgcgcgtggaggtcgtttttttttgtcgtttgcgtcgggacgcgttggtggagcggcgcgcgttgtacgagttt

SEQ ID NO: 10148 - DNA, 201 bp, Artificial Sequence
  Description of Artificial Sequence: Synthetic polynucleotide
ttttttttagtatattttatgtaaaagttagtaaaaatattttttttataagtttaaataaatgtttaaaaatatgtaagttaggaagttatttttaatacgtatattttttttatatgtagaagtaatggtgagaattttttatattttttgtagtagattttcggtttcggggttgggtttttagtaagtttatttttg

SEQ ID NO: 10149 - DNA, 201 bp, Artificial Sequence
  Description of Artificial Sequence: Synthetic polynucleotide
ttcggtcgtattttcgttttatttttacggtagggtttttagtgtttgattaagtttaagttcgagtttttcggcgcgttgtttatcggttgttttttcgcgttttttttttttttttattcgtatcgtttcgttttttattttttttttgttttttttttattatttagtttatatttttttcgttttttttttcgtttt

SEQ ID NO: 10150 - DNA, 201 bp, Artificial Sequence
  Description of Artificial Sequence: Synthetic polynucleotide
gggattgggaacgggatagggacgcgttttaatttatttagcggtggagttggggggcggcgcggttacgtgggatggcgggtagtttaggggattcgggcgacggggtttggcgggtagggttgttttagtcgtttttataaagtcggttttttcgatttttttttttttttgtagtttttttttttttttttgggggtt

SEQ ID NO: 10151 - DNA, 201 bp, Artificial Sequence
  Description of Artificial Sequence: Synthetic polynucleotide
tagttatttatttgttttttacgttttatttattagcgcgtacggtttcggtaattttattcggagcggggcgtcgtcgtcgtttttgtcgtagttcggtcgggtcgttgggcgtaggggatttcgcgtcgtcgttgtcgttgtcgtcgtcgtcgtcgtcgttgtcgttgttgtatttttcggcgagcgttgttgtttttt

SEQ ID NO: 10152 - DNA, 201 bp, Artificial Sequence
  Description of Artificial Sequence: Synthetic polynucleotide
tttgggggacgtcggacgttatgttgtggaaaataatcgataatgttaagtacgaagaggattgcgaggtgagttggggtttcggggtgtagtttcgtttcgtcgaggatagttcgggaggtaggggttattggatcgaggtcggggacgagggtataggagttttggtttttcggtgggacgggatttattttttcggat

SEQ ID NO: 10153 - DNA, 201 bp, Artificial Sequence
  Description of Artificial Sequence: Synthetic polynucleotide
gggagggaagaaggaggcggcgagcgggaagaggaagaagacgtaggtagcgttaggcgagtttaggggcgtcgggagcgcggagttcgggttacggattcgcgggagtttattgcgttttcgggttttggagggttgtttttgttcgtaggttcgggcgttttcgttaggaggcgatagcgttatgtttttttaggtttt

SEQ ID NO: 10154 - DNA, 201 bp, Artificial Sequence
  Description of Artificial Sequence: Synthetic polynucleotide
tttagtcggtttttcgtatgattggattatatgagggatttaagttcggttagttgttatttttcggattatatgcgtgtttagggatcgttttttaattcggtatggggatttggaaaaaaagattagggtagagggattggggtcgggttcggtgatcgtttttcggtaattaaaggatagtaaaggacggtttttgat

SEQ ID NO: 10155 - DNA, 410 bp, Artificial Sequence
  Description of Artificial Sequence: Synthetic polynucleotide
cgtatgcgtttaggtcggttcgtaggtttttttcgttttagtcggtagttagttcgttcgcgttggggttatcgcgagtcggttcgtagcggggttatcgcgattttcggcgtagatatagaggtcgtttttagtttcgtcgtttcgtggtttcgttttcgttgtacgtttttttatttttcggatttcgtagggtcgcggcggatacggttcgatcggggacgtgaacgcgtagaattatattttttagcgtttcgttcgcgttggaattatatttttcggggggttcggcggtgtattcgtcggggtcgcggattggaggttttcggttggaaaagttttttggcggttaattggggaggattggaagaaatttaggatggagttagtattgttggtttaatatgttt

SEQ ID NO: 10156 - DNA, 201 bp, Artificial Sequence
  Description of Artificial Sequence: Synthetic polynucleotide
aagtttttgggaaagattcgttttattttcggaagttagagggcgttagttgtcgggttgaaaaggggtgtggggaggggaagtagttttatttcgggttcggagtttgtaggagagagaagtggggagtaagaagtgaattttaggggtttatagggttttcgtagatgtttaggtcggttaggaatgtatttttggttt

SEQ ID NO: 10157 - DNA, 201 bp, Artificial Sequence
  Description of Artificial Sequence: Synthetic polynucleotide
tttattacgtcggggcgattcgttgtttgagcgagtacgtttcgtatttttttcgcgacgcgcgtatgttgttcggcgtttcggtcggggcgttgtattgcgtcggcgtttttttcggtatttcgttgggtgcgtttggggacgttgttcgggttttacgtgcggagtgggtgttttttaggtcggggagcgggggatttt

SEQ ID NO: 10158 - DNA, 201 bp, Artificial Sequence
  Description of Artificial Sequence: Synthetic polynucleotide
atttttggattaggaaatagtgtgtgtgtatacgagagagagggatagagagaggggggatatgtggagtgtattggaattattataatttttatgaaggcggtatcggagttattggtattatttgtgtaatttttttttatgtttgacgtcgttttaaaataaagagtgagttgagtaaattaattcggtagggtatat

SEQ ID NO: 10159 - DNA, 201 bp, Artificial Sequence
  Description of Artificial Sequence: Synthetic polynucleotide
gcggcggggttgggtttggggttggacgttgatttaggatttcgtttttgttcgttttgcgtcgcgtttttttcgggtcggttttgatcgagtagttttacgcgggttcggggttcgtttattcgataggagcggggggttgtagtttacgagtttacgagttcgtagcgacgtattcggagtgtaatttcgtagagttac

SEQ ID NO: 10160 - DNA, 201 bp, Artificial Sequence
  Description of Artificial Sequence: Synthetic polynucleotide
gtatcgcgcggcggcgtttggcgggtattgttgttcgcggagggacggtgggggggttttagtagttggcgggggtggagggggcgggagagggagtttgcgtcgggttgagtttggaggtgcggggcgggttcggggagcgtttttggggttttttttgttatagtcggggcggttggaatttttttttttttttttttt

SEQ ID NO: 10161 - DNA, 201 bp, Artificial Sequence
  Description of Artificial Sequence: Synthetic polynucleotide
gtcgcgtcgtcgggtttcggggatatttttcgtcgtttttttcgattcgcgtcgtcggggtcgtcgggtcgtagggtacggggtcggcgcggggggggagcggagaggggttggggagttttaggggttcggggttcgttcgcgggggatgggtagggatttcgggtcgcgtggggtgcgggggtcgttcgtattgaggac

SEQ ID NO: 10162 - DNA, 201 bp, Artificial Sequence
  Description of Artificial Sequence: Synthetic polynucleotide
tttttttttaaaaagagttttttagagttgtcgaaattttcgcggggtgaaagttaaatttttggagtcgttgtgtagtcgggtagaggatacggcggcgcgagtcggaaagataagtgtttaggcgaatgggaaaggaaagattttaatttttgtttttattgttagttgaatgtttataaaaattaaagggaatgcggg

SEQ ID NO: 10163 - DNA, 201 bp, Artificial Sequence
  Description of Artificial Sequence: Synthetic polynucleotide
atggtttattgcgtaagtttatatttagttttaggaagcgagttttacgtcgttttagttttgtatttatagtcgttaagcggtttcggaagtcgaatgtcggataggttaaagatagcgtcgttgtttcggtattgtcgttagagggcgcggagtcgtcgtgttggtttgtattttttttgttacgttagtcgaacggtt

SEQ ID NO: 10164 - DNA, 201 bp, Artificial Sequence
  Description of Artificial Sequence: Synthetic polynucleotide
gcggttcggaaatgagcgtttttcggggatagggggttttgcggggcggcgatagttggatttttagcgcgtataaagtttgcgggaggatttattgtagcggtcgttttttttcgtttagcgagggcgggcgtaggggcgggggatgtcgaagggttaggtttgtttaggtcgcgttattttcgttttagacgtttagtt

SEQ ID NO: 10165 - DNA, 201 bp, Artificial Sequence
  Description of Artificial Sequence: Synthetic polynucleotide
tttcgagggtcgcgcgggtttaggcgtttacggtttcgtagcgtcgcgtttttcgcgagaacgtagagattcgggttcgttttgagtcgtcgattgcgggcgggagtcggcgggtaaggcgcgcggtcggtagtcggagcggcgcgtaacgtagttgagtgaggtcgtcggtggaggtacggagtagtaggcgttcggggc

SEQ ID NO: 10166 - DNA, 294 bp, Artificial Sequence
  Description of Artificial Sequence: Synthetic polynucleotide
tttcgcgaaggtttcggttcggtcgggcggggtggggcggtttcggttttattaattagcggtttgttgtggatgtcggcggaggagatgttatttagggcgggaaaaggggcgcggaagaggggcggggcgggttacggcgcgtagggtttttttttttcgtttcggatttaattaattgggtttgagtttttgtcggggagggggcgtcgggcggggtcgcggttgggcggggcgggggatcgggatcggcggcgggggttgcggttttgtagtggaagtatgggcggcgag

SEQ ID NO: 10167 - DNA, 201 bp, Artificial Sequence
  Description of Artificial Sequence: Synthetic polynucleotide
gtgtggaggtttacgtagcgtttttggttggaacggggaagtttgtatttagttttgggagtgggtttgggagagggaggaggagtcgtcgggagtttggcgggagggcggtgttttcgtttgggtttttttttgttgttttagtttcggtagtttttatagtagtttcgaagggtgagaatttgtttttttatggatttg

SEQ ID NO: 10168 - DNA, 201 bp, Artificial Sequence
  Description of Artificial Sequence: Synthetic polynucleotide
ttttttagtttttagagtaagttaattagggatacgttttcgtggtttagttcggaaataatgtttggtgggaatttgtaattttggttgtcggaattttcggggaggattaacgtcggcgtatcgtgcggtcggggcggggcgtcgtttaaatttaggttttgtgatagcgattgtggcggtttggaaagcgtgggtttc

SEQ ID NO: 10169 - DNA, 201 bp, Artificial Sequence
  Description of Artificial Sequence: Synthetic polynucleotide
aattatttttaaaataattttttcggggggtgagaggtaattataattttagcgagtggagggcgcgggggatgggcgtcgggcgggcgggggcggggagcgcggcgcgggtttttaggtggcgagcggaggtgttttcgtcgcggggggaggggcgggggcgtacgcggtcggcggcggggggaggcggcgcgcggggga

SEQ ID NO: 10170 - DNA, 201 bp, Artificial Sequence
  Description of Artificial Sequence: Synthetic polynucleotide
aggttttcgtatttatcgcgtgggtttttgttttggttttatttgttttcgatatttttcgttttcgcgatgtttaatttcggttcgagaaggttggtcgcgatttcgttcggtattcgtcgtttcgatattattattcgttttttcgatttttttcggcgtcgttgtttattcgtttttcgtttcgtttatcggggtcgt

SEQ ID NO: 10171 - DNA, 201 bp, Artificial Sequence
  Description of Artificial Sequence: Synthetic polynucleotide
ggggacgttcgtttttttttcgggtagttttttttatttaggcgggatttgggttttcgttggatttagggtcgttttttcgtaggcggggtcggttcggcgcgtattttgtttcggatgttttggcgtacggtttcgcgtttcgtttttattttggcgtatttggttttgcgtttttttttcgtttggcgtagcgttttt

SEQ ID NO: 10172 - DNA, 201 bp, Artificial Sequence
  Description of Artificial Sequence: Synthetic polynucleotide
tattttttttttgcgcgtttgtttttttttcgtttgtaggatttcgtttttggttcgttttttttttttttgttgggtaggttttttcggagtttattttcggcggcggcggcggtagtcgcggtcgcggtcgttggatttcgagaggcgcggggaatttttttattttttgttttggttttatttgtttttttttttttt

SEQ ID NO: 10173 - DNA, 201 bp, Artificial Sequence
  Description of Artificial Sequence: Synthetic polynucleotide
tagggaattataaaagacggtcggcggcgagtaggttggggtgacggggatttcgtggataacgggtttgaggacgtttagggttttagttttttttaggcgtttttcgtcggggtaacgtagagtagttgtcgtttttttcgcgttttagtagatggtggtgttagttcggtttcgtgttcggtcgtcgttgcgttcgcg

SEQ ID NO: 10174 - DNA, 201 bp, Artificial Sequence
  Description of Artificial Sequence: Synthetic polynucleotide
ttagataggtatggttaaggtagtttgtgatttattttataaaattagagatttttgttttttgtggagtaagatttttcggaggttagagtaggatgatcgttaatttttttttttagagtcggtttagtttgataaagtaggggttatttcggagtttggaggggaagagagtttaggtataaggttatttttgggaaa

SEQ ID NO: 10175 - DNA, 201 bp, Artificial Sequence
  Description of Artificial Sequence: Synthetic polynucleotide
gggcgcgcggcgttttttatttacgttcggtcggggcgcggcgcggcggcgggtattcggacggtcggcggaggtaggtcggttcgggtattagtttgggcggttcgcgggtcggggcggcggcggggtggcggtggcggcggtagtagcgcggagtcggtgggcgtagtcgcgcgttaggtcggcggtcggggtttgggg

SEQ ID NO: 10176 - DNA, 201 bp, Artificial Sequence
  Description of Artificial Sequence: Synthetic polynucleotide
tttgttatagataagttttcgaagtcgttttggtgtaggttatttggttttttagtttttggtgtgtggttagtgtttggtgtttttggaaagttattttcgggtagtttttgatagtgcgattcggcgtttaagtagtttgggattttgcgcggatttgatttttttagatcgtaggtagtttgggaggaggttcggtcg

SEQ ID NO: 10177 - DNA, 463 bp, Artificial Sequence
  Description of Artificial Sequence: Synthetic polynucleotide
acgtttgtgttgtatttggcgttggtcgacggcgcggtgttgttgtttacgtcgttttttgtggtttttttgattcggtaggtttggtcgttgggttaggcgggttgtaaggcggtgtattacgtgtgcgcgtttagtatgtacgttagcgtgttgtttatcggtttgtttagtttgtagcgttgtttcgtagttattcgtttttttttggcgtttcggttgcgtagttcggttttggttcgtcgtttgttgttggcggtttggttggtcgttttgttgttcgtcgtttcggtcgtcgtttatcgttatttgtggagggatcgcgtatgttagttgtgttattcgtcgtcggtttacgtcgtcgtttatttgagtttggagattttgatcgttttcgtgttttttttcgggttgatgttcggttgttatagcgtgacgttggtacggttgcggggcgttcgtt

SEQ ID NO: 10178 - DNA, 201 bp, Artificial Sequence
  Description of Artificial Sequence: Synthetic polynucleotide
atcgggagtgtttagcgattttaggttagttcgggggaaagaagcggtcgtcgtcgtcgaggttttttggtttcgggatttcggcgttgtttttttttttcgtatttgttggggtgggttggagtcgtaatcgaatttcggtcgcggcgtttgtaaagtttttttttcgaagtttcgcggttttagtttattggcgttttt

SEQ ID NO: 10179 - DNA, 201 bp, Artificial Sequence
  Description of Artificial Sequence: Synthetic polynucleotide
gttttatagtttcggttagaatttggtgggggacgcggggggggggtgtttgacggggagggggtatagttttttcgggttaatttttatatttttgtttcgtttaggcggggggtgagtcggggtgagtagtcggttttaagttggtcggttttttggaaagggagggttagtaggagaattgtagatttttttagtttt

SEQ ID NO: 10180 - DNA, 201 bp, Artificial Sequence
  Description of Artificial Sequence: Synthetic polynucleotide
gggatcgttttaagtagttcgttaataacgtggcggtggtgaaggagttcgacggcgttaagttcgtggtgttgaggaagaagtttcggttttcggagttcgagttcgtatttttcggtttttcgggggtagcggtttagtcgtcgaaatttatttcgacggttttgtcgcggagcgtttttgtttcgggagtttcgtttt

SEQ ID NO: 10181 - DNA, 201 bp, Artificial Sequence
  Description of Artificial Sequence: Synthetic polynucleotide
gtttttagaggtttagttttgttttttattatatatagttattattttattcgtttttggggttcggttgtttttttcggtgttttttaaatttttttttcgatttgggtgttaagtttatttatttttcggcgtcgttttcggtcgaatagttttttgtttttttttcgtttgggtcggagtttttcgtagtttttttcg

SEQ ID NO: 10182 - DNA, 201 bp, Artificial Sequence
  Description of Artificial Sequence: Synthetic polynucleotide
ggttcggtttggggttgggttggggagcgcggcggttgcggttggggtacggggcggtcgggtgagttggtcggcgttcgttttttttatttagtgagtacggtagatatcggagacgcggggtttattttttcggttttttttcgattaagaaacgttaatttcgttttttattggttgcgtcgcgcgttatgtcgatta

SEQ ID NO: 10183 - DNA, 201 bp, Artificial Sequence
  Description of Artificial Sequence: Synthetic polynucleotide
atcgagtttaaaagtcgtcggcggtatattttagcggttttttttttttcgggttgggattcgtttttgtaagaaacgttatgtttttttttttagatatcgtttcgggagttttagatgtaaaattagaggttttttatttggtattattgatttttgtgttaataaaatgttagtttttaagggaaaatttaaaaaaag

SEQ ID NO: 10184 - DNA, 201 bp, Artificial Sequence
  Description of Artificial Sequence: Synthetic polynucleotide
gtcgcgcgggacggggtagggatttcgagaatatcggggatttgcgggtcggtggtttcgggtaggttatttttgacgcgggtgcgaggtttttcgcgggcgtgtacggttgggtcggagtcgcgtcgggggtcgggatacgtttggggttagcgttggcgtcgtcgttcgggtggggtgggtcgggttcgggtttagttt

SEQ ID NO: 10185 - DNA, 201 bp, Artificial Sequence
  Description of Artificial Sequence: Synthetic polynucleotide
ggcggcgcgcggtagagttgggtttttcgttaggtggtcgggggtgtgtttttagggtattttattcgttattttcgcgtttttagtttcggcggtcgcgcggatttcgtttttgttgatttcggcgtacgttttcgcgtcgcgcgtagtttttcgtttttcgtcgatttcgtcgcgtcgtcggtagttttttttagtttt

SEQ ID NO: 10186 - DNA, 201 bp, Artificial Sequence
  Description of Artificial Sequence: Synthetic polynucleotide
ttttttttttgttgttttaaaatatttttcgacgttagtaaaatataatgcgtttcggtcgtcgtaaatagtcgggagggagagtatatattcggcgcggcgcggtcgtcggttcggtttttatttttttttcgtttttagaaaatgttataaaagcgggtagggcgcggggagggcggttgcgcgttcggcggtcggggt

SEQ ID NO: 10187 - DNA, 201 bp, Artificial Sequence
  Description of Artificial Sequence: Synthetic polynucleotide
agttaggaaatgcggggtttggtggggtgaggagtacggggttttttttttattttcgcggggattttgttatcggtttagtgtggaggttttatcgtttcgttcggattcgtggggtttcgatagtgtggtttttgcgaggattttttttatttttttcgttttggggttgttgcgggagggcgttcgggtagtattagg

SEQ ID NO: 10188 - DNA, 258 bp, Artificial Sequence
  Description of Artificial Sequence: Synthetic polynucleotide
gcggcggtagcggcggtttggtttttttagagggttagagttagggatatgcgggcgttcgggatttcgcgtttcgcgcggttcggcgtttgagcgttttcgtttttcgtttcggagttgtcggcggtatgattcgatacgtcggggcgttcgcgcgcggggattttacggggtaagttcgggcggtcgtttttttttttttcgcgatttttacggttcgcgttttggtcgttttattttattttttgttttagagag

SEQ ID NO: 10189 - DNA, 201 bp, Artificial Sequence
  Description of Artificial Sequence: Synthetic polynucleotide
tcgacggttaaggaaagtttattagtttttcgtatcgtgggcgacgggttaagattcggttttaaacggttagatttagtttttagtcggttgtcgttttcgttttacgtaggcgcgtttcggggttttttttttttttatcgcgcgttcgcggggttcgacgggggcggagcgattttcggaaggggcgtggcgatcggg

SEQ ID NO: 10190 - DNA, 201 bp, Artificial Sequence
  Description of Artificial Sequence: Synthetic polynucleotide
agggggacggttagacgggatgtcggaagttaagggacgtagaggtcggcgggtggcggcgatggagaggatagattcggtttttagaggaggtcgtgagcgcggggtttgcgtcggtcggaggagggattcggggggttgtaatatggttgttcgggcgtcgttttttttttgttaagttagggttttggggagttgttg

SEQ ID NO: 10191 - DNA, 201 bp, Artificial Sequence
  Description of Artificial Sequence: Synthetic polynucleotide
ttcgtcgcgtttcggtcgggatggatttatacgttcgatgagtttcgcgtcggcggttgcgagcgtcgagtttttttttgttgcggttttagtcgtttttcgcgcgttcggtttcgcggattaggatttttgggtttttcggttgagggcgcggtcgtttcggagaggtcgagcggggacgggttcgagatggcgcgggga

SEQ ID NO: 10192 - DNA, 201 bp, Artificial Sequence
  Description of Artificial Sequence: Synthetic polynucleotide
tagttaggatagtataaaatttttttatcgtttattttttgtaaaaaatcgtggttttcggcggattttggagataggaggtgtaaagggcgtttatacgcggttcgggttcgcggtcgagagttggggggatttggagcggggtcgggtcgtaagaagattttgattttgtttcggcgttggggcgcgtgttaagggttc

SEQ ID NO: 10193 - DNA, 201 bp, Artificial Sequence
  Description of Artificial Sequence: Synthetic polynucleotide
tgtcgggttcgacgtgtatagtttagcgtttttttttattagttattgtttaggtttttcgattttgtattcgtcggaatgagagaaagtagtttttcgtcgtttagttttcgggtagttgtttcggtcgggttttgcgttggtgagaaagttttatttagaggcggtcgcgcgtaattgtaggcggcgttttaggttcgg

SEQ ID NO: 10194 - DNA, 201 bp, Artificial Sequence
  Description of Artificial Sequence: Synthetic polynucleotide
cgcgggtaaggaaagcgcgtaggttttgtagatttttttatttcggttttttggttcggttcgttttttcgtttcggggcggcggttttttgttttgtagcgagcgttcgtaggagggacgttaggatttcggacgttatttttgaggtttttttgtatttgggtttttgatagtcgggaataggtaggaggtggggcgag

SEQ ID NO: 10195 - DNA, 201 bp, Artificial Sequence
  Description of Artificial Sequence: Synthetic polynucleotide
gtgggaggtcggtagcgcgggcgtcgcgttttcggaggagttcgcgttttttgaggagcgcgcgtgttcggaagagttcgcggcgtcgtttttcgaatcgcgcgtttggtttgaggatttcgcgtttttcgaggagttcggggagttcgcgttcgtattttcggggttcggggcggtgtacggggagtcggatttggtgtt

SEQ ID NO: 10196 - DNA, 201 bp, Artificial Sequence
  Description of Artificial Sequence: Synthetic polynucleotide
agtgcggatttcggtcgcgtgcggttttgatcgcgtcgttttatttttggcggggttacgtacggacgttatggttggcgtcgcggagtcgggcgatgcgcgcggattttttcggggttttgattgtttttgagttttttttgcggggggcgtgcgcggttcgtttttcgcggcgttacgcggttttttttcggtcgggga

SEQ ID NO: 10197 - DNA, 201 bp, Artificial Sequence
  Description of Artificial Sequence: Synthetic polynucleotide
gtttgcggagggtgggattttatagtttgtttatttgtttaggttgagatttcgtgttttagttttggatgttttacgggtttttcgtttcgggtagcggcgtacgggaggagaagattttcggtttgtagttagatttttttttgagattttttttagtttaggtttagagttttgggatttttttcgattttttttagt

SEQ ID NO: 10198 - DNA, 201 bp, Artificial Sequence
  Description of Artificial Sequence: Synthetic polynucleotide
tcggttttttttttcgcggggggtttcgtttcgcgtttcgttttttcgggttgtagtcggtagtttacgtttagggagggtggagggaggaggagaggcgcggagaggagggaggggagaggggagggaggaaggcgagagaaagggagttgtttttatttcggattttttagagtttgtttggagcgcgtatttagcggt

SEQ ID NO: 10199 - DNA, 203 bp, Artificial Sequence
  Description of Artificial Sequence: Synthetic polynucleotide
gcgagcggttacggggtggggagtaaggggcgcgcgggcggtaggtatggaacggacgcggcgtatttcgtttatcgcgggacgttcggacggcggtcggcgcgcgcggttcgtttcgagttcgagagggcggggagataatgtttgttcggcggggtagtttaggtcgtacgttttcgttcgcggatacgggtcgtttttat

SEQ ID NO: 10200 - DNA, 201 bp, Artificial Sequence
  Description of Artificial Sequence: Synthetic polynucleotide
tcgtggagtcgcgttaggttacggggtttcggttagacgggagcgttagtttttttttttgtttcgatgtttttaaatttaggtttagttttttttttttcgattcgatgatatttttgggttttagaatgttgttgggggcgggagatcggagaagaagtaggtgtacggggaggtgggtgttttgttttttgcgaggag

SEQ ID NO: 10201 - DNA, 201 bp, Artificial Sequence
  Description of Artificial Sequence: Synthetic polynucleotide
tttgggggggcgggtcggatttgaaggttataggtttttttttgcgtttattttttttgtaatttttatagtttttttcgtcgatttttttatgttttttcgtttttttgttcggcgttttttttcggtcgcgggttaattggttgtgatagttggagttttgggtagttgagcggtgttattgtaaattaggtaggcgtt

SEQ ID NO: 10202 - DNA, 201 bp, Artificial Sequence
  Description of Artificial Sequence: Synthetic polynucleotide
ttggaagggcgggggcggtgatagcggtaggggcgggattcggaggcggggcgtttgtttacgtcgtttagtagcggagggaggcgcggttttagtttcgcgtttaggagtcgtataggcgttcggggtcgtagtaggagtttttttagggcgtttagcgttgtatttacgagtcgcgcgtcgttttcgtttagtgcgttt

SEQ ID NO: 10203 - DNA, 201 bp, Artificial Sequence
  Description of Artificial Sequence: Synthetic polynucleotide
tcgtatttcgttcgtttgttttttatcggttaggttttgtcgggtcgtcgcggtttcggcgttttattttttttcgggttagcggggggttgggagggggcgaggaggaagggggtttttttttttttttttcggagggggtcgtagcggcggtttcggtttttttttttttttatattttttttcgtttttttttatttg

SEQ ID NO: 10204 - DNA, 201 bp, Artificial Sequence
  Description of Artificial Sequence: Synthetic polynucleotide
tcggagggagggggtaaaggaagaaaaagaaagcgcgttcggaaagtcggtttgggttttgttaattattttgaaggtaaagtatttgtatttttttcgtcgaggttggttggcggcgtcgcgttggaggggaggaggttcgggaggaggaggagaaagagtagcgggaggattcgggttgggaggggagcgtagggttgg

SEQ ID NO: 10205 - DNA, 201 bp, Artificial Sequence
  Description of Artificial Sequence: Synthetic polynucleotide
tcgtcggggagtcgtaaagtttgacggaagaggttgcggttttcgcgttttagtcgtcggttttcgagtcgtagtcgggcgtttttttgacgtagtcgcgcgttttgtcggttttattcgtttcgcgtacggatggtttttaagtggttcgtcgttaggtcggtaaatcgtttttttagttgttgtcgggcgtcgttcgcg

SEQ ID NO: 10206 - DNA, 201 bp, Artificial Sequence
  Description of Artificial Sequence: Synthetic polynucleotide
gcggcgggacgttatttgcgatcgggattatgaggagttgttagattcgtggggtcggtaacgagagtagtcgcggtatttgttgagaggaaagagggagcggttcggcgcggttggggcgcggtagaggtttgttcgattttcggttatgttattgttttgcgtgcgcggtgagtgcgcggattgaggcggggaggcggg

SEQ ID NO: 10207 - DNA, 201 bp, Artificial Sequence
  Description of Artificial Sequence: Synthetic polynucleotide
gcgttagatttttttattatatttttttattttaggcgattcgttttggtttcgggtgtttttagtttgcgcgggtcgtttttagttttcggtggatattcgtttttagttcgtcgttttttgttcggttttgcgttttttggaatttttgggtttttagttttcgtcgtttttagaattgcgtttgcgtaataatggtta

SEQ ID NO: 10208 - DNA, 201 bp, Artificial Sequence
  Description of Artificial Sequence: Synthetic polynucleotide
aattattagagaatttttttaaaaatatagattcgatgaggagtggttttttcgttttttttttgtgtcgagaagggatttcggtcgttaataataaagacgtttttcgttttttttttttcgtcggttcgggttcgtttttttcgcgttgcggttttcggtttagcgtttttttttcgagtcgggttgcggcgtttttaa

SEQ ID NO: 10209 - DNA, 201 bp, Artificial Sequence
  Description of Artificial Sequence: Synthetic polynucleotide
ggagggtcgcggagacgtaggcgtttcgggtcgttcgcgttgtttttgtttgtttcgtgcgggagtcggggtttttggttttttggttttttggtttttgcggttcgggcgaatttagagcgtattcgtacgtcggtttcggtcggtttttagcgttcgggttttacgggtcgcgtttttacgcggcgttttttagagatt

SEQ ID NO: 10210 - DNA, 523 bp, Artificial Sequence
  Description of Artificial Sequence: Synthetic polynucleotide
ttgcgttaagttttagaattatttagtttcgtgtttgtcgttcggggttcggtttcgtttcggtcggcgtttatttggcggtgtcgttttcggaagattacggcgaaggtttcgtgttttacgagattttttttgttgtattcgaagttatttattatttttatggtcgcgttttcggggtatatagcggacgggcgggcggcgtagtgcggcgtaggtattagtatcgcggtttcgcgggttcggagcgcgttagcgtgcggcgggtttggggtagtcgtagtttcgggttcgggcggatttttatgtcgagagatcggagcggaaattggggaagttgtcgcgcggagttagggttagcgaggttcggttcggtttttgtcgtttatggttcggtttgtcgtcggtcgttggttgtttggcgaagcggtttcggcgttgtcgggttaggggtgtcgttatcgttattgtgcgcgtttagagtcgtatacgcgttttgaggtagtgaggggttcggtatttt

SEQ ID NO: 10211 - DNA, 201 bp, Artificial Sequence
  Description of Artificial Sequence: Synthetic polynucleotide
cggttcgtattttttcgtcgttagttttagttttaaattcggcggtttagcgggcgtattatggtattggagtagcgcggggagcgcgttcggagtttcgcggttcgttgcgtttcgttcgggatttcgttgcgtcgcgcgtttttttcgcggttcgcggggtcgtttttgtatttttattttttttttcgtttgtcgtcg

SEQ ID NO: 10212 - DNA, 201 bp, Artificial Sequence
  Description of Artificial Sequence: Synthetic polynucleotide
gttttcgtttaagtgtggtttttttgggtttatattttattaggttagtaaggagggggatagcggggggcggggtaggtgttgggatttcgggtaggtgcggggaaggtagggggcggggggggaaggggttgggcgatgtaggtgttgggggtcgggatagttgcgggggtaggtaggtatcgggaaggcgggagggcg

SEQ ID NO: 10213 - DNA, 201 bp, Artificial Sequence
  Description of Artificial Sequence: Synthetic polynucleotide
cgtagattttgggtttcggttttgttatttagggggattttttttaacgatgggatcggtgttcggagtggagtatggggagtgcgttttcgggagtcggcgttggtcggatatgtgataattgtgggtcgttggaggttcgtttgcgttgggatagggtttggattttacgtgcgtcgtttgtgtttcgttagatcgggg

SEQ ID NO: 10214 - DNA, 201 bp, Artificial Sequence
  Description of Artificial Sequence: Synthetic polynucleotide
gggtcggtttcgcggtcgatttggggtatcgcgtcggggtgaggtttggcgaggaggcgaaggttgtaggcgtgaggtgaaggtcgtaggtcggtcgggtcgattttcgttatgtaaatatcggtgagggggggggagggacgggggataagatggcggcggttcggcgtttgttgtaggggacgatagagggggttgtcg

SEQ ID NO: 10215 - DNA, 201 bp, Artificial Sequence
  Description of Artificial Sequence: Synthetic polynucleotide
ttttcgcgtttttttcgcgttttatatttatcgttcggcggagggggtttagttcgtagtcgtcgtcgttatcgtcgcgtttcggtttcggtgtaggtagcggtcgtcgtcgtcgagatagttgcgcgggcgagtatttttacgtagtaagttcgtttttttttcgtttgtgcgcgcgtgtgtgtttttcgttcgtcggcg

SEQ ID NO: 10216 - DNA, 201 bp, Artificial Sequence
  Description of Artificial Sequence: Synthetic polynucleotide
gcgggggttttttacgtggcggaggtttttcggtttgggggttacgggttcggaggaatttgtttggaagttttttattacggtagagttttttggagttcgtttcgtgttcgataaggggagttttagatttgatttttttagtagtttcgcggggcggggtcgagaaggggcgggcgggcggaggacgttggcgggaga

SEQ ID NO: 10217 - DNA, 201 bp, Artificial Sequence
  Description of Artificial Sequence: Synthetic polynucleotide
aatgtgattatagttaatatatgatttttttagcgttttagttagtgttttttttgatttttgttttttggagaggaggatggaagggaggggttcggtacgttgttggtattttgttgtgttttgtagttttttttcgggatatttgggtttatatagttttttagtttatataattggtgtagattttttgtgtggaga

SEQ ID NO: 10218 - DNA, 301 bp, Artificial Sequence
  Description of Artificial Sequence: Synthetic polynucleotide
tttttttttaatttttggcggcgggcggttggggaagtagttttgtggtttttcggcgggtgaggtcgagatagagattaatttttaggcggcgttttggcgttgagttcgcgttgaataagattttttcgtagttttgcgtttcgcgtcgggtgaaggggcgtgtttttgtaggcgttcggggttcggtttggagttggcggtcggtacgtcgtttttggcgttttttgttaattaagagaaatacggttaaatgagtgcgttgggatagaaatttatagttaattaaggttttattcgt

SEQ ID NO: 10219 - DNA, 223 bp, Artificial Sequence
  Description of Artificial Sequence: Synthetic polynucleotide
gcgggggcggcggcggtcgtgagtttcgatgaggttcgagcgttttcggtcgcgcggtagcgttttcggttcgatggagatttcgtcgtgggatttagttcgtaacgattcgttgtcgtttacgttgatttcggtcgtgtttttttacgtgaagtttggttttatcgtcgtttatatcgtgttttacgcgttgtttttcgtgtttatttacgtgtagttttgg

SEQ ID NO: 10220 - DNA, 720 bp, Artificial Sequence
  Description of Artificial Sequence: Synthetic polynucleotide
gatagtcgtgttttattttcgttttgtgttttttttttcggatagtgttttttttagggtttatttaggagggtgtagcggtggttttcggggcggtggtcgtggtgggggtgttagttgtaggggtgttttcggtgggtgggagttggtggtttttcgttggtgttatgggattcgtatgttcgttttgcgtttttcggtttttgagtttataggtcgggattttgtttgttagtcgcgtgcgttgtcgtttaatttttgtaggcgtagagcgcgcggcggcggtgatagagaattttgtttggttgtttaaatatagttttttgtagaaggattttgcgttcggggaaggggaggaatttttttttttttgggcgttcgtttttttcgttatggttcggtttttatattcgtttatatttggtcgtagcggggcgttcggggggaggggttgaggtcgcgtttttcgtcgttttttgggcgcgggttaggcggggaggaggggggcgtttcggtcgtgtgtttaggattgttttttagcggttattcgggttttagttttttaggtttggttttgataggcgggcggagtagttagtgcgagatagggaggtcggtgcgggtgcgggaatttgattcgttcgggaggcgggggcggggcgggggcgtagcgcgcggggaggggtcggcgttcgttttttttttttatttatttagttg

SEQ ID NO: 10221 - DNA, 1683 bp, Artificial Sequence
  Description of Artificial Sequence: Synthetic polynucleotide
tagtggtagtgttgagtttaggaatacgcgcggagttcgcggcgattttcgcggtcgtttagttttcgcggcggatttcggcgcgtaggagttattgggtcgtaagggcgtcggggagcgggaggggcgttgggggcggtaaggggttttagattttaggttacgaattgtttttttttttttcgggtaagagtttcgttttttttaattgatagaaatttattggggtaggggggcgagtggggagagaggtcgtttagggttcgttattggttgcgtttttttcggttttggtttgggaagcggttttgggtttttcgggcgagtagtttgggcgtcggcgttttttgcgaggaagatcgcggggtgacggtcggtattcgttcggttgggtcgcgttgtcgtttcgatttatttttttttcgcgttcgcgtttttttttttttttttattaggagttcgggattcggagagggcgcgggaggtaggtatacgggttcgattttattttagcgtttatcggggacgcgggcgggcggcgacgggacgcggcgggggcgcggggcgggcgcggttatggagtagtagcggcggcggcggcggcggcggcggtaatattagcgatcgcgggcggacgagcgggcgggtagggtcgtcgggtttagcggatcgaattgtatagtttagtaaaagcgttttcgtttttcgcgcgtcgttttttgcgagtttaaatttattaatattttttaacgttttaatttattttttgaagaaaagtaaaaaaaaaaaaaaaaaaaaaaaaaaaagtaaaaaaagaaaaagtattgatcggagagacggggatatatatatatatatatatatatatatatatataaaattttttttggtttttgttaaaattagtagggttcgtcgcgcgtttgtgtgttagtgtgtgcgagtgtgtgtgcgtgcgggcgtgtgtgtgtgaatgtgattattttaggatttttcgggtttcggagacgttatttttttttttgatatttttttttataaatcggtggcgcggcggaggcggtagagtcgggcgggaagcgcggggtcggtcggggcgttcgtcgttcgtcgtcgttttcgcgcgttcgggggtttcggcgtttttcgagttagggcggttagttcgcggttcgtcgtttgatagatgtttatcgttatggagttgtcgtagtagtatttttgggggttcgggcgagcgacgggagtcgggatttgagcgagcgtcggggttagcggagtcggagtcgtcgggatatgggtgagtacgcgcggcgattttggttcgggagttcgggcgtttagttttttttcgcgtcgcgggttttcgtattttcggaatcgggggcgacgtgtgtgttttgtatgtaaaagtttacgtcgttttgttgggtttttgattttgtattcggcgggaagggggagatcgggtcgagggggcgggatgtcggttcgggcgaggttgtaggagatgggcgcgatttcggcgggtcggcgggtgggcggcgatgttggtttaattggagtggttcgttggtggcggcgatggtggaagttttgggttggagggttgggagtttattgagtttcgtttaatttgatttatttttttttcgtttttcgttttttgtattttttttcggt

SEQ ID NO: 10222 - DNA, 233 bp, Artificial Sequence
  Description of Artificial Sequence: Synthetic polynucleotide
tttcgttcgggtcgttcggttcggttgtgttttgttcggttagggcgggcgggttcgtttttttttcggtcggcgttttttttttggtttttttttttttcgcgtcgttcgttttcgtttttttcgttttttcggcgtcggcgtagttttcgtgaattcgggcgtattatttcgggtgtttcggtttggggatcgttgtcgtttcggtcgttgtttttttaatttttttgttt

SEQ ID NO: 10223 - DNA, 213 bp, Artificial Sequence
  Description of Artificial Sequence: Synthetic polynucleotide
gattgcgcgtgcgtagagtacgtcggcgcggtttcgggattttcgcgataattgtattgagataaagtgtggtaattcgagttggttggtgatttattttcggcgaggggttcgcgtgtgggttacgtcgtcgtttttatcgggaaagcggggattagtggggggggtttagttgtagggtagtgggaggatgttgtttgttttgggggaagg

SEQ ID NO: 10224 - DNA, 236 bp, Artificial Sequence
  Description of Artificial Sequence: Synthetic polynucleotide
ggtagcgtcgtttgcgtcgcgtttagtacgaagagttcgttttagtttaggcgtagtagcgttatttggtcggttatcggtagttcggggaagaagggcgcgtggcgcgtttattttacggtgttgaagagtagtcgcgtcgttagttcgtatacgttgtcgatgtttagtatcgcgttcgtcgcgtcgttttttgcgtcgaagcgttcggtcgtcgtagggtagggtttagcgcg

SEQ ID NO: 10225 - DNA, 233 bp, Artificial Sequence
  Description of Artificial Sequence: Synthetic polynucleotide
gagggtggggttttaaacgttatttaattagcgacgttgggttgggaattgtttaattaggtacgtagtttgagcggagaggacggttttcgggatgtggcgggatttgttcgtttttttgtttttggttgtcgttggaatttcgggtttcgtttttattgttttgtgttttttgtttttagaggtttagtttttggttttgtgatttgtaggtattgggaatttatagttaa

SEQ ID NO: 10226 - DNA, 737 bp, Artificial Sequence
  Description of Artificial Sequence: Synthetic polynucleotide
aatgacgtcgtaaataatagtattaattattatcgttcgtagttttcgcgtatagaggttttaggttttcggttttacgtggatcgatttcgttcggtagcgcggggttattttatcgcgagtttttttcgtagttcggttcgggttatttcgattcgttaggtttaatttaataattataatatcggaaaaggaagtaaaggtcgaagtttattcgcggttttgaggtttgtgggaaacgtagtttaataacgaaagagttttgaagtttaagcggagttcgttggtcgtaggggtcgtattacgttttagattttggagttttcgggtgcgtagatttttgttattagtagaggttgtcgttgcgcgttttttaggcgcggaagaggcggttggtggtttttgacggtaaggtgaagtcgaggtagtaatcgggaatttaggttgggaggatagaatggggaataggaagttggggcgagggtggttttgggggaggtggggggtcgcggaattttaggtggtttttgttttatttttggaaagaatcggaagttcgggtcggggagggtgaagggagtcgcggattcggttgtttagtcgaggaggaaattcggattttaggttgagggaggtcgaagaaggaattggagggtcgggttgggaaggtttgaagcgggtatagtttttaggttggggagggtcgaggggagaattcggagtttgagtcgggcgag

SEQ ID NO: 10227 - DNA, 308 bp, Artificial Sequence
  Description of Artificial Sequence: Synthetic polynucleotide
tttataggtcgagtttacgagtttttcgaggggtgagcggttcgggttttttggcgttttggtcggttagttaagcgttggattatattttttagaggtacggcgttcggagcgttggattatattttttagaggtatcgttttcggagcgtagttttattttcgttagtttgcgagatttggaggtttcgcgtggggagagggtcgcgtttgtggaggagtttggtttcgtatttgttgggttggcgaattcgaaattgggtttggaattcgggagttagattttggattttgaattgtatttttgt

SEQ ID NO: 10228 - DNA, 1100 bp, Artificial Sequence
  Description of Artificial Sequence: Synthetic polynucleotide
ttggttttacgtagcgtttgtagattgtgagttcgtagggtagcgttatcggtttatgtagtagtcgtcggtagcgcgggtagtcgagtaggtcgcggggcgcgcggggtttcggggtcggttttttttcgtcgggcgtttcgggttcgtcgttcgggtttttcgcggatagcggtcggtcgcgtaggtttacggcgcgtattaggtcgttcgttagtttttttagttttttcggtcgtagcgtttcgagtcgcgcggcgtcgcggaacgcgtttagggtttcggggaggcggtcggcgcgggttagcgcgttttttagttttaggtataggtcgcggttcggttgcgttagttcggttagtatggagcgaaagagttcggttgttatttcgtagtcgttcgcgcggaaggtttcgtcgtttttttttaagcgttgggcgatcggtttcgcgcggtcgtagttaggatattggggcggcggcggcggcgggatcggttcggggtttattatcgcggggttgcgacgacgcgggttcggagcgaaggcgcggagtagggaggatgcgttgttgttgggaattggtcggcgggagcgcggttttagttttcgttagtagttacgcgcgtttgggggcggcgcgttgcgagcggttgagatcgcgggcgggggcgggcgtttggtttgggtagcgtttttagcgcggtgtgggcggcgagtttcgtagggttgtaatcgtttcggggtgggggtcgggataggtatcgcgggcgtaatttgagtttttgtttacgcgtagcggttttttagtttcgtcggtttaggtaatttaggtcgttgcggtaacgtagtgatcgcgttttaggttcgcgttttttgcgatgttttttttattcgtttgagggtttttgcgcgattgcgcgcgcgttttttgtttgtcgttttttcgtagaggtgtcggggttttgggagtaggtggttttggtcgcgggttgttggcgcgtcggtatcgcggtatttgtttttttttagaggtttggtcgtttttataatttgtggtttcgtttaagtaagaatttaggaaaagttattaaacgtatta

SEQ ID NO: 10229 - DNA, 214 bp, Artificial Sequence
  Description of Artificial Sequence: Synthetic polynucleotide
ggcgagagtaaaaaaaaaaaaaaaaaaaaaaaaaaaaattttaattgtaaatattatttggaggtgggcgagggcgcggcgtgcgcgcggcggcgggtggcgggcggcgcgggcgtttttgcggggattttcggttttttagcgcgttttagtggacgttttgtttttcgttggtttttcgtgttcgttataatttgtaatatattattttttt

SEQ ID NO: 10230 - DNA, 582 bp, Artificial Sequence
  Description of Artificial Sequence: Synthetic polynucleotide
ttttttcgcgtgcgtttcgtatttgtcgggggttcgtattcgttttcgtcggggttttagggggtacgacggtcgtggttcggcgtttttgggaggggagcgggatattttcgaaggcggcgcgttggaggcggggagcggtcggggcgtacggagagggcggggagttcgcgggagggggaggagggggaggagggggaggaggcgcgaggtgggggggagcgcggcgggcggtagggagggagcgggagggaggtaagaaagtagtagaaagtgaggttggtaggcggcggtaaaggagtcggcgcgcggcggcggtaggaagtttgtgttcgagaatagtagaaataagagttagggagggatcgcggtcgcggcggcggcggcgagagcgaaagaggaaattgtagaggaggaagttgcgtcgtagttcgagtcgttcggtattttcgtcgtttttgcgttcgcgtcgcgttttcggcgttttttttttagcgcgttttcggtcgttttttcgcgtcgcgttcgtcggttatggttcgggagaacggcgagagtagttttttttggaaaaagtaagtt

SEQ ID NO: 10231 - DNA, 203 bp, Artificial Sequence
  Description of Artificial Sequence: Synthetic polynucleotide
ggcgatattcgcgttagttttcgggacggttgggttcgggttggtcgtcgattttcgattttttattagatgtttggtagagttcggcgcgttcggagttcgcgttttttagagggaaggggtcgcgcgtcgtcgcggcggttttgaggttgacggtcgggaggtgaaaggtcggagtgcggggttaggacgttttttggagg

SEQ ID NO: 10232 - DNA, 823 bp, Artificial Sequence
  Description of Artificial Sequence: Synthetic polynucleotide
cgagttattcgtatttttttttaggagttatagttaggttagaagagtgcggagggacggggttcgggaagagtagggaatttttagagttcgtagttaacgcggaggtgggcgagcgggcgtgcgcgtatttatttgtcggcgcgagggagtgtcgggggggaagggagtggtttttaaaagggggaggggagaaggtagggggcggggagaagtcggttttttaggattcggttgcggcggcgagggaggaggaagaagcggaggaggcggttttcgcgttcgtagggtcgtgttatttgttcgttcgttcgttcgttcgttcgttcgttgcgtcgcgttgtcgatcgttagtatgttgtcgagagtgggttgtttcgcgttgtcgttgtcgtcgtcgtcgttgttgtcgttgttgttgttgttattgggcgcgagtggcggcggcggcggggcgcgcgcggaggtgttgtttcgttgttcgttttgtatattcgagcgtttggtcgtttgcgggttttcgtcggttgcgtcgttcgtcgcggtggtcgtagtggtcggaggcgttcgtatgttatgcgcggagttcgttcgggagtcgggttgcggttgttgttcggtgtgcgttcggttggagggcgaggcgtgcggcgtttatatttcgcgttgcggttaggggttgcgttgttatttttattcgggtttcgagttgtttttgtaggcgttggttatgggcgagggtatttgtgagaagcgtcgggacgtcgagtatggcgttagttcggagtaggttgtaggtaacgcggtttggaataagtagttg

SEQ ID NO: 10233 - DNA, 293 bp, Artificial Sequence
  Description of Artificial Sequence: Synthetic polynucleotide
tcgcgcggtttttataatgtagggatttttttgagtggtggtcgttttcgttttagttttcggttattcgtagttttatatcgggttattggtttattatcgagatagttagcgagtttaggcggtttttgtagcgttgggagaggaatgtgcgcgaaattaattagagcgaaattagtcggaggagtcggtcgaggtgtaggtgtaggcgtagtttcgtttagaattttttcgttatatttaagggagttggaagttcgggagggtgttgttttttttttttaggaatagag

SEQ ID NO: 10234 - DNA, 262 bp, Artificial Sequence
  Description of Artificial Sequence: Synthetic polynucleotide
cggacgcgttgattggttttaggggaagcgggaggcgagaataatggtttttttttttcgttaaaagggagcggttgtcgggttcggggatagggacgcgcgtgtagggcgtagagttgggtcgagtcgtcgtcggcgttacgcgagtttcgtagtcgtcgcgttcgggtaatgggtcgggggtattgagggtcgtcggggtcgagcgcggaggggggatcgagttagtgtcgtgttttcgggtcgcgttaatatgtttcgc

SEQ ID NO: 10235 - DNA, 240 bp, Artificial Sequence
  Description of Artificial Sequence: Synthetic polynucleotide
tcgttgcggggtggagggattcgcgttttttagtttttcgggttcgggtcgcggggatcgtgcgcgcgtttttttttcgggtaaggtcgggcggcgggcgcgtcgcggtttttggggttttcgtttttttgttcgttatcgtttgcgggagtttttggtttggaggggttcggggcgcgttggcgattgcgggttcggcgataggggcggttggtggcgggaggatagtgggaggaaggt

SEQ ID NO: 10236 - DNA, 1240 bp, Artificial Sequence
  Description of Artificial Sequence: Synthetic polynucleotide
agcgggtcggggtcgtcggttaagtttttgtttggggacgcggcggcgcgtcggagagtttcgaggttgtttgtatcgttttagagttttgggttgtgttcgcgtagggatcgggtcgggtagagtcgggcggggtggagaggtaagcggagcgcgcggtggggttgaggggaggcgtggggcgagtgttcgttgttcgttttttagtttttttgtttttacgttttttcgttcgtagtcgttcgtagttcggcggtgtagttgtgttggattcggcggcgtcgtagttttttatcgttttttgatgttattggggtgcgggggttcgggcggttcggtgcgcgggttaatagttgtacggttttcgcggtttagcggcgtagggcggggcgcgtttgatagttttttcgtttttcgcgttagttgattggcggttcgagcggtttcggagcggcggaggtttggcggagcgttggagcggagtgggacggttagtttgggtttattttcgtattttgtaggtttcggtttacgtacgttcgtttggagtgcgcgttttatttttaggttaaattatcgttttttttttttcgcgtattttttttttttagttttttttgtattttatttttatttcgtgttatttttaaggaggtttagaatgagcgtcgggataacgttttttgggttttttgtttttaagcggttttcgtttagtgggcgacgttttgtgtgttttcgcggtttttggtcgtgtgtgtcgtgcgtttttgtttttggagatttgcgcgtatttgtatgttggggagggcgggttcgaggtttcgagagttgtgtttagatttaatttttaattttaggggattttttttaggttaagcgagggttttttttggcgggtgtagtcgtagagttttgaggttcgattttattggtttcgtcgtttttcgcgtttattttatcgtataatgtttatagtgaaggcgacgggaaaagtagtagtttaaaggttttgaatttttttttttcgttatacgtacggaattttgagttttcggagtttcggggtcgaggtcggttcgggacggtgtttcgagtagttttttattgttggggagtcggttttgtttttgtttgaacgttttgtaacgattaagtagatttcggcgttagttcgtcgcggagaggtttaaataggtataaagtgcgattttaagtggttattgtgcgtaaaggcgtc

SEQ ID NO: 10237 - DNA, 222 bp, Artificial Sequence
  Description of Artificial Sequence: Synthetic polynucleotide
gggcgatttgttgttttcgagtgtttttgggttgcgttttttttttttatttgggcggtcgcgttaagcgtagaggtcgcgggcgtttcggggttagaggcgttttcggttcgggttatggcgttcggcgtcgggggcgcgaggagcggtttatttagttagattttttatttcgttatcgttattagatattattatcgttgtgtagtgtgggtttttatt

SEQ ID NO: 10238 - DNA, 714 bp, Artificial Sequence
  Description of Artificial Sequence: Synthetic polynucleotide
tttagggaaagtttttgaaagtataattcggaaaatttagtaatttttaaaaaaaaatggtttttcgttgttataagttttttttttaagatttagggttcgtagtagaatattttgatttaaaataaaaatattatgataaaaatattttaggaggtagtcggttttatttcgtttaaagtcggatttcgtttagtttcgtgaaagcgaaggagtattagcgttttttgatttcgtatagttttttcggtagagacggttcgttttttttaagaatcggaagtcggatagcgttaggacgttttattttttttatttgggatttagagaggtagcggttaaggatagggttttcgtcgaggttatcgggtagcgtttaggtttcggtttttgggaggggagtagcgggggaggggtacggggaggggcgagggcggggcgcgtttgggtttcggcgttgggttttttttttgttcgtttcgggggatatttataggatttttgtagatttttgtcgaggtaggatggaggtttgtagggatgtatcgcgggttcgcgattcgggcggtcggaatatagttttttttggtcggagatcggttcggtcgtgagtcgtgtttgtgttaggttttttacgttgtgttttagggttttagtgttcggcgcgtcgggggttgtatcgttagttatttggggtaggaaaaaggaattata

SEQ ID NO: 10239 - DNA, 1216 bp, Artificial Sequence
  Description of Artificial Sequence: Synthetic polynucleotide
aagttttagaaacgttttcggaaagttttttttaatgggaagcgatttcgtcgttgagttaagcgttcgaattttttttttcgcggtagggatatcggttcgggttaggtttgcggaggacgttttcgggcgcgtatatatagttcgaggacgcgttttgtattttaagacgtagggtcggattttatttcgaaatttggtttttatagttttaggtcgaattgtgtttggtttttagttttcgagttcgagttttacgtcgtaaagagatggggttttattgtgtttagttggttttttagtacggacgtgtatttttttttggtttgttttttgttaaaaatcggtagtgcgtttcgtttttttgtttagtcgtagtttgtcgttttttagataaaaagcggcgatcgcggttcggttattcgagtttcgtcgcgttgcgtttttgttgggcggtttatagatggtgtttagtacggggtcgcgtcgagggcgggggcgggaggtcgcgaagagggtcgggcgggaggggaggagacggcggagtagttaattcgcgcgcggtttattagttgatcgtttttgtttatattaggtgtacgtcggttgcggggagtataaagcggggcgtatcgcgggcgtcggtaacgagtcggtgaacgaggcgaggttcgtgcgttcgcggttgtaagcgttcgtttggcggggagaggggtcgacggcgttagttcgggcggcggtatttttaggcgtttggggcgttttttttcggatttggtcgttcgttgtttcgttttttgtattttattttttcgatttttttttttagttttgtttttttttgttttggtttttgagagtcgattgagtttagtttcgtgtagtagcggttgtttgtgtcgtcgtttagttttcggttttggtgttttttcgggggtgttttaaggagttagtgcgcgttgcgggttgggaaggaggcgtcgtttagttagttttttttttttttttcgttttttttttttttttgttgttgttgtcgtcgtcgtcgtcgtgggtgtcgggttcgcgcgtattttaatatttttattagttgggtttcggggtaagtttttggtcggtcgcgtcgcggtaggaggtgtgggaggtagcgaggggaagtcgaggtaaatttggtggcgtgggagattttacggggtttggggaattttagggtaag

SEQ ID NO: 10240 - DNA, 207 bp, Artificial Sequence
  Description of Artificial Sequence: Synthetic polynucleotide
agtttttcgtaaatttcgtttttttcgtttggtacggtttttttgtatcgttgtgtttcgtttttaggtttttgttcgttaagaatgtttgtttcgggggcgcgttcgttggttaggaatttgtcggtagttttcgggaatttttgaggatgcggaggtgggttcgagagttgcggtttcgatgtcggggtgggagttaggtaggtc

SEQ ID NO: 10241 - DNA, 253 bp, Artificial Sequence
  Description of Artificial Sequence: Synthetic polynucleotide
acgtttagggataaattgggagtcgtgattgttaggtcgcgcggaggttgttttggtcgtttttgcggttaggtgaaggcgtagaggtagggaggtcgggcgagcgtaggcgggcggagagtagattacgcggaagaggtcgagagagaaagcggggtattcggtcgggggggttatttataagggacgttgggtacgaaggaggttggggcgaagatgagtttaggggttgggttgagagcgttgcgtagtc

SEQ ID NO: 10242 - DNA, 209 bp, Artificial Sequence
  Description of Artificial Sequence: Synthetic polynucleotide
ggacggtttgtgagggatgcgtcgtttattgtttcgcgtcgtttgatcgttttcgtttcgattcgcggtgcgttatagtcgggttcgcggtcgttttcgtcgcgttgtcgttcggtcgtcgcgttcgcggggtcgcgttcggtacggttatgtggatttttacggaggaggagaaatacggcgtaggtaggtgaggtttaggtttggtc

SEQ ID NO: 10243 - DNA, 225 bp, Artificial Sequence
  Description of Artificial Sequence: Synthetic polynucleotide
cgttcggtttcgtttcgtaggttgtaggcggttttggagggggcgttttcgtcgagcgcgcgtttcgcgtcgtcgtttcggattttttttcggcgtcgcgcgggtaggttcgattaggcggtcgcgggtttcggttttcggttagttttttagggttcgcggttcgtttcgtttcgcgcgttcgtttcgttgcgtaattcgatttaagttggaagtcgatcgtag

SEQ ID NO: 10244 - DNA, 1133 bp, Artificial Sequence
  Description of Artificial Sequence: Synthetic polynucleotide
aaggagagttggaagggttcgtgtagtaggatagcgggcggaagcggggcgggcgagcgcggggtcgtcggtcggtagtcggagtagttgtcgcggcgttcgaatttcggcggtcgtcgcgttttttcgtttcgcggagatcgacgtaggcgttcgttttcgaggtcgaagggtattgggcggcgagggttgcggtagttggcgatttcgggggcgtttgcgcggcgcgcgttagacgaggttgtttcggcggttatttcgcgatttcgcgtcgtcgggatttgcgcgcggagaacgtcggttttggagggagtacgtttttttaaagtgtagaggagggttcggcggcgcgttttcgcggaaattttttttattgtagttatttcggatgtcgatttagtagtttgtttttcgagaaaagagaggggatttgggtagaagggtttcgtttgttttaaaagaaggtgtaaggattagaagataacgaaacgtttattttttgaagggtgggaaaaaaagaaaaagaaaaaggagttatttacgttggagatgttcgttttagatttttttatttttttttttttcgtttcggttttttttttcgaggtttatttaatttgttagagaaggaggaggagtagaagatgggggtcgaggaggaggggaagagaaagagaagtttgttaagaataaagtttttgtcggtaagcgcggggatttcgtagtggagggtattgcggagtttcggggagttatagcgggggtttcgggtttaaatgtttttgttcggagttcgagtcgatatatatatttagttcgatttttttttgttttcggttcgagttttttagtttggttcgtcggttcgtcgttttgtacgttttcgtcggttagttttgttaaagtaaagagttgcgttttttgagttcgttcggtcgaggggaggggacgtttcgagtttggtcgcgtgcgaggtttcgggcgcgttttggtttttcggttcgagagcgcgtagttcgggtttttttttcgcgttttgtttcgtaggtgagcggttgcgtttttttattgtttttttttttttcgcgtttcgtcggcgttgaaaagttatttatttgcgtcgtttttttttt

SEQ ID NO: 10245 - DNA, 478 bp, Artificial Sequence
  Description of Artificial Sequence: Synthetic polynucleotide
cggttcgggaggcggaaggtcgcggatttgttcgatagaagagtagatgaggggagatcgaggacgttcgggttcggggagtttacgaggaggttaggatcgcggggtaaggaattcgcgggtagttattttcgttaggggtagggttcggttagttaggcgcgagaaggttaggcgaggtcgattgcgcggggtgaagacgttaggtcgatagttgcgggttttatcgttagttttgacgcgagtttgcgttttggcgacggcggagggcgggtagggggcgcgggcgttgttacggcgtttgtttagaatcggtcgggaacgtcgcgggcgggttttttcggtttttcgtttttttagttttgtttttaggttttcgttcgggttttttaagttgttagtcgcgttcgttttcgggtttttcgttttttttttcgcgcgtttttttttttagcggtcgtcggatttttttagttta

SEQ ID NO: 10246 - DNA, 201 bp, Artificial Sequence
  Description of Artificial Sequence: Synthetic polynucleotide
tcgtacgcggagtttataagttgtttgtgtcgttattttttcggttttggtatcgttagtattttttaggaattttttaaattcgttttacggtgtagaacggtaattgtatcgagtttttgtgttaattagtattttcgtaatatcgttagtcggttttttttttgttataatatattaaaacgtgttaaaatatattaa

SEQ ID NO: 10247 - DNA, 208 bp, Artificial Sequence
  Description of Artificial Sequence: Synthetic polynucleotide
gatgagcgtcgtgtagtatttttggttcgcgttgtttgttcgtgtcggttataggttgtaggttagtagggcgagcgcggcgagtcgggtagggttcgttcgtttcgcgtagtttatcgttttttcggtagtcgtcgttgttcgcggatcgggtttcggggtcggcgtttagaggcggggcgggcgcggttcgggcggcggcgggagc

SEQ ID NO: 10248 - DNA, 210 bp, Artificial Sequence
  Description of Artificial Sequence: Synthetic polynucleotide
atttcgtatacgtgtataaggtgttgaaataggtttatttcgatatcggtattttttttaaagttatggggattatgaatttttttgttaacgatattttcgagcgtatcgtcggcgaggtttttcgtttggcgtattataataagcgttcgattattatttttagggagatttagacggtcgtgcgtttgttgtttttcggggagttgg

SEQ ID NO: 10249 - DNA, 229 bp, Artificial Sequence
  Description of Artificial Sequence: Synthetic polynucleotide
tggtttatttgagtttaggggtttgagattaggatgattaatatggtgaaattttgtttttattaaaaaatataaaaattagtcgggttatggtggttgacgtttgtaattttagttatttaggaggtcgaggtaggagaattatttgaatttaggagcggacgttgtagcgatcggagatcgtattatcgtattttagttcgggcgagagggagattttgttttaaaa

SEQ ID NO: 10250 - DNA, 209 bp, Artificial Sequence
  Description of Artificial Sequence: Synthetic polynucleotide
aggcgggggagagagatgacgttggcggacgtggttagcgcgggggtcgggcggtgcgttgtaggttatttgtcggcgttttgagatttaggagttttcgcgttttcgcgtgggttttatagggtcggtttatagttttaatatagtagttgaatttttttcgttgcgtttttttttttttggaggggaatgttagaagagagagagag

SEQ ID NO: 10251 - DNA, 255 bp, Artificial Sequence
  Description of Artificial Sequence: Synthetic polynucleotide
gaaggggtttggagttttttttttggggtattgtgttgggattttgaggattggggattcggagggagggtaggcgtgtttttaattcgttgcgtcggaacggcgtttgatgagcggcgggttcggatacgaggggacggggtcgatttgtgggcggggttttggcgtcgtattaaaatcgcgtggggcggaggtcggtagaggtcgcgtagcgggtttagggtagggagtggttttgattcgttgcggaataat

SEQ ID NO: 10252 - DNA, 297 bp, Artificial Sequence
  Description of Artificial Sequence: Synthetic polynucleotide
aggtttcgtttattcgacgtaatttgttcgtttttttttatttttcgaagggtggagtttgaggtttcgtttttaagcggttttttttcggagtgtttggcggttagtagggcggggtaggaggttgggagagggacgggtgcgggggtgggggagaggaagggagcggttacgtgtgaggggcggttcgaggttacgtgacggagcgtcggagcggagggagtcggggttgggagtttttttgagggaagaggagtggagtaggggggacgcggcggcggcgttgataatggtgag

SEQ ID NO: 10253 - DNA, 232 bp, Artificial Sequence
  Description of Artificial Sequence: Synthetic polynucleotide
gtgagttggttggaaagagggggcggagtgcgcggagttagagtcgttatcgttgtcgtagttgtcgttattgcggcgtttgggttgagtcggagggaggcgggaggacgcgtaggggcggtcgtcgtcgtcgttaggttatcggggcgaaaatgcggtcgttgtcggaggttcgttaatttttcggggtggaagaggaggaggaggaggaggaaggggtttggagcgatta

SEQ ID NO: 10254 - DNA, 247 bp, Artificial Sequence
  Description of Artificial Sequence: Synthetic polynucleotide
tcgcgttcgtagtcgcgtttttgttttttcgattttcgtatttttatttggttcggttttttcgtttttttttcggtttttttttttaggatatttgtgtcgttttattttttttattatatacgtattttttattttaattttttcgtttttttgttttttttttttcgtcggtttttttttttcgttgttgtttcgagagttcgatgtgggagggaaggcgcgggggaggggaggtcgcgaaggg

SEQ ID NO: 10255 - DNA, 292 bp, Artificial Sequence
  Description of Artificial Sequence: Synthetic polynucleotide
gtttttcgagttttttgcggcgatttcgatttattttcgcgggtgcggggcgcggattcgttcggtttagtttttgttttttaggcgtttttttttttcgcgatttgtttcggtcgtattcgttttcgttttagtacgcgacgttgttcggcgcgatttttgttttttcggtttagttttatcgttgttttcgatttaattttagttgaacgttcgtagttttagttttattttcggtttagttttagcgtttttagttttattttcggttttagttttagttttagcgttt

SEQ ID NO: 10256 - DNA, 201 bp, Artificial Sequence
  Description of Artificial Sequence: Synthetic polynucleotide
gtagttcggttaacggacgggttagttggttttttttaggggtagttttgttttttttttcgtttcgttttttttttttttattatatcgggttgtaattcgagtcgtcgagttattgtttttttttcggatttttttcggaggttttgcggttcgggttttcgcgttttgttgttttatgtagttttgagttttatagta

SEQ ID NO: 10257 - DNA, 201 bp, Artificial Sequence
  Description of Artificial Sequence: Synthetic polynucleotide
ggttacgcgtgtttttggcgcgagtgtgcggggttaggtcgggagggcgtgcgcggatcgggcgtgtttacgcgcggtagggaggggttacgagggtgcgcgcgtttttggcgcgagtgggaagtgtggggattcggcgggttcggtgtgaggggcgtgtttttggggcgagagtggggagtgagtgtgaggagtaagggt

SEQ ID NO: 10258 - DNA, 201 bp, Artificial Sequence
  Description of Artificial Sequence: Synthetic polynucleotide
gggcgcggtcgggtaggttggggggtaggtaggggtcgttttcgcggggcgggaatttcgcgtttttttttttcgagttttattttttatggtaaagcggcgtggggcggcggggcggagggagtcgagggggcggggagggcggacgggcggaggggacgggaggtttagcggtttcgggtttcgttggttcgggcgtcg

SEQ ID NO: 10259 - DNA, 201 bp, Artificial Sequence
  Description of Artificial Sequence: Synthetic polynucleotide
attttttttttttatttttttttttttttttttattgttttttttatttttttttttttttcgtttttttttttggtttttttttttttcgttcgggattcggggggaggcgcgttgggtggttcggtagtcgggggcgggcggtagtttgtaggcgtaattggtatgtacgtcgttgtagttgagatcgtttaataaagt

SEQ ID NO: 10260 - DNA, 201 bp, Artificial Sequence
  Description of Artificial Sequence: Synthetic polynucleotide
tcgttttcgttaaaggtttttttaaggggtcgttttagggtttcgtttcgtgtttcgtttcggcgtttatttcggcgttcgtttttttttttttttgttgcggtttcggtaggggttgttgcggcgatttaggttgttgcggttttagttttattagttgttgttgttttttaaggagacgtcgtcgatagcggagtagtg

SEQ ID NO: 10261 - DNA, 201 bp, Artificial Sequence
  Description of Artificial Sequence: Synthetic polynucleotide
gtgcggtcggggcgttgttcggtagtgcggtgtttacgggattgataggtaggtaggtcgcgggttgggattcggatattaaagtaaaagtatcgttgggcgtcggaggagtcgcggggtttttattttttttttgattgatttttaaattttaatttgtatttttttcgtcgtttcgttttttttttttcgatttcgttt

SEQ ID NO: 10262 - DNA, 201 bp, Artificial Sequence
  Description of Artificial Sequence: Synthetic polynucleotide
tatcgcgtcgtgcgttcgcgttcggtcgttaggtgttttagtagttcgatcgtcgagatgtttagttcgtcggggtttcgggcgttatggttttgcgtcgcgttgtgcgtttttcggagggtcggcggcgttttttagttcggttcggggtttatcgtttgttcggttttttgttattgttaggaggacggtattatgttg

SEQ ID NO: 10263 - DNA, 241 bp, Artificial Sequence
  Description of Artificial Sequence: Synthetic polynucleotide
ttgcgcgttttggcggtaggaggcggggtcgggggcggggcgtgagttggtcggggcggggtttatggaggggcgggatcgcggcgttttataagtattgcggagcgaggcgcgcgttcggttagagagcgagcgcgtaacggcggcgacggcggcgattttatcgcgtattttgttaggttttcggcgtttagcgttttacgcgttttcgcgttttcgcgttttcgcgttttttttttcg

SEQ ID NO: 10264 - DNA, 201 bp, Artificial Sequence
  Description of Artificial Sequence: Synthetic polynucleotide
ggcggtaggcggcgcggcgggttgggcgcggcggtggttaggtcggtgcggttgtagtttatgtatagcgtgttagggttgttttgttcgggtagtcggtcgtagcgtatgcggtcgggttaggcgaagtcgtattggcgtatgagcggcgcgtagtcggttttggcgcgttcgtatatcgagcggtagggcggtagcggt

SEQ ID NO: 10265 - DNA, 201 bp, Artificial Sequence
  Description of Artificial Sequence: Synthetic polynucleotide
aagtggggtgaaaatgattttagtgaatagtttagttttttgggatagtggtttggtatttttgacgtgggagtggcgtttgttttgatttaatttggatcggtttagggataatatttttttcggagtagtcgttttgtttcgtttcgagtagtttagttgcgttttgtatgatcgaattggatattttttatttttttt

SEQ ID NO: 10266 - DNA, 201 bp, Artificial Sequence
  Description of Artificial Sequence: Synthetic polynucleotide
ttcgcgtttgtttcgtattacggagtcgggtttttagagtagtaaggttattaggtggcggtgttggcgtagtaggcggagcgtcgggtgcgcggggtcgcgtttttggttttcgaaggtgatgaagatgggtttgcgggtgagttttagtagtcggtataggttttttttgcggggcgggatcgttaggggggtgggtgt

SEQ ID NO: 10267 - DNA, 201 bp, Artificial Sequence
  Description of Artificial Sequence: Synthetic polynucleotide
acggttgggttttaggagatattcggaggggttcgcgggttcggttcggttttttcgttggggggttattagtcggtcggtagcgagatatttagaggttcgtttttttatcgcgttgttatagtaacggtttggtcggttgcgtttcgggtcgttcgttttatttcgcgggttcgttttgagttagtgattttagggatt

SEQ ID NO: 10268 - DNA, 201 bp, Artificial Sequence
  Description of Artificial Sequence: Synthetic polynucleotide
tttagatggttttaattattggaggaaaaaagcggtttttttggtatgcgtgaaaagtcggagttgggagagtttgggaaaagttgtttgtatcgttcgtcggtttttaaataaatcgatgagttttttttttttttttagttttcgggtttcgggggagttttataaaatttaaatgaaatttaaagaagttatttttgg

SEQ ID NO: 10269 - DNA, 201 bp, Artificial Sequence
  Description of Artificial Sequence: Synthetic polynucleotide
ttataaagtattagtggtgttttttcgaggaatttaagatttttcggtcggttgttaagtcgtcggaattttagtaggagaggaaggtttatttttttatcgtatggcgatgttcgggagattggagaagtttaggtaggtttggaagttaattttcggtatatagtagttttcgggaatgtagagttttagagtaagatt

SEQ ID NO: 10270 - DNA, 201 bp, Artificial Sequence
  Description of Artificial Sequence: Synthetic polynucleotide
tagtagagacggggttttaatatgttgtttagggtggtttcgaatttttgagtttaggtaattcgtttattttatttttttaaagtattgggattataggcgtgagttatcgcgttcggtttgatagtttttttagaatgaagtttgtttcggaaaaaagagttttggttagtgttttttttggggattagcggaaagtat

SEQ ID NO: 10271 - DNA, 201 bp, Artificial Sequence
  Description of Artificial Sequence: Synthetic polynucleotide
aggggagttgaggggcggagttatcggggcgcgttttcgcggttgcgttttttttcgtcggggagcgcgggtacgtaattcggagggtgttgggtcggttcggagtacgcgagtagcgggaggagggatcggggaatgattgacggaggcgggtcgtagaggtcgttgtgtttcgtcggttcgtattcggtcggagtgtgc

SEQ ID NO: 10272 - DNA, 201 bp, Artificial Sequence
  Description of Artificial Sequence: Synthetic polynucleotide
ggttttcgttttttttgtaggcggattcgttcgtttttaggtcggattcgcgttcgggatagggattcggtcgagtcgagtcgtcgcgttagcgttgcgtcgtcggtcggtgcgtttagcggatcggagttgcgcgcggaatcgtgttgtttcgtttcgttttattcgtgagggtgagtacgcggcggcggtgcgcggggg

SEQ ID NO: 10273 - DNA, 201 bp, Artificial Sequence
  Description of Artificial Sequence: Synthetic polynucleotide
cggggagggaggttttcggaatttcgagagagtattcgtgtttcgcgggtttcgtgtttcgttttcgggtttttttttttttaacgtaggggatttagttcggggtagtgtcgggtattggcgttggcgtttcgtttagttttgcgattttttttcgtttcgttttttttcgtttcgtttcgttttttttcgtttcgtttt

SEQ ID NO: 10274 - DNA, 239 bp, Artificial Sequence
  Description of Artificial Sequence: Synthetic polynucleotide
agagggcgagcgagagagagatatatatatatacgtatacgtatacgtaggttatatgaatgggaggcggtagttaattttacgaggtcggcgagtcgcgcggcgtattggcgttgggagtagggtcgtatttcggcgcgggggggcgttacgtaggtgatgggcgttttttcgggggttacgcgcggtcgtttttttattttagtttcggtttttttgtttttttttttttttttttt

SEQ ID NO: 10275 - DNA, 201 bp, Artificial Sequence
  Description of Artificial Sequence: Synthetic polynucleotide
tttttcgtttttatttatttttttttattttttttttttttttttcgttagtttcgtatttattttttttatttcgtaatttttttttgtttttatttatcggggttatggtcgtagaagaggtattgtagacggtggattattataagattgagatagagaggttaattaaggagtttacggagattatttacgagaaga

SEQ ID NO: 10276 - DNA, 201 bp, Artificial Sequence
  Description of Artificial Sequence: Synthetic polynucleotide
ttgtcggggagaatatgtattaggtggttgatggttttgtggatgtggtggtttgtattttggtgttgtgttttgtgaagaattaggagcggatttttcgcgaggtgtgtagagtgttgagatcggtgagtgaaagggtgtgaggaggattagttagtagtagttattattatagagggtaggtttgttaattttaggtgg

SEQ ID NO: 10277 - DNA, 201 bp, Artificial Sequence
  Description of Artificial Sequence: Synthetic polynucleotide
gaggcggaatttaacggaagtgaagaaaagattaacgggaaagaaggacgagtacgcggtttcgggatagatttttaaagtttttttttgcgttttttggcggtcggagggggagtagcgcggatacgtttttcggttaatcgttggttattaggttggagtggggtttttttttgttgttttttatgagattattgtttt

SEQ ID NO: 10278 - DNA, 201 bp, Artificial Sequence
  Description of Artificial Sequence: Synthetic polynucleotide
gcgattacgggtttcggcgaagatgcgtcgtttgagcgttcgcgcggttttcgttcggggcgggcgtgatttttgttgaacggagattttttttttttttcgatttcggacggcgtaggtcggcgttaggatagtttttatcgatagcgtttttttttattcggagagaggtatcgatttttaaggagggtttcgttaggt

SEQ ID NO: 10279 - DNA, 201 bp, Artificial Sequence
  Description of Artificial Sequence: Synthetic polynucleotide
tcgttttcgtcgttcggggtaggcgcgtcgatggcgtttttgaggtgacgtcgtttatatcgggttttttcgggggcggaggaaatatttatgaatttttcggtagttttttttgtcgggcgttaggtaagtagcggtttcgggcgcggcggggcgtcgcgggaacggtgtatattggtcgaaatttattgttttttaaga

SEQ ID NO: 10280 - DNA, 201 bp, Artificial Sequence
  Description of Artificial Sequence: Synthetic polynucleotide
ttcgttatttggggcgtttggggggttttggggcgggggaggcgggggttttgtttaatttcgttattgttattatcggttaggtcgcggtttggtaattcgtgaataggaggtagggttgtagggcgtgagggatgatgataaggaagtcggaggagtagcggcggtagcggagagtttattttggatgtaaatggtagg

SEQ ID NO: 10281 - DNA, 201 bp, Artificial Sequence
  Description of Artificial Sequence: Synthetic polynucleotide
atttcgcgttttgcgttttaattaggattgtttcgcgcgtttttgagtttcgggtttcggttcggatttgtagttttttaggtggttgggaaggtaggtgcgtcgttgttttcggcgcgcggcgtttcgcgaggtttttagttttcgttttggtggattttcgttgggtgggagtcgggagtggaggcggtcgttttaggg

SEQ ID NO: 10282 - DNA, 201 bp, Artificial Sequence
  Description of Artificial Sequence: Synthetic polynucleotide
cgattcggtcgtgagcgtgtttcgttgtagttcgttgttcgttaggttcgggtggtagcgtaggatgtttttttggtttgcggagaagtatagatatcggcgggagcgcgttaatcgcgttcgtttcgtatcgcgtattcgagggggcgcgtaggtcgcgttcggtttttttgtttcgtttcgtttcgttcggttttaaag

SEQ ID NO: 10283 - DNA, 201 bp, Artificial Sequence
  Description of Artificial Sequence: Synthetic polynucleotide
cggtttgggaaggtttcggtttttcggttgcggttttagttcggacggcgtcgcgtaattttgttatttttttggtttagtttcggttataggaggatttcgcgggtaacgcgcggagtttttggtatttttcggcggtgttttttgttgtttgttcggggatcgatttcgtatgtttttaggttgatttgtttaagttcg

SEQ ID NO: 10284 - DNA, 201 bp, Artificial Sequence
  Description of Artificial Sequence: Synthetic polynucleotide
gtaatttcggcggagtcggcgtttttgggtatttttggttttcgcgtttcggtcgtacggtgattattcgggaggggatttcgggcgtttcgtaatttttcggttttcgtgggttttcgggtcgtttcgtttttcgtcgtcgcgtatttttcgcgtttttcggttttcggtgtcggttttcgtttcgcgtagtttcgagtt

SEQ ID NO: 10285 - DNA, 201 bp, Artificial Sequence
  Description of Artificial Sequence: Synthetic polynucleotide
aggaagttcgaggtcggggcgttattttaagggttttttcgtttttttttcgagggtagagaggcgttcgcgttcggacgtattgcgggaatatttggagcgtcggcggagttcggttgttttcgcgggagggagttcgacgcgtatttttgggattcggattcggcgttcgcgtttcgggacggatttttgtttcggttg

SEQ ID NO: 10286 - DNA, 201 bp, Artificial Sequence
  Description of Artificial Sequence: Synthetic polynucleotide
tcgtttgtaggttgtttcgggtcgagtcggagcgacgttgtcgcgtatttgggtagttttcgggggtcgcgttgtgttacggtcggggtcgttgcgattgcggcgtttgtatttgttacgtgattgagtcgggtatgtttttcgggtttttgtgtgagtgttatgagtgggtgtgcgagatttacgacgggagtatttgtg

SEQ ID NO: 10287 - DNA, 201 bp, Artificial Sequence
  Description of Artificial Sequence: Synthetic polynucleotide
tacgtttggggcggtcgggggcggggtttggttggaattgacgcgtggagtttcggtggagggggcggggtttggttgggtcgttgtttatagcggttttcggggtttggaggttacggggttcggaggttacggggttcggaggttacggggttggttgtgtggggggtttaggggcgtagagtggttaagtagcggttt

SEQ ID NO: 10288 - DNA, 201 bp, Artificial Sequence
  Description of Artificial Sequence: Synthetic polynucleotide
ggttttgtagttttgtagcgttcggggcggtgtaggagtttcggggtgtcgcggcgttcgttcggttgtatcgttggtttttcggttcgggttttaggttcggcgttttttatttttaggtcgcgcgcgtttcgttttttcgacgatttttagtttcgggttttcgttatttacgagttttcgttttcggtgagttgttgt

SEQ ID NO: 10289 - DNA, 201 bp, Artificial Sequence
  Description of Artificial Sequence: Synthetic polynucleotide
gcgttttcgggggttgcgtcgtgtcgtttgttgtgcgcgcgtagaggtcggatagttcggttgcgggaagggattcgagcgtagggtttgtttcgcgtttcggaaagtgtttagtttgcggagtcggaggttgagttggggtagatcggcgttagacgggggtttgggtgagatacgagttgggggtgcggtttgtagaat

SEQ ID NO: 10290 - DNA, 201 bp, Artificial Sequence
  Description of Artificial Sequence: Synthetic polynucleotide
ttttttttattattttttcgtttttttattttttttttttttttgttttgtaggattgagtagttaggcgcgagcgaaaataaatagttggggttgcgagcgttttcgtttcggtttcgagagtacgtcggtttagttttttatttggggcgttcgtttgtttattatgaggaagattcgcgttaatgttatcgttatttt

SEQ ID NO: 10291 - DNA, 201 bp, Artificial Sequence
  Description of Artificial Sequence: Synthetic polynucleotide
gttcgtgtcgttgttgttggttttagcgttcgggttttcggtgagtgcggttttgtttcggttttcggaggaatttgtaggggagtcgggggcggggacgcgcgggttcgtaggtaacgtttttaggaaaggggcgatgttagggaagttgggttgggaggaggcgagttcgtatcgttgagtttttttagaaagggttgg

SEQ ID NO: 10292 - DNA, 201 bp, Artificial Sequence
  Description of Artificial Sequence: Synthetic polynucleotide
cgttgggcgtcgttcgtcggtttaggcgcgcgaatttggcgtttttagtgaattattcgcggttcgggcgttcgggttcgggatcggtttttttttttttcgttgagtcgcggtcgagttggttttttgtattttatttagcgtcgtcgggacgcgattatatcgagatggtatcgagttttttttaaaggtttcggtttg

SEQ ID NO: 10293 - DNA, 201 bp, Artificial Sequence
  Description of Artificial Sequence: Synthetic polynucleotide
gttttagtttttgggtcggaagtttttttttttttttcgtcgtagtttttttttagttttttttttttcgtcgatgcgggaaatttttttcgtttcgtttcgttttttttttttagttgtattttcgttcggttttttcgtttagtttttaatttaggtttcgtttttttttatttatttttcgttttgggtcgggttttc

SEQ ID NO: 10294 - DNA, 201 bp, Artificial Sequence
  Description of Artificial Sequence: Synthetic polynucleotide
gatggcgacgcggatttgtatcgtcgttttgggttcgggtcgagttttttcgtcggattgggttatggttcgcgggattgcggcgtcgtcggggtttttacgtcgtaaggtttagttagtcggtcggtagcgattgcgacgagggggcgggggcggtgcgagcgcgtttgtcgttcggtttaggggagggataggggtcgc

SEQ ID NO: 10295 - DNA, 201 bp, Artificial Sequence
  Description of Artificial Sequence: Synthetic polynucleotide
gtttgtttcgtcgttcgggttttgtggttggttattcgcgagttcgtttcgttttttttgtttcggttcgttcggttcgtttcggggttttcgtcgtaatcgagcggagtttagcgattcgtcgggtttatattagcggtcgtttttttcgaagcgtttttcggtagcgttcgggttttcgcgtttcggaatatttatgaa

SEQ ID NO: 10296 - DNA, 241 bp, Artificial Sequence
  Description of Artificial Sequence: Synthetic polynucleotide
cgcgttggttcggtttttagttttttcggtcgtcgtttttcgttcgtcgcgtcgcggcgttaggagggcggggtcggggcgcgcgtcgttttttagtaagcgggcgggcggcgttcggtttgagggagcggggcggttttcgtcggcgtcgcgcgcgttgtgtgtgagcggggtcgcgcgcgcgcgcggtaggcgagtgagggaacgaggagcggtcgggtgtgagtgtgtgggagtgaga

SEQ ID NO: 10297 - DNA, 201 bp, Artificial Sequence
  Description of Artificial Sequence: Synthetic polynucleotide
ggtgttaagcgtggggcgcgggttcgcggcgggagttgttcgcgaaatttagtgttgaagtaggcgcggacgtgttcggtgtttggcgcgtggtagtaggcgttcggtgtttcggtcggcgaagattatggcgtttatggtgaagattatggtgggcggttagttgaagaattttattgggagtttgggaggcggcgagga

SEQ ID NO: 10298 - DNA, 201 bp, Artificial Sequence
  Description of Artificial Sequence: Synthetic polynucleotide
gcgcgggacggagttttatgaaagttggaagaagtgattataaatcgggattcgattttcgtagttttggcgttcgtttttttacgtaggttcgggatgtcggttttagtttttagatgtcgggaagacggcgtcggttagtttaaggaagagtttttaggaggttggggagtaagggtgtcgggttttttatgtcgggtt

SEQ ID NO: 10299 - DNA, 201 bp, Artificial Sequence
  Description of Artificial Sequence: Synthetic polynucleotide
ttttgttggttagagtcgggtacgggtcgggcgggcggcggggatcgtgatcgcggttgcgtgcgttcgcgttcgggcgtttttgtgcggggttttggtacgtcggcgggggcgattcgggtgtcggttcgtgcgggcgatacgcgcgtttttgcggggttgcgcggggttcggagcggttgggggttttttgtcgggcgc

SEQ ID NO: 10300 - DNA, 201 bp, Artificial Sequence
  Description of Artificial Sequence: Synthetic polynucleotide
tagatttcgtcggtcggcgcgttattcgcgttagtattatggatagcggtcgttttagtcgcgcgtttagggttaggttcgggttggtttttatcgcggacggttgcggggtcggggtagtttcgtaattttaaatttcggtagttttcgtttagtagggaggggtttcgggggcgaagagtgggggagaagtcgggaagg

SEQ ID NO: 10301 - DNA, 201 bp, Artificial Sequence
  Description of Artificial Sequence: Synthetic polynucleotide
gtgtgagtttcgggggttcgggtcggcggttttgttagtcgggtcgtgcggttgcgggggtggggcggcggcgtcgttgttatattagtttcgggagcggcgagagggaggttggggtgggggcgcgaggggggcggcgcgaggggggtcgattttgcgggtaggtgatattatatttcgaaggttttagtgcgcgggcgg

SEQ ID NO: 10302 - DNA, 201 bp, Artificial Sequence
  Description of Artificial Sequence: Synthetic polynucleotide
gtcgcgttatggtgagtcgggcggggtaggtcgcgcgttcgggtcgggcgggggcgtcggggttcgggggcgggaagggggaggttaggacgaggaggggcgcgcgcggcggcggggtcgggtcggggtttgcgggcgggggaggggcggttcggcgggcgcggttcgggggagggttcgttttaggggtcgcgttcgcgg

SEQ ID NO: 10303 - DNA, 201 bp, Artificial Sequence
  Description of Artificial Sequence: Synthetic polynucleotide
taatcgggtattttcgcgcgtatacgttcgtgtttacgtgtgtacgtttatatttttgtatatatttaggcgcgcgttggtatatttattcggagaatttcgtatatatacgtattcgtaaatacgcgggttttttgcgttattaggaagtagtcgttagaatcgtcgggtgttttttaattatttttgggagatttggtt

SEQ ID NO: 10304 - DNA, 201 bp, Artificial Sequence
  Description of Artificial Sequence: Synthetic polynucleotide
atacgatatggttaagcgtcgtcgttcgaatcggtcgtcgtcgatatttcgtttcggttcggggttgaggaggaagtcgagaaggaggaggaggaggcggcggcggagggcgggggaagaggacggtcgtttcgggtttcgtttgagttcgtagggtaggacgagggagcggcgcggtgagagaggcggatgaaggcgagg

SEQ ID NO: 10305 - DNA, 201 bp, Artificial Sequence
  Description of Artificial Sequence: Synthetic polynucleotide
cgcgtatagcggcggcgagtgggtcgtgtacgcggatgcggggtgggagtgggggcgtacgcgcgggcgtgggcgagcgggtttcggtagtgtatatatacggtaggggcgggcgatagatgtagtgcgtgcgtcggagtttaagcgtataaacggaaagagcgggcgcggtgcgtaggggcgggcgtttagcgggtttgg

SEQ ID NO: 10306 - DNA, 201 bp, Artificial Sequence
  Description of Artificial Sequence: Synthetic polynucleotide
ttttaggggagttaagtagttcgtttgaagttttttatttggaaatgacgtgtttaattcggcgtttttgtagtttcggtcgtttttttttgtttaatttcgcgtttttttagtttcggtcgtttttttcgtcgtttttttttcgcggtcgtttatttttgagatttttggttttattgagacgtttagttttattcggta

SEQ ID NO: 10307 - DNA, 219 bp, Artificial Sequence
  Description of Artificial Sequence: Synthetic polynucleotide
ygtttgtttygtygttygtatyggtttagttttyggygttygttygtttttttygttyggagygttgtgagttaggagtagtygtaggtttttyggaygygttygtygygygtattaygtggttyggaggyggtygttagtttgygttygygatygggggyggaygttgtattatyggttyggagttgggtaggggaggtttttygttttttttttagg

SEQ ID NO: 10308 - DNA, 315 bp, Artificial Sequence
  Description of Artificial Sequence: Synthetic polynucleotide
gaygttttttagagayggygttggtttttttyggyggggttggyggyggttgggggatgttagtygggygggtygygggtygtttttttttataggtttygagagyggggyggggttgggggygggyggggagttgtttygggtggtttygtttttagtayggaggatttttttygygaggygtygtygttttggagtttygtttayggygttygayggtyggggaaattgygggagttgggygtttagtgggggaaaaygagtygyggaygygaaggggygggatgaggttttyggggyggggttyggggttyg

SEQ ID NO: 10309 - DNA, 201 bp, Artificial Sequence
  Description of Artificial Sequence: Synthetic polynucleotide
ygygtygttttagygttttgtagyggaggygtygtttttatttygatygtaggttygttygggtygttygttygtygggtatygagtygttttgtygygygttgygtttyggggyggggtgggaggagagggagtagtygttattttgtttaggtygtygygggttagttttgtagttagttttagttttgggtygggtgt

SEQ ID NO: 10310 - DNA, 201 bp, Artificial Sequence
  Description of Artificial Sequence: Synthetic polynucleotide
gttyggagyggtygtgaggggyggayggggggtttyggggygggtttgtaggttttggggatttgaggttgtygggaggggttgttagggggygttggtygggygtygggttttgyggagttggggygtygatttttgattygygagaggggygttttygtygtgttggtygtagttgttatttttagygtttttattatt

SEQ ID NO: 10311 - DNA, 201 bp, Artificial Sequence
  Description of Artificial Sequence: Synthetic polynucleotide
yggyggtgattgyggtttygygygyggttyggtttaggtaggattygaagygyggtttygggyggyggyggyggyggyggyggygtggtttygttygggygggttttgygggataagayggggagtyggttayggggtggggygattggygtttygggagtaggaggagaatygygggtaggygggyggggagggtgygyg

SEQ ID NO: 10312 - DNA, 201 bp, Artificial Sequence
  Description of Artificial Sequence: Synthetic polynucleotide
aagtttttygtttagttttgtyggttyggtttgggygttgtggatyggtaatagtagttttattaggatgtaggtyggattaagtttttggggaaaattygttgtaataattgttttttatatataatttttaattttttttttattttygtttttaattyggagatttgtaaagtttaagaaagggaaaagtaattttat

SEQ ID NO: 10313 - DNA, 201 bp, Artificial Sequence
  Description of Artificial Sequence: Synthetic polynucleotide
tagtatygtttyggtttygygttaggyggygggggaggggaggagggatttttttaggggtgggtttggagggggtgggggyggttttttttttygtttygtygygggtttattgttygggaggggyggggagatagtggggggtagtttygggygggagtggaggyggagatgtygtygtygtagtygtygyggtggttg

SEQ ID NO: 10314 - DNA, 201 bp, Artificial Sequence
  Description of Artificial Sequence: Synthetic polynucleotide
ttttatgaygtygaattgtttgggggatygttagyggtgygtyggtyggagttagttggtggyggggygggyggttyggagtgtttgtttaattttgagygttygygagggggaggggaggtagttggttaygggttagggggtagtaaggtggaggagygggggttgggaaaggggagggtatttttygggttgtttgtt

SEQ ID NO: 10315 - DNA, 201 bp, Artificial Sequence
  Description of Artificial Sequence: Synthetic polynucleotide
ttttttygttttagttagayggggygttygygttttttttttygtttygygttggtttttaataggaagtygtttyggtttttagtaygtgatttttatygtatttgtatatyggagggygaattggttaatyggtattttgtatttgagtttttttttygygygtttttttyggtttattggtttttyggttaggttayg

SEQ ID NO: 10316 - DNA, 201 bp, Artificial Sequence
  Description of Artificial Sequence: Synthetic polynucleotide
gtygttatygttatygtagttgtagygtttttttatatttttagygygtygtyggtygggtagtttggtygyggtayggaggaggggttttggagggggyggtygggggaggygaygtygagttatygttttygggtagtygtygtygggggggagygyggagatttgaaagggygygtygggtaaygttttttttttttt

SEQ ID NO: 10317 - DNA, 201 bp, Artificial Sequence
  Description of Artificial Sequence: Synthetic polynucleotide
ttattgttttttgggyggtgtggattagttgtagagtgtgatttgyggttagggagtgttttttyggagttttygtttttagatttttggtgttaaagaygttttgtgagygggtggggtygggygttttagttayggyggtygtygtttttttttttygtaggaygggatagygtttttgtggatygygttttagatggg

SEQ ID NO: 10318 - DNA, 201 bp, Artificial Sequence
  Description of Artificial Sequence: Synthetic polynucleotide
ygtggaggygataggygtyggygataattttttagttygggygtygygygtygtttygygggaygygtattggggatttyggtygtttttttygtttttygygyggatataaagttyggtagtygyggygtttagagggtygagggttatyggatagttygggtagattttggattygtttygygggagttgtttttttgt

SEQ ID NO: 10319 - DNA, 243 bp, Artificial Sequence
  Description of Artificial Sequence: Synthetic polynucleotide
aaggttggagggtgttagaaagatgatyggtygggtayggagyggggagttyggagtygygygtggggaggggaggtggaggagggggygtygggggagyggggggygygtgaggggtgygagyggggttyggggggygygyggtgggtgtggggggygtygggtttatttatttttygttagygtygttattgtyggttatatgattgaggttgttgttgggatgayggttygggttttagt

SEQ ID NO: 10320 - DNA, 201 bp, Artificial Sequence
  Description of Artificial Sequence: Synthetic polynucleotide
ttttgtatttgtaatttttyggggtagtgatatagttggtttyggtgttttggyggagggtagaagtgatggtyggttgyggttttgtagggtgagaatygggttagataagtgagtgttttagagtyggggagttgtatayggaggggagggagtggygggygttgygtygggtttttttaggaagaggtgagygggttg

SEQ ID NO: 10321 - DNA, 201 bp, Artificial Sequence
  Description of Artificial Sequence: Synthetic polynucleotide
ygaatgtggttaagggggtygtttagatgggtgtagatayggttaagatygtgttgatyggtattaaggatattgtttgtagtggggttatyggtgttgygaaygtggttaagggtgttgtgtaaattgggttgaaaaygatttaaaatatygtaataggtataaagaatatttttggtagtggggtgatyggtgttgyga

SEQ ID NO: 10322 - DNA, 201 bp, Artificial Sequence
  Description of Artificial Sequence: Synthetic polynucleotide
gtygygtttttgggaayggttagggaagtaagtagaagtygggaagtygygaaagaggygagaaagtgygattttttttttagattttyggtttttygtygaaatttttgtyggtyggttaaattttagataatggaagttttaygtttttatttttatttttttttataagttyggtygygggtttttttyggttyggga

SEQ ID NO: 10323 - DNA, 201 bp, Artificial Sequence
  Description of Artificial Sequence: Synthetic polynucleotide
tgtgaygattttttaagggggttttgtgagtattttttttttatagttaggaaattgaggtatagaagggagggattgtttggtaggagttaatagaggygtatagagtagygtgatgagtttygggttttgggggygggttygygagtaggtagtttttattttatggtggatttttaggtttttttttttgtttyggtt

SEQ ID NO: 10324 - DNA, 201 bp, Artificial Sequence
  Description of Artificial Sequence: Synthetic polynucleotide
tayggagtttttttaygygtttattgyggtttygtygtgttaaggggagtttggttgtttaygggttttatttgttagygagaagatagtttggtygggyggttgattttattttgtaattttgatattgtgtttttygggtttgtyggttttatgatttgtgtttaaagtttgatttttygtagattaggtaaaagttaa

SEQ ID NO: 10325 - DNA, 201 bp, Artificial Sequence
  Description of Artificial Sequence: Synthetic polynucleotide
ttttgtgtttttayggygygtagaggyggygtygygaattttgtgtgtattttataygayggyggggattgaggtttttygtagtttagagtyggagttyggggtyggtygagttygtaggatyggttttttygtygatttttayggttttatttagttttttgggtttatggyggygtyggygttggtgagtggagggtt

SEQ ID NO: 10326 - DNA, 201 bp, Artificial Sequence
  Description of Artificial Sequence: Synthetic polynucleotide
ttatygtagtygatagttttataaatattatygttygtttagttttygttttttygggtyggttgttatttygygttttyggtttggttttggtttygtyggttgtattgtayggttygttttttygtttatttgtttattaattttgtagaygttttgtgtttattttttttttttttttggttattttttttttttgtt

SEQ ID NO: 10327 - DNA, 201 bp, Artificial Sequence
  Description of Artificial Sequence: Synthetic polynucleotide
ggygtttttttygttygtttgygggttygttgygttagtygtygtaataaagtttgatagggygtggtttygygggaagygggttyggygttgttyggtyggggygtaggyggttyggttygggttttttyggtagygtygagtttagggttttttaattygttatygtygtygtttgtttygtyggggygttttagtttt

SEQ ID NO: 10328 - DNA, 201 bp, Artificial Sequence
  Description of Artificial Sequence: Synthetic polynucleotide
aaaataaaggatgggtgaataaattgagattyggtttgttgggygttatgtggagatygtgtgtaggaagagttaagatattagagtygggggggtttyggtgatttttgtygttttttgtattttgggtttatggttggggtttgtttttttttagttggtagtgttattttttttgtgttttattaagtttattagtaa

SEQ ID NO: 10329 - DNA, 201 bp, Artificial Sequence
  Description of Artificial Sequence: Synthetic polynucleotide
tgtygtggtttygggttattgtagtttttttgtttygggttttygtggtttttttgtttyggtttgttaagtgtttgggattgygggygggygtygttaygtttgattggtttttgtatttttggaggagayggggtttygttttgttgatygggttggtttttggtttttgatttygagtggtttgttygttttggtttt

SEQ ID NO: 10330 - DNA, 233 bp, Artificial Sequence
  Description of Artificial Sequence: Synthetic polynucleotide
agtattygatttgtgaaaattaygtttatgtagtaatataattggttygaaagygttaaagagttaattaagaggttttyggtttttygtagtttatagygtagttygattttttagagtygtygagtagaygttyggtgaattttagaggyggyggagggtggygaggagttttygttttttttygtttttttttttttygatttygttttttttttttttttttttttttt

SEQ ID NO: 10331 - DNA, 201 bp, Artificial Sequence
  Description of Artificial Sequence: Synthetic polynucleotide
tyggagttgtagtagaagygttttygatttygtttaggtttttagtttatttttttttgaaggtyggtagggggygttattatygttggttttttygygyggtttyggttttygtttygggaatygagtgtttgtagttygygattttggggaggtatagggttagggtatygtttyggyggagaaagtggttgtgtygyg

SEQ ID NO: 10332 - DNA, 201 bp, Artificial Sequence
  Description of Artificial Sequence: Synthetic polynucleotide
gggggaygggttagttagggtaggagtttaaggatatgaggtaaagattttaggttgggatttttygtagttyggaggyggggggtggggagggagggtygggggggtgttgggyggagaygttgggtattggggttagygttgggtagttatgtaygggggyggggtaataggtaggttagttgttgttgttttttagga

SEQ ID NO: 10333 - DNA, 201 bp, Artificial Sequence
  Description of Artificial Sequence: Synthetic polynucleotide
aagttygtgtagygygygtygttttattaaygygtttyggygtaggyggtagaggaaagyggtttttaygygyggygttygyggtttyggggttaggggygyggttagtagtgttagtaygttttttattaygtygtygtygtttttttyggyggtggtygagatyggggygaggttygtagygatyggttyggyggggtt

SEQ ID NO: 10334 - DNA, 201 bp, Artificial Sequence
  Description of Artificial Sequence: Synthetic polynucleotide
taggaatgagtttgttgagggtttagtttyggggtygggagtttgttgtaaaggatatgaaaaatttttattattatttttgtatgtgaaaagaatatgygtgttggaaataattttttaatttatatatttttaaatatttgtttagatttataggagaaatatttttattgatttttgtataaagtgtattggaggaaa

SEQ ID NO: 10335 - DNA, 201 bp, Artificial Sequence
  Description of Artificial Sequence: Synthetic polynucleotide
ggggyggggaggagggyggagggggtgtaaattaagtggtgggaaagagataaaggaagagtgaagagygagayggtgyggatggggaagggggaggggygyggaggggtagtyggtgggtagygygtygaggagttygagtttgaatttgattaagtattgggggttttgtygtgggggtggggygggggtayggtygag

SEQ ID NO: 10336 - DNA, 201 bp, Artificial Sequence
  Description of Artificial Sequence: Synthetic polynucleotide
agtttttaagggaggaggggagagttgtagagaggaggaggggtyggggaggtyggttttataaaggyggttggaataattttgttygttagatttygtygttyggattttttgagttgttygttattttaygtgatygygtygttttttagttttatygttgagtgagttggggygygtttttatttygtttttagtttt

SEQ ID NO: 10337 - DNA, 201 bp, Artificial Sequence
  Description of Artificial Sequence: Synthetic polynucleotide
gaggagtagtagygttygtygggggatgtagtagyggtagyggyggyggyggyggyggtagyggtagyggyggygyggagttttttgygtttagyggttyggtygggttgyggtagaggyggyggyggygtttygtttygggtgaggttgtyggggtygtgygygttggtgagtggggygtggggggtaggtgggtggttg

SEQ ID NO: 10338 - DNA, 201 bp, Artificial Sequence
  Description of Artificial Sequence: Synthetic polynucleotide
gttyggagaagtggatttygttttatygagaggttagggtttttatgttttygttttygatttyggtttagtggtttttgtttttyggattgttttyggyggggyggggttgtatttyggagttttagtttatttygtagtttttttygtatttgatattatyggttattttttataatatggygttyggygttttttaaa

SEQ ID NO: 10339 - DNA, 201 bp, Artificial Sequence
  Description of Artificial Sequence: Synthetic polynucleotide
ggaatttggaggaatatggygttgtygttttttggyggaagygttygggtttgygggtaggggtagttttttagggttyggaggygtagtgaattttygygagttygtagttygagtttygygttttyggygtttttgagttygtttagygttgtttgygtttttttttttttttygttygtygttttttttttttttttt

SEQ ID NO: 10340 - DNA, 201 bp, Artificial Sequence
  Description of Artificial Sequence: Synthetic polynucleotide
gttagggatygttttttattgttttttggttgtygaggagyggttatygggttyggttttagtttttttgttttgatttttttttttaagtttttatgtygagttggagagyggtttttgagtaygtatgtggttygaaaggtggtagttggtygggtttgggttttttatgtgatttagttatgygagggatyggttgaa

SEQ ID NO: 10341 - DNA, 410 bp, Artificial Sequence
  Description of Artificial Sequence: Synthetic polynucleotide
agatatgttgggttagtagtgttggttttattttagattttttttagttttttttagttagtygttaaggggtttttttaatyggaaatttttaattygygatttyggygggtgtatygtygagtttttygggaagtgtagttttagygygagygggaygttgggaaatgtagttttgygygtttaygttttygatygggtygtgttygtygyggttttgygaggttygaggggtaagggagygtgtagygggggygggattaygaggyggyggggttgggggyggtttttgtgtttgygtyggggatygyggtgatttygttgyggatyggttygyggtgattttagygygaaygagttggttgtyggttggggygagaaaggtttgyggatyggtttgggygtatgyg

SEQ ID NO: 10342 - DNA, 201 bp, Artificial Sequence
  Description of Artificial Sequence: Synthetic polynucleotide
gagttagagatgtatttttggtyggtttgagtatttgygggaattttgtgagtttttgaggtttattttttgttttttattttttttttttgtaaatttygagttyggggtaaagttgttttttttttttatatttttttttaattygataattaaygttttttagttttygggaatgggayggattttttttaaggattt

SEQ ID NO: 10343 - DNA, 201 bp, Artificial Sequence
  Description of Artificial Sequence: Synthetic polynucleotide
gggatttttygtttttyggtttagggggtatttatttygtaygtggagttygggtagygtttttagaygtatttagygggatatyggagaggaygtygaygtagtgtaaygtttyggtygaagygtygaataatatgygygygtygyggaggaggtgyggggygtgttygtttaggtagygggtygtttygaygtggtaga

SEQ ID NO: 10344 - DNA, 201 bp, Artificial Sequence
  Description of Artificial Sequence: Synthetic polynucleotide
atgtgttttgtygagttgatttgtttagtttattttttattttgaaaygaygttaagtatgaagaagagttgtataaataatgttaataatttyggtgtygtttttatgggggttatggtggttttagtgtattttatatgttttttttttttttgtttttttttttygtgtatatatatattgttttttgatttaagagt

SEQ ID NO: 10345 - DNA, 201 bp, Artificial Sequence
  Description of Artificial Sequence: Synthetic polynucleotide
gtgattttgygaggttatatttygggtgygtygttgygggttygtgggttygtgggttgtagtttttygtttttgtygggtggaygagtttygggttygygtggagttgttyggttaaggtyggttygggaggggygyggygtagggygggtaggggyggggttttaggttaaygtttagttttagatttagtttygtygt

SEQ ID NO: 10346 - DNA, 201 bp, Artificial Sequence
  Description of Artificial Sequence: Synthetic polynucleotide
ggagggagaaagggagagagttttagtygtttyggttgtggtaggaggagttttaagagygtttttygagttygtttygtatttttaggtttagttyggygtaggttttttttttygttttttttattttygttagttgttgaaatttttttatygttttttygygggtaatagtgttygttaggygtygtygygyggtgt

SEQ ID NO: 10347 - DNA, 201 bp, Artificial Sequence
  Description of Artificial Sequence: Synthetic polynucleotide
gtttttaatgygggyggttttygtattttaygyggttyggggtttttgtttatttttygygggygggtttyggatttttggggttttttagttttttttygtttttttttygygtyggtttygtgttttgyggttyggyggtttyggyggygygagtygggggaggyggygaggggtgttttygaggttyggyggygyggt

SEQ ID NO: 10348 - DNA, 201 bp, Artificial Sequence
  Description of Artificial Sequence: Synthetic polynucleotide
ttygtattttttttgatttttatggatatttagttaatagtaggaataaaaattaagatttttttttttttattygtttggatatttattttttyggttygygtygtygtgttttttattyggttatatagygattttaaaagtttagtttttatttygyggagatttygatagttttgggaggttttttttaaaagggaa

SEQ ID NO: 10349 - DNA, 201 bp, Artificial Sequence
  Description of Artificial Sequence: Synthetic polynucleotide
agtygttyggttgaygtgataagggaggtgtaggttaatayggygatttygygttttttggyggtagtgtyggagtagyggygttgtttttgatttattyggtattyggttttygggatygtttggyggttgtgaatgtagagttggggygaygtggggttygttttttgggattgggtgtgagtttgygtagtgagttat

SEQ ID NO: 10350 - DNA, 201 bp, Artificial Sequence
  Description of Artificial Sequence: Synthetic polynucleotide
aattgaaygtttgaaaygaaggtggygyggtttggataaatttgatttttygatatttttygtttttgygttygttttygttaagyggggaggagygatygttataatggattttttygtaggttttgtgygygttgggaatttagttgtygtygtttygtagagttttttgttttyggagggygtttattttygggtygt

SEQ ID NO: 10351 - DNA, 201 bp, Artificial Sequence
  Description of Artificial Sequence: Synthetic polynucleotide
gtttygggygtttgttgtttygtgtttttatygaygattttatttagttgygttaygygtygtttyggttgtyggtygygygttttgttygtyggttttygttygtaatyggyggtttagggyggattygggtttttgygttttygygagaagygyggygttgyggggtygtgggygtttgagttygygyggttttygagg

SEQ ID NO: 10352 - DNA, 294 bp, Artificial Sequence
  Description of Artificial Sequence: Synthetic polynucleotide
ttygtygtttatgtttttattgtaaggtygtagttttygtygtygatttygatttttygtttygtttagtygyggtttygttyggygtttttttttyggtggaagtttaagtttaattaattgagttygaggygggagggaagggttttgygygtygtggttygtttygtttttttttygygttttttttttygttttgggtggtatttttttygtyggtatttataataagtygttgattaatgaggtyggggtygttttatttygttyggtygggtyggggttttygyggga

SEQ ID NO: 10353 - DNA, 201 bp, Artificial Sequence
  Description of Artificial Sequence: Synthetic polynucleotide
taagtttatagaagagtaaatttttatttttygaggttgttgtggaagttatyggggttgggatagtagagaggaatttagaygggaatatygttttttygttagattttyggyggtttttttttttttttttaaatttatttttaaagttaagtgtaggttttttygttttagttagaagygttgygtgagtttttatac

SEQ ID NO: 10354 - DNA, 201 bp, Artificial Sequence
  Description of Artificial Sequence: Synthetic polynucleotide
gaggtttaygttttttagatygttatagtygttgttatagggtttgagtttgggyggygtttygtttyggtygtayggtgygtyggygttaatttttttygaaggtttyggtagttaagattgtaggtttttattaagtattgttttygaattgggttaygagagygtgtttttgattggtttgttttggaggttgggaag

SEQ ID NO: 10355 - DNA, 201 bp, Artificial Sequence
  Description of Artificial Sequence: Synthetic polynucleotide
tttttygygygtygttttttttygtygtyggtygygtgygttttygttttttttttygyggygggagtattttygttygttatttggggattygygtygygtttttygttttygttygttyggygtttatttttygygttttttgttygttggggttataattgttttttatttttyggaggggttattttgggggtggtt

SEQ ID NO: 10356 - DNA, 201 bp, Artificial Sequence
  Description of Artificial Sequence: Synthetic polynucleotide
gyggtttyggtgagyggggygaggggygggtgggtagyggygtygggggaggtygaggaggygaatggtggtgtyggggyggygggtatygggygaggtygyggttagttttttygggtyggagttgggtatygyggggayggggagtgtygggggtaggtgaggttagggtaggagtttaygyggtgggtgygaaggttt

SEQ ID NO: 10357 - DNA, 201 bp, Artificial Sequence
  Description of Artificial Sequence: Synthetic polynucleotide
ggaggygttgygttaggyggaggaggagygtaaggttaagtaygttaagatggaggyggagygygaggtygtgygttagggtattygagataaggtgygygtygggtyggtttygtttgygggaaggyggttttgagtttagyggggatttagatttygtttgggtggaaggggttgttyggaagaggggygggygttttt

SEQ ID NO: 10358 - DNA, 201 bp, Artificial Sequence
  Description of Artificial Sequence: Synthetic polynucleotide
aaagagaaaagaaatagataaaattagggtagggggtaaaaaagtttttygygtttttyggaatttagyggtygyggtygyggttatygtygtygtygtygggggtgggtttyggaagagtttgtttagtagggaaggggaggaygggttaggagygaaattttgtaggygaggaagggatagaygygtaaagaaaaagtg

SEQ ID NO: 10359 - DNA, 201 bp, Artificial Sequence
  Description of Artificial Sequence: Synthetic polynucleotide
ygygggygtagyggyggtygggtaygaggtygggttgatattattatttgttggggygygggaagaayggtagttgttttgygttgtttyggygagggaygtttggaaaaggttgaagttttgggygtttttaagttygttatttayggggttttygttattttagtttgttygtygtyggtygttttttgtgattttttg

SEQ ID NO: 10360 - DNA, 201 bp, Artificial Sequence
  Description of Artificial Sequence: Synthetic polynucleotide
ttttttagggatggttttgtgtttgggttttttttttttttaaatttyggggtggtttttgttttattagattgaatyggttttaaggagaaaagttgaygattattttgttttagttttygggaagttttgttttataaagaataagagtttttggttttgtgaaatgagttataggttgttttgattatgtttatttgg

SEQ ID NO: 10361 - DNA, 201 bp, Artificial Sequence
  Description of Artificial Sequence: Synthetic polynucleotide
ttttaaatttygatygtyggtttggygygyggttgygtttatyggtttygygttgttgtygtygttatygttatttygtygtygtttyggttygygggtygtttaggttagtattygggtyggtttgttttygtyggtygttygggtgttygtygtygygtygygtttyggtygggygtggatggagggygtygygygttt

SEQ ID NO: 10362 - DNA, 201 bp, Artificial Sequence
  Description of Artificial Sequence: Synthetic polynucleotide
yggtyggatttttttttagattgtttgyggtttgaaggggttaggttygygtaaggttttaggttgtttgggygtygggtygtattgttaggagttgttygggagtggttttttaggaatattaggtattgattatatattaggggttgggaaattaggtggtttgtattaaggyggtttyggggatttgtttgtggtaag

SEQ ID NO: 10363 - DNA, 463 bp, Artificial Sequence
  Description of Artificial Sequence: Synthetic polynucleotide
agygggygtttygtagtygtgttagygttaygttgtagtagtygagtattagttygaaaggaagtaygaaagyggttagagtttttaggtttaggtgggyggyggygtggatyggygaygggtggtatagttggtataygyggtttttttataggtggyggtagayggyggtygggayggygagtaatagggyggttagttagatygttagtagtaggyggygggttagggtygggttgygtagtygaggygttaggaaggggygggtgattgygaggtagygttgtaggttgagtaggtyggtgagtagtaygttggygtatatgttgagygygtataygtagtatatygttttgtagttygtttggtttagyggttaggtttgtygggttaggaaggttataaagagyggygtgagtagtagtatygygtygtyggttagygttaggtgtagtataagygt

SEQ ID NO: 10364 - DNA, 201 bp, Artificial Sequence
  Description of Artificial Sequence: Synthetic polynucleotide
ggggaygttagtggattggagtygyggagtttygagggaaaaattttgtaggygtygyggtygggattyggttayggttttagtttattttagtaggtgygggaggaagaggtagygtyggagtttygaggttagagagtttyggyggyggyggtygtttttttttttygagttggtttgaagtygttgggtattttyggt

SEQ ID NO: 10365 - DNA, 201 bp, Artificial Sequence
  Description of Artificial Sequence: Synthetic polynucleotide
agggttgggaggatttgtagtttttttgttggttttttttttttaggaagtyggttagtttggagtyggttgtttatttygatttatttttygtttgggyggagtaggaatgtggaagttggttygaaaggattgtgtttttttttygttaaatatttttttttygygttttttattaagttttggtyggggttgtggagc

SEQ ID NO: 10366 - DNA, 201 bp, Artificial Sequence
  Description of Artificial Sequence: Synthetic polynucleotide
agggyggagttttyggggtagaggygtttygyggtaagatygtygaagtgggtttygayggttgggtygttgttttyggggggtygaagggtgygggttygggtttygggggtyggggttttttttttagtattaygaatttgaygtygtygagtttttttattatygttaygttgttgaygaattgtttgaagyggtttt

SEQ ID NO: 10367 - DNA, 201 bp, Artificial Sequence
  Description of Artificial Sequence: Synthetic polynucleotide
yggaggaggttgyggggggtttyggtttaggygaaggaagggtaagaggttgttygatygggggyggygtygggaggtgggtgggtttaatatttaggtygggggaggggtttaagagatatygggaagggtagtygagttttaggggygggtggggtggtagttgtgtgtagtaggggatagggttgggtttttggaagt

SEQ ID NO: 10368 - DNA, 201 bp, Artificial Sequence
  Description of Artificial Sequence: Synthetic polynucleotide
tagtygatatgaygygyggygtagttaatgggaggyggagttggygttttttggtygggggggggtyggaggggtgggtttygygttttyggtgtttgtygtgtttattgaatggagagagygagygtyggttagtttattyggtygtttygtgttttagtygtagtygtygygttttttagtttagttttaagtyggatt

SEQ ID NO: 10369 - DNA, 201 bp, Artificial Sequence
  Description of Artificial Sequence: Synthetic polynucleotide
ttttttttaagtttttttttggggattgatattttattagtatagagattaataatgttagataagagatttttgattttatatttggggttttyggaaygatgtttgggagagaaaatatgaygttttttgtagaggygaattttagttygggaggagggaggtygttgggatgtgtygtyggyggtttttgggttyggt

SEQ ID NO: 10370 - DNA, 201 bp, Artificial Sequence
  Description of Artificial Sequence: Synthetic polynucleotide
agattggattygaattyggtttattttattygagyggygaygttagygttgattttaggygtgtttyggttttyggygyggtttyggtttaatygtgtaygttygyggaaggtttygtattygygttagaagtggtttgttyggggttatyggttygtaagttttyggtgttttygaggtttttgtttygtttygygyggt

SEQ ID NO: 10371 - DNA, 201 bp, Artificial Sequence
  Description of Artificial Sequence: Synthetic polynucleotide
ggggttggggagggttgtyggyggygyggyggggtyggygggaggygggaggttgygygyggygygggagygtgygtyggggttagtaggggyggggttygygyggtygtygggattggaggygygggggtagygggtagggtattttgagggtatattttyggttatttggygggagatttagttttgtygygygtygtt

SEQ ID NO: 10372 - DNA, 201 bp, Artificial Sequence
  Description of Artificial Sequence: Synthetic polynucleotide
gtttyggtygtygggygygtagtygtttttttygygttttgttygtttttatggtattttttaggaaygggaagggggtgggagtygagtyggyggtygygtygygtygaatgtgtgttttttttttyggttgtttayggyggtygaggygtattgtattttgttggygtygaagggtgttttggaatagtagagggagga

SEQ ID NO: 10373 - DNA, 201 bp, Artificial Sequence
  Description of Artificial Sequence: Synthetic polynucleotide
tttagtgttgttygggygttttttygtagtagttttagggygaggaggatggggggggttttygtaggggttatattgtyggagttttayggattygggygggayggtgaggtttttatattgagtyggtggtaaagttttygygaggatgaaggaggaatttygtgttttttattttattaggtttygtattttttggtt

SEQ ID NO: 10374 - DNA, 258 bp, Artificial Sequence
  Description of Artificial Sequence: Synthetic polynucleotide
ttttttgggataagaagtggagtggggyggttaggaygygggtygtggggatygygagggaggagggggyggtygttyggatttatttygtggggttttygygygygggygtttyggygtgtyggattatgtygtyggtagtttygggayggggaayggaggygtttaggygtygggtygygyggaaygyggagtttygggygttygtatgtttttggttttggttttttggaagggttaggtygtygttgtygtygc

SEQ ID NO: 10375 - DNA, 201 bp, Artificial Sequence
  Description of Artificial Sequence: Synthetic polynucleotide
ttyggtygttaygtttttttygagggtygtttygttttygtygggtttygygagygygyggtgggggaggggagggtttyggagygygtttgygtggggygggggyggtagtygattaggggttgggtttggtygtttagggtygggttttggttygtygtttayggtgyggagggttggtgggttttttttggtygtygg

SEQ ID NO: 10376 - DNA, 201 bp, Artificial Sequence
  Description of Artificial Sequence: Synthetic polynucleotide
tagtagttttttagagttttggtttggtagggaggggayggygttygagtagttatattgtagtttttygggtttttttttyggtyggygtaggtttygygtttaygattttttttgggagtyggatttgttttttttatygtygttattygtyggtttttgygttttttggttttygatatttygtttggtygttttttt

SEQ ID NO: 10377 - DNA, 201 bp, Artificial Sequence
  Description of Artificial Sequence: Synthetic polynucleotide
ttttygygttatttygggttygttttygttyggttttttyggagyggtygygtttttagtyggggagtttaggggttttggttygyggagtygggygygyggggggyggttggggtygtagtagggggaggttyggygttygtagtygtyggygyggggtttatygggygtgtgggtttatttyggtyggggygygayggg

SEQ ID NO: 10378 - DNA, 201 bp, Artificial Sequence
  Description of Artificial Sequence: Synthetic polynucleotide
gggtttttagtaygygttttagygtyggagtagggttagggtttttttgygattyggtttygttttagatttttttagttttyggtygyggattygggtygygtgtgagygttttttgtattttttatttttagggttygtygagagttaygattttttatagaaaatgagygataaagagattttgtattgttttgattg

SEQ ID NO: 10379 - DNA, 201 bp, Artificial Sequence
  Description of Artificial Sequence: Synthetic polynucleotide
tygggtttagggygtygtttgtagttgygygyggtygtttttagatggaatttttttattaaygtaaggttyggtyggagtagttattygggagttgggyggygaggggttatttttttttatttyggygggtgtaggatyggggggtttgggtagtaattagtggggaggagygttggattgtgtaygtygagttyggta

SEQ ID NO: 10380 - DNA, 201 bp, Artificial Sequence
  Description of Artificial Sequence: Synthetic polynucleotide
ttygttttattttttgtttgttttyggttgttagagatttaggtgtagagagattttagaggtggygttyggggttttggygttttttttgyggaygttygttgtagagtaggaagtygtygtttyggggyggaggggygagtygggttagggggtyggggtggagaggtttgtagggtttgygygttttttttattygyg

SEQ ID NO: 10381 - DNA, 201 bp, Artificial Sequence
  Description of Artificial Sequence: Synthetic polynucleotide
agtattaggttyggtttttygtatatygtttygaatttygggggtaygggygygggtttttygggtttttygggggaygyggggtttttaagttaaaygygyggttygggggayggygtygygggttttttygggtaygygygttttttaggggaygygagttttttyggggaygyggygttygygttgtyggttttttat

SEQ ID NO: 10382 - DNA, 201 bp, Artificial Sequence
  Description of Artificial Sequence: Synthetic polynucleotide
ttttyggtygaggaggggtygygtggygtygyggggggygggtygygtaygtttttygtagggaggatttagggatagttagggtttygggagagttygygygtatygttyggtttygyggygttagttatggygttygtgygtggtttygttagggatggggygaygyggttagagtygtaygygatygaaattygtatt

SEQ ID NO: 10383 - DNA, 201 bp, Artificial Sequence
  Description of Artificial Sequence: Synthetic polynucleotide
gttagaaaggatygagaaaaattttaaagttttaagtttgagttagggagggttttagagggaggtttgattgtagatygggagtttttttttttygtgygtygttgttygggaygagaaattygtggggtatttaggattaggataygaggttttagtttgggtaggtggataagttgtggggttttatttttygtaggc

SEQ ID NO: 10384 - DNA, 201 bp, Artificial Sequence
  Description of Artificial Sequence: Synthetic polynucleotide
gtygttgagtaygygttttaggtaggttttgggaagttygggatggaagtagttttttttttttygtttttttttttttttttttttttttttttttttygygtttttttttttttttttgttttttttggaygtgggttgtyggttgtagttyggagggayggggygygggayggagtttttygygggaggaggggtygg

SEQ ID NO: 10385 - DNA, 203 bp, Artificial Sequence
  Description of Artificial Sequence: Synthetic polynucleotide
gtaggagyggttygtgttygygggygggagygtgyggtttggattgtttygtyggataggtattgttttttygttttttygggttygaggygggtygygygygtyggtygtygttygggygtttygyggtgggygagatgygtygygttygttttatgtttgtygttygygygttttttgttttttatttygtagtygttygt

SEQ ID NO: 10386 - DNA, 201 bp, Artificial Sequence
  Description of Artificial Sequence: Synthetic polynucleotide
tttttygtagagggtaggatatttattttttygtgtatttgtttttttttyggtttttygtttttagtagtattttaggatttaggggtgttatygggtyggggagggaggggttgagtttgggtttggggatatygggatagggggaggggttggygttttygtttggtygggatttygtggtttagygyggttttayga

SEQ ID NO: 10387 - DNA, 201 bp, Artificial Sequence
  Description of Artificial Sequence: Synthetic polynucleotide
agygtttgtttaatttgtagtgatatygtttagttgtttagggttttagttgttatagttaattagttygyggtyggggaggagygtygggtaggggggygggggggtatgaaggggtyggygggggaggttgtgggggttgtaggaggggtaggygtaggaggaggtttgtggtttttaggttyggttygtttttttagg

SEQ ID NO: 10388 - DNA, 201 bp, Artificial Sequence
  Description of Artificial Sequence: Synthetic polynucleotide
gggygtattgggygaaggygaygygyggttygtgggtgtagygttgggygttttgaggaggtttttgttgyggtttygggygtttgtgyggtttttgagygyggagttgggatygygttttttttygttattggaygaygtgagtaaaygtttygttttygggtttygtttttgtygttgttatygttttygtttttttag

SEQ ID NO: 10389 - DNA, 201 bp, Artificial Sequence
  Description of Artificial Sequence: Synthetic polynucleotide
taggtagaggggggygggagggggtgtgagggagaggaggagtyggagtygtygttgyggtttttttyggggaggggagaggagaatttttttttttttygtttttttttagtttttygttggttygggagggggtggggygtygaggtygyggygattyggtagggtttggtyggtgaagagtaggygggyggggtgygg

SEQ ID NO: 10390 - DNA, 201 bp, Artificial Sequence
  Description of Artificial Sequence: Synthetic polynucleotide
ttaattttgygttttttttttagttygagttttttygttgtttttttttttttttttttygagtttttttttttttggygyggygtygttagttagtttyggyggggagagtgtaggtattttgtttttagaataattagtaggatttaagtyggtttttygagygygttttttttttttttttttgtttttttttttygg

SEQ ID NO: 10391 - DNA, 201 bp, Artificial Sequence
  Description of Artificial Sequence: Synthetic polynucleotide
ygyggayggygttygatagtagttggaggagyggtttgtygatttggyggygagttatttggaggttattygtgygygggaygagtgggatyggtagaaygygyggttgygttaggagaaygttyggttgyggttygagaatyggyggttgaagygygagaatygtagtttttttygttaggttttgyggtttttyggyga

SEQ ID NO: 10392 - DNA, 201 bp, Artificial Sequence
  Description of Artificial Sequence: Synthetic polynucleotide
ttygttttttygttttagttygygtatttatygygtaygtagagtagtgatatggtygaggatygggtaagtttttgtygygttttagtygygtyggatygttttttttttttttttagtaggtgtygygattgttttygttatyggttttaygggtttggtagttttttatggtttyggtygtaggtagygtttygtygt

SEQ ID NO: 10393 - DNA, 201 bp, Artificial Sequence
  Description of Artificial Sequence: Synthetic polynucleotide
tggttattgttgygtaggygtagttttgggagyggygggagttggaagtttaggagttttagggggygtagggtygggtagaaggyggygagttgggggyggatatttatyggggattggaagyggttygygtaggttggggatattyggggttagggygggtygtttggggtgggagagtatagtgaggaagtttgaygt

SEQ ID NO: 10394 - DNA, 201 bp, Artificial Sequence
  Description of Artificial Sequence: Synthetic polynucleotide
ttggggaygtygtagttyggttyggggagggggygttaggtygggagtygtagygygggagggaygagttygggtyggyggggggaggggagygggaagygtttttgttgttggygatygggattttttttyggtataggggaaaggyggggaagttattttttatygggtttgtgtttttgagaggattttttgatggtt

SEQ ID NO: 10395 - DNA, 201 bp, Artificial Sequence
  Description of Artificial Sequence: Synthetic polynucleotide
ggtttttgggaggygtygygtgggggygyggttygtggagttygggygttagggatyggtyggggtyggygtaygggtgygttttgggttygttygggtygtgggagttagggagttagggagttagggatttyggttttygtayggggtagataggggtagygygggygattyggagygtttgygttttygyggtttttt

SEQ ID NO: 10396 - DNA, 523 bp, Artificial Sequence
  Description of Artificial Sequence: Synthetic polynucleotide
agagtatygggttttttattgttttagagygygtgtgyggttttgggygygtatagtgayggtgayggtatttttggttyggtagygtygaggtygtttygttagatagttagyggtyggyggtaggtygggttatgagyggtaggggtygggtygggtttygttgattttggtttygygyggtagtttttttagttttygtttyggtttttyggtatgagagttygttygggttyggggttgyggttgttttagattygtygtaygttggygygtttygggttygyggagtygyggtgttgatatttgygtygtattgygtygttygttygttygttgtgtgtttygggggygyggttatggaggtggtgggtgatttygagtatagtaagagggatttygtgggatayggggttttygtygtggtttttygggggyggtatygttaggtgagygtyggtyggggygaggtygggtttygggyggtaggtayggggttaggtggttttgaaatttggygtag

SEQ ID NO: 10397 - DNA, 201 bp, Artificial Sequence
  Description of Artificial Sequence: Synthetic polynucleotide
yggyggtaggygggggagggggtgggggtgtaggggyggtttygygggtygyggggggggygygyggygtagyggggtttygggyggggygtagygggtygyggggtttygggygygtttttygygttattttagtgttatggtgygttygttgagtygtygggtttagagttggggttggyggyggagggataygggtyg

SEQ ID NO: 10398 - DNA, 201 bp, Artificial Sequence
  Description of Artificial Sequence: Synthetic polynucleotide
ygttttttygttttttyggtatttgtttattttygtaattgtttyggtttttaatatttgtatygtttaatttttttttttttygttttttgtttttttygtatttgttyggagttttagtatttgtttygtttttygttatttttttttttgttggtttgatggggtgtgggtttaagggagttatatttgggyggaggt

SEQ ID NO: 10399 - DNA, 201 bp, Artificial Sequence
  Description of Artificial Sequence: Synthetic polynucleotide
tttyggtttgayggaatataggygaygtaygtgaagtttaggttttattttagygtaggygggtttttagygatttatagttgttatatattyggttagygtygattttygaaggygtattttttatattttatttygagtatyggttttatygttagggaaggtttttttggatagtaaggtyggggtttaggatttgyg

SEQ ID NO: 10400 - DNA, 201 bp, Artificial Sequence
  Description of Artificial Sequence: Synthetic polynucleotide
yggtaattttttttatygttttttgtagtaggygtygagtygtygttattttgtttttygttttttttttttttttatygatatttatatagygaaaatyggttyggtyggtttgyggtttttattttaygtttgtagttttygttttttygttaggttttatttyggygyggtgttttaggtyggtygyggagtygattc

SEQ ID NO: 10401 - DNA, 201 bp, Artificial Sequence
  Description of Artificial Sequence: Synthetic polynucleotide
ygtyggygggygggaggtatataygygygtataagyggaaagaaagygggtttattgygtggggatgttygttygygtagttgtttyggyggyggyggtygttgtttgtatygaggtygaggygyggyggtggyggyggyggttgyggattgagtttttttygtygggyggtggatgtagggygygggaggggygygaggg

SEQ ID NO: 10402 - DNA, 201 bp, Artificial Sequence
  Description of Artificial Sequence: Synthetic polynucleotide
tttttygttagygtttttygttygttygttttttttyggtttygtttygyggggttgttggagaaattaagtttggggttttttttgtygagtayggggygagttttagaaggttttgtygtgatggaaaatttttaggtaaattttttygggttygtggtttttaggtygggaagttttygttaygtgaagggttttygt

SEQ ID NO: 10403 - DNA, 201 bp, Artificial Sequence
  Description of Artificial Sequence: Synthetic polynucleotide
tttttatatagaaaatttgtattagttatgtaagttaaaaagttgtgtgaatttaggtgtttyggaaaggggttgtaggatatagtaaaatgttagtagygtgtyggattttttttttttatttttttttttaaagaatagaggttaggaaaaatattggttgggaygttagaagggttatgtgttaattataattatatt

SEQ ID NO: 10404 - DNA, 301 bp, Artificial Sequence
  Description of Artificial Sequence: Synthetic polynucleotide
gyggatggggttttgattagttgtggatttttgttttagygtatttatttaatygtgttttttttggttggtagagggygttaaaggygaygtgtyggtygttagttttaggtygagtttygagygtttgtaggaataygtttttttattyggygygggaygtagagttgygagagaattttgtttagygyggatttaaygttagggygtygtttagaggttggtttttgtttyggttttattygtygggagattatagagttgtttttttagtygttygtygttagaaattggaaaaaaa

SEQ ID NO: 10405 - DNA, 223 bp, Artificial Sequence
  Description of Artificial Sequence: Synthetic polynucleotide
ttagagttgtaygtagatgaataygaagagtagygygtagaatayggtgtagaygayggtgaggttaagttttaygtaggggggtayggtyggggttagygtgggyggtagygagtygttgygggttgggttttayggyggggtttttatygggtygggggygttgtygygyggtyggggaygttygggttttatyggggtttayggtygtygtygttttygc

SEQ ID NO: 10406 - DNA, 720 bp, Artificial Sequence
  Description of Artificial Sequence: Synthetic polynucleotide
tagttgaatgaatgggggaggaaggygggygtyggttttttttygygygttgygttttygtttygttttygtttttygggyggattaggttttygtattygtatyggtttttttgtttygtattggttgtttygttygtttgttaaggttaggtttggggggttggggttygagtggtygttgggggatagttttgggtataygatyggagygtttttttttttttygtttggttygygtttaggggayggygagagaygyggttttagttttttttttygggygtttygttgyggttagatgtgggyggatgtggaggtygggttatggygaggagggygggygtttagaggggaagagattttttttttttttygggygtagggtttttttgtaggaggttgtatttgggtagttaaataaagttttttgttatygtygtygygygttttgygtttgtaagggttaaayggtagygtaygyggttggtaggtaggatttyggtttgtgggtttaagagtygaggggygtagggygaatatgygagttttatggtattagygagaggttattaatttttatttatygagggtatttttgtagttaatatttttattaygattatygtttygggggttatygttgtatttttttgggtgagttttggagaaggtattgttygggagaaggggtatagggyggggatggaatayggttgtt
